United States Patent Application Publication US 2009/0119022 A1 - sequence listing, part 2

SEQ ID NO: 1212 - DNA, 2493 bp, Emericella nidulans
agtaattataccggaactgcacacggtgtaggtgccggaggacgtgttgggttagggctaaatcactttgggagcacgatatctgtacctcgaagggcatgaggtcccggccgcgcagcctctttagttaaaatctccggagcctgcacggaaaagctgccaagagaccgtcccctgcaccgcatccatgccctcaagagtgagtcgtagcgttcaaaaaaacgagatactgtcgctgcctcgatccacagcagttgtggttatatgtgggagcggatacgggttctctattaaacgatctaaccaaccaacgcagctgcaggcccgctggtcctcggtaacctcttgctcgtcaacctcgcccagagacctgatcatatattgtgatcggtagtctaaggcttcttcacgtgacgatcggcccagctggaccggtgttggtccagccgtgtagttgtttaccgtatttgttgtctttcgcatcagagatcatgaagtctcgtatcgataggccttcctgtttactcgacttctacgctcagagtatgccactgccccgtacttattacccagatagcttggccttcacaatgtcactgctagtaaattaggtagatggacagacggcgtcgtctatccgacagaacagccgtcccaagttcccggttctgagccgttattgaaaaacatctctataggaaaacaaagtatccgctctatatagcattaggcgttcgaattctctgttcttgcattaggcatgtttacaacttacctaccttctccggcataccgggacttttcctctggttcgactttcatcattccaggggttacgtcatggagtcacctgcctaacacccgcggaaatgcgacatcacttctttactaatatgagttattgcaaccaaaccgaccagacataccggcgtacattagtacggctggcaccagtacttcaaagggtcgcctatgtttgtccacacactcgtatcccgttctcaaaaaaactgcggagtcctccaccaagaatggcggggcagatctccggtgtcggccaaggcctagaacgacgatctgtggtctcgtccttcatcttccacttacctacctctctctctgaccagccccttgtcgcactatttaaacgaagcgacaaagtaagtacatacaagtaggttaaccgtccgcctttctgagtcccccacctaattcccggcgaaacagaaatcacatcgcaccaatctccggcaccatctcccgcaacgacaaagacgccctcacggctgcatggcgcgaactttctgaagagaccgggatcaacccgtcttctgcaacattttggcgaacagggaaaccattttcatttgtcgatgagtcgattaatcgggaatggacgatctatccgttcgctttccagctcaagggcacggctgtggggtcgagaagggacagcgcagtagagttggattgggagcatgagggatgggaatggtataatcctacggatgtgcttatagggaacgggctccaggggaagggaaaagaagtcccccatcttcgggagagtctgagacgggtatggccggaaggggaactaaattcgaaagcggggaaggctctaagacggggattagaaaagctccagaatgaccatgagagtgggtcgcatgagcttacatccgttgcgttgggagtattccgggacgtggtcaagcatatgccagatggaatgggcggtgctaagtggtgggaggatctgcaaatgattgcctggcatattgtaaagaatgggagagagagtatgggcgcggcaactctgaacgctctcctcgcaatactggaggaaatggaggagatctggaggcttgagactgggagaattgactctgatgcggggtggaagctggaacgcatgctcacgatcattgatcaccatttgaaaagtcggatgagtcgcgctggtttggtgaaggatatgtttgccgcttacgtgcgggaccactttttgccggacggcaagccgagagacaagcttaccatcctcaccctgtccgctagctcgacgattcgtgatagtatcattgaagctttcgcctctctggaaattgcaacactcgaactacgtgtcctcgaatcccgccctctgtttgaaggtgtcagtatctcatcctccatattgtccaaattcaaaacacaatgcaaagagcctagcaagcatctcaacatcaccatctacactgacgcagcggctgccatagccgctaacgacgtggacatggttctcctcggcgctgacaggatttccatctcgaaaggcgtgacgaataaaacaggctctcttcctgccgttctgtgtgcgacgagtttccccaaaggtgaagattgtcgtcctcagcgagctcgaaaaggtaaatgggaataatggcgtcatagatgatgcaaagcatgaagacaatgacccagctgagctcatccggccctggcagaacg

SEQ ID NO: 1213 - DNA, 1270 bp, Emericella nidulans
cctcaggtcacatacactttacagaaatcctctttcgcctctccacctgacagcccacctatcgcaattcctggcgtgtcgcgtgctaccatctccgcgcagcaccgttttcgcagctctagatccagtcccccttgaataatgcagaataaattctgcgtttctggggttttgtgggctgcaatgcaccgatctagccagcgcaccgagcgctccatggcttcatgaatccgttcgtgatctggcgatgtagtcgctatcacatcgtcaagctgcatgataatatcggacccaatggaattctgtagtgagattgagtgttccggtgtgagcagcctgttttcgtcagtgaacatgcccgtaatactaaactcaaacgtacatcggcgtgccatcgtgcggtgacagaaaccggacaccctcctcagtgacttccgcgagctcgagaagagaaaccatttgaaagccaccgctgtctgttaggatgttgcgattccagccttgcagcgcatgtgctccccctacctcatccagtacagcctgccctggcttcaagccaaggtggtacgtgttattgaggcagagcatgcaccctgtttgtttcaattggtcatatgtaaggcccttgagacttgcctgtgtcgcgacaggcatgaagattgggagcgagacggatccatgagggaggtggagggtgcttgcgcgcgctttagtagtctatgcattcactatcagcatattattcaacaactgaaatgcttcgacctacagaacacttccgatgcaaatcaaaagtaagcgcagaaggcatggccttccgcggcggggttgtcgacatggaccgagcgagtggctgccagacggcgttcagaacgcgatgttgcagatatagtgatcttctcaccctagtaatgtttctcatcaaagtgattgtatagctttggggaataatgaggaagcattgactgtttgttcatgtgctccagtgtcctgataatttggagaaatgtttgcacagtttgactcacttatcagcaatacagtacagtaacgctaaaaccgcttatcttatcagcggtctcagcctctattctgcccaaccaattcctacgaggccttcctcttgaaagcaaacaaccgtgaggttaagcaaactgccacggtagaaagcttccaaaggcaggaaatgcgctaaggtgcccctcgggggtaagataagtttccagcagtcaatactgacatggattaactttggacagatctcgatttg

SEQ ID NO: 1214 - DNA, 1539 bp, Emericella nidulans
ctcactcggcttcggttgagcattctggagtcgttccgctccgtccccacttcggatgcagcatcctccgcagaagcaaaggtctcggatgtcggcgtcggaggtatgtcctgaacttgctgctgctcaagttcggcgatcgccctgctgagaccgacctcttcattccatacatcgagaaatcgaactccccgagttacgattcggaaagctttcagaagcatctggtcgaccatgtactcgacctcgtcctgcatcggctccccgctggaaatttcctggaatttcttcgtggtccgcacaagcgacgaaagatctgacaataatgctttgcgattccgtcggaggccctcgtggctcttcaccaaggatgagtcgcgtgtgagacagtctgatttctccaggagaaaccgaacacccgcaatcagaccccgtacgaggtcctgattgccaaagtcaatcagaggtgatccacatcctcctcggatgatgtcccagaaatccgtcaaggccttgagtagtggacgcatcggagcctggtcgtatgcttcgcagtagttggtgggtaaccagccccgatcgcctgtgtccagcagcgtcccgtcggcccagccattggtgtgaacagagtgtactagaatgatgtcgccttgatcaagaggtagagtaactgttgatggagaaacgtctccagtcgggtggaaaggataaaatgctcgaaggtagttgtggaagaccgtccggttgctttctgaacgatccatctcgctgtcgtcagtagtcgtatgaggtgttgttggtggtgtgatctgactttcgttggaatagaatcggtttataatgggccgaaagttatttcccttttcaatcttcaatggcgcaatatgggccttcatttgatccatttcgtatgttccagcatatgattttgcgaatgtagacaggtccaggccaccggcgaccagtaattaacacacggtagaatcaatgagcatcctcacattcgaatacgggcaagagagtggctgcgggagaatgtcgcgtccaacaatagaattgcgattgagaactagttgaaaggatggttggggatagtgggcgatgcgcttagcatccaacactgggaaacatcacgtcaacaacttgatttccttcttccaagcggctgggagagtgtttgaggggggatggcaatgttttgctagggttgtggcgcggatcaccggggaaagaatgtcgggatggattctagggagccaggaatgggaggaatgccggtctcgggcaaccggttgctaagctgccaacgtacctagtaagccaactgaacatataacaagcaaaagagaacaagcgcgactgtcgttgttctggtctcatagaaaaggaagcacgttctctaaggcgtcgaacgatgcagtgaagtcgtcgacaggcacgaggacggggaattggcggccgtagcaagggaaggatcaaacaaggatcctagcaactgtcgaatagcactaatggtctcaatgacgcacacgatgatta

SEQ ID NO: 1215 - DNA, 2029 bp, Emericella nidulans
cctccagatccttgcttggtcgccgtcgtcctaatcgctcgttcgcgcgctggtcctcgcttcgtgttccattaccctcccagaccgctcgccgataacgccctgcgaccccccaaagcaagacgtacctcacgatcaaggagtaggcagaactcgaaaggcaacgactccacttccagtgacgacagtcattcaagttctgatgaggatgaggaggaagctcctagtcagaacctgaacaatagcaacaacagcaacaacaacagctatattgcagggagcaggagatcgagcaactttggacttgacgactcaaataccctgagtgagaccaacggcccgggtcgatcagctcatctagagcttatttgagaaaacgcggtgcaaattcggatgccgagactgattctggcgtcgggtctgatcgacaagaagacggatcaagggagtcggacggtcctaaccgagtgccgtgggagtcaatattaggtctcccggttgatgtatgggaaaagctactgagcccgtcgcgctcgtggcacaaaagacgctttgagctcgggattaatgaccttgcgttcgtcggatggccggtctttgttcgcgaagatggaaattggagaaaacaacgacgaaagaaaaagaagaaacagcgcgcagaatgggaaagcggggagcttggccataacgatgcgacagaagattctcaggacgatggtaacgatgctgttgcagcatcgaccgagaccctgagtccgttctcggcgcttcatcccatatcccaacggccgtccgtacctaacagtcgatcttcgcaaatgtcaagcgagccattagatgctgacgacaaggatatgatgactatgttcaatgtcgtctttgttctggatccgcccttgctagaatattcaatgcgtgtacgagagatatatgacaacgtcatcaagaaattctccaaagctttgaagtgggaacagtctcggacaaactacgtatggagggaatgccagcacatcttgaacattaaggagaaggcaaaagaaaaaagtactaaatgaccgcccagtaactccctacggaaactaatgtgtgctggcagggtcatctctgaacagtctttacgccgacataatcagccagtcatcccttgccagagcgatccgtactctgtataccagtatatcagcttcgaagattgcatctgtcactttgagccctgacgtgtccatatctcttcagataccgccattgacctcgacgccgtacctcccaggaccgaccgaccaagcatacccgggactctggctcactacggcagacagcataagtcccgcggatgatccaatgaccgacgacaatagcgcgcctcatcaagttttggccaagcactttgcactactgttgctcgacaatgaggcgaccataataaaggacgtggaagcggctgggggaagcgttagccccaccactggttcattacattcgctgctccagtccaacaaagtcctttgttcaaatctcacagatttctgggatgcctttgcctacgatccaattcctagcaagccatctggtttactggcgaagagctcgcgcaattcctccccttcaccagccggatacctatatcgactcaccgcattgcgatcttagcaaactagaggttgcgtcggccgcctataaagtggctttcccaactctccccagcctcccgaaaatgttatcagctttgagtgggacaccaaggccttacggaaacttcattccaagtaaggaccacaaagccacctactttctgatattggcatggctattgcgaggcggttgggttacgcaacttcggtcttttgctcgagtgaaagtatctcctgaaatcaaaatggctgttgaactagccatccgacgagaggaggtagacaaatacttgagcaaaggtaaaccgccagtggctacatcggacaaggaggattccgtgaatgataaaagaactgagggcagtgatttcgacggtgcctcgtcgtcctcctca

SEQ ID NO: 1216 - DNA, 2468 bp, Emericella nidulans
gttggcgtttctttgtggcgtgtttgtgtggcatagacgctggaattcgtgcgggatagattagatttagactctaaaaagaggattcttgggaaaccaccactttgcccaatatttttctcggaataaactaaattgcggtccttgtttgtctctggtccagggcctttcaagcatcctttgtcctttcacgaaagacgctgtcaggggaatcggttgccctaagagttatattcatagatcaccaagatgtatcatagaattctttactctgatctcaccccctcttctgcagttgaacgatcaatcctcttgccccctcctttggcgcaggatcgaaaaaatcatgtgccatctcaatatcctccctcgtcaccccgctcagagaaatctcataccgtcgaaaaagtactgccagcaccaagtaaatctccgcatacgccaggttcattcccagacacatgcggctgcccttgctgaaggggacgaagtggcgattcattgcctgcacagtctcaaaatctgcctcgaaccagcgctctggacggaattcccgcggctgagggaatactactggattgtcgtgcatgaagatcgatgtcattccaactggtgttcctgctgggatggtcactcctgagtatattaggggctcttcggcgatcagttggagtctatgcgtgacgccgtaggaaatccgtagaccttcctttatgcacgctgacaggtacgggaggcgttcgaggtaggccgtatcagacatggacagaatatccatattttctagagcaccgtcgacctctgctcgaagtttccgaaagatgtcgggatcattgaggacgtggaagattatcgtcttcaatgcattcccggtcgttaatgtccccgcgccgatgagcgtctgcccttcgcccttgagtcggtccactgtcttttcgtgctgtgggagggtactcgagaggaggaagtcgaagacggtcaaagggtcagctggcttgtcaacggcggcggctcgatcaacaagcggttgaatctgggcgctcattctctatccatcgttagcatcaatctcctcttaattttactgttaaggggaaaaggtacctcttgtatttgaaacaacaacgcaacccccggcagcaaagccctaacaagagctttcggcgcccatttacaaaccaccaagatccacggacactgctttaccagatggccgagctctgacggagcgcttaccatatcaatccactcctttccaaagttatctttcccaatcaactccagtgactgtccgaaacagtactctgtgatgacgtcggccgcgaacgctgtaagtccgatccccaagtccacatcctgtcttgtaaaagcgaacccatcgagccgactacatagccgcgctagggtatgttgcaggtgcggtgttagccgctggatagcgctctttgagaagagagggttcaatgcactccttcttagtctgtggtgttcgtgccggacggttgcaaaggcagaggtgttgttcccgaacattcgtgcagcccagagccatttatgtcgtcgacgagttgggcctgtgtacagcacgggatagaaggaggggtcttggatgtggatttcgaatgggttaatgcggactagcgggcctatatatacgttctttgttagcggcggtgagaatccaggtggctctgaactgtttgagacggtaaaagaagggaggcaaaccgtatgtctgatgcatcttgtcaatttgtcgaaaatactgtccccgctggacgacgtcgtagtagaattcaggccaaaacgacagtgcggctagagttgggccgggaatatggcgaatggggctcaggaggaggcgcgttgtggctaggtatagtgtatacaagagggttaggactaggaggagcgcccatgctgggaaagagaatactaggtcgagactcagcatgttgctgttcttgttcttgggagtctgccatgccgctggtaaagcctggctcagcttatatgcttacatctggttaaccggggggatgtggtgaagtatgtaagacgcagtctcaaagacggtgaggatatcgtattggatctagtggcaggtttctattctgcaaggagctattgaagtttctgcgtctcattgcatcaggttcacagcgaatgcaaaatgtaaggagacaaccccaaagcctgtctaggtaagacatgaagggtgtacatacatggcatgacacaatcaatgcatccaacatcgtctaataccaatattcatcgatgtacatggcgagattaaaccaaattccaacataaccaattccttccaggtcagatcaaatgatttcacacaccatgcgctcaacaacatcattcaggtccttcgcgatttcatcggcaacagaatgctcgacaacaccgtcagcatactcaactgtccaacccgtgacctatccggcatgcgcatc

SEQ ID NO: 1217 - DNA, 2821 bp, Emericella nidulans
gcgtgaagatagtagatgtagaatgtgccgcctgctatggagccgaggacggcgatgatgatgatggctataattgtattttcgttcattttggtgttggcagtatagcgccaagtagagtagctgagtacagtatatgagaatggacagtttgggagctcatttgatccgcagctgctctgattatcgaacataaatatgtttaggaaggcattaagagaaaggggagagacagtggtgaggagtcttagctagctggcaagactacaaaggagggatttaacggatgtgttagagcatggagagtacgatcagaacaggaggaggaggtagttgaggtaatcgaccatcgattgagcctatatcagcataccacactaagcaagaacagaatacctcaacaccgaatcggtctattctaaacttttatctatactcacgtagtcaagcaattcaaaccacatcacgtcctagaaagagccatcccgaccctttccaatagatcaacatgaagcagccctgactttccggtttctagcagccgtcccaacttctccttaagggcaccctgagcatcggtacctaacaacccagaagactcgagctcttttgaagccaaaacaccagcaagactaattaccctcaccccaagcgtataggcctcaggcttcgccatccatcccacaaggccgtcctcaccatcagggcgagcaaaaatatctgaaagacagtccagaccgtcagagacccaggaatagagctccttcagtagtttctcttcgcacgtggccttatccaaccgtgtcagaacaaccgaccacaggtcaatctcgcggacggattcgatgaacagattctgcttctcctcttcaaacaggaccgtgctctcttttctgatctcagcggttgtttcagacacgggtacgaaaggctttctactactggagtcaccgactctcggctccaagccaagaatataccgtgttgctctggtgaagaggagcttcgagctggagaaattatccgcgacgaaagctgcaaatagctcgcttgctttcatgggggacagagccactgccttctgatgcgagacggaggagtacgagagaacatatgaggcggttgaggcggcaatgtcccgtaattcttcgtcgtcatcattgagcaggtcatatagaatgaggtatatctccagaaaaggctgatccactcgtgggggttgtcttggaggacgatatgctcgcgcaaacgcggagatggatgttgctgcggcgtagcgggtggaaaattcctgagctttgtcagtaaactctgatcctctagttgggagtacgctcataccgtttcttcagccagcgcaaacctaagccgtgttgcccattctctgacctcggtttccagaatctcatggtcccgagtaatggacttcagaccaatgaggcagccttccaactgcaagtccgcatctgctctgtctctgttgaaacctttggtcgttgaaccaatcttcacctgcgcggccaggtcttcccaagccagcgctggtactagtgctgcatcttttgtttcgagtgcaacctgaagatacgatgcaaggtttaggattgcagggatcttgacttccaagggaggctttccgacgattattgaggcgtagagcccggctaatagctttgtgtattcgtccttggctgcaaatgtttcgtgcaacctttccagaagccattggcaggcgttgggatccagagtggcaactttctgtatgaaggtctctaggttttcggtatcaccctttgtgagtgctttcaaggtcatagcccaagctagttctctgcgaaggagcgaaaacgcgcgtgttgtgcttaaggtagtgaaggaggggttgctggaatcgaatacaaagtccacagtgtcggaaatattatacgtgtcgaagatatagtctaaaagatccacggtttcacctgtcatagtcagaaatctctctcatgctaataaaagacgacatccttaccttcggcacctgattcaacactcctttcaacggcatcactaagcatctctaggagggttgtttgaacaaatggggatctggccagcaagtacgtctctgcaaagactgacttgatgaccgacttggttgcctcaagacgctctttgacatgttagaaagagcctgttcatattttaagggggcgggggcataccgttccacaaagccgaaggtgtaaatgccaaccggcggagcgaatatcttacgcacagagactctccatgtaggtaattttcggtctccgcgtctctcgcattgagcagtgactgaatatcatgtaggatggttgatcgatccaacaacgaagcataaactcgagctgcatgctcccggataccccagacatggctcttaagatgctcccgtatcaggccaagtaacttagcgtcatccgtatccgcagcattgggaatcttttcagcaatcagttccagggctgggaacactcgctcggtaaccatagcgctatcggctttttcagcaccatttgctttctgtggcgggacaagtaggttggagagtagttgtacaagaccgggatacttctggaacgaaatccgcgccccaggctctgacccggatttgcctccaaatccctggaaatcggtacgacacatgcgattcatcaaggcacggaagagcatcaaaccagaggtccgaaggggccatctgggcaagtagaaacgacctaaaagtgaggaatgcaactacattggagacccaagcctccgctggagattaaggtggcataggaagctaattggaggc

SEQ ID NO: 1218 - DNA, 6759 bp, Emericella nidulans
ggctgaagctaaagcacctgtaccattaacgtaaagactggaaacggttattgtttggcgccaaatcaatgtcctggcgggagctaaagggttatttctgatcaaatcagactcctaatactagtatgattcgattgtgaacgtgttggactcctaaccttggcgctatagaaaattgcaagtgctatccataatgaatatatacagtaaacagacttgcataaattatcaatatgtggtatcattgcattccaacaagaaggccaatatcactaggagatacgaaagaaaacagcctgcaccgagaaggatatatgatgggcactgtagatagaaaacgaagacatattgcttccaagaagtcgcttcacatgatgacacacttgctccgctttttgcttctctcatagatggttcgctcattccactcctcaatgcgccttcgccattgctgttccggcgcaacagactgcgaacttgagtgtgtggggtctgtcgatgcccggcggttgcggagcgctgccgctgacagaggcggctgataatcgtaagattgagtgcggtcgtggtgtcgagcactgggatattggactggggtcggtgtctctggtgtttctggtatgagttgtgcggggatgaggtttggcgacgatagagagtagagataattgttcatggcaggtggagttggtgggactgccggcatgacgagttgtgagttggtgacttgtgtgttgtttgggatctgaatagtcatgggctgcgcatgagcctgtaacgttgcgacaagaggatctgtgtatgtgacatttggcaccactggcacggcgttcggcaccaattgaggagaaacaaggaaatcctgcggttgcaccgagacagcggactcgttgacgctacttagcggttgaacttgtgagccagagcctgctcttcctcgagcccagctgtgatgccttcgatgaacatcggaagtcgagctctcccccacatgtcgtctcatccgagaggccaagttagggccggtgacggtgttcaacctatgcaacgaaggtcgagatgaagtatcgggcgagaaacgtgttgaaagagacctccgaaatgactctactgcgttctggctgtacctctgcggtgaaggaagcagagtccttctgaggtaatcagggagcggcacgtctgcctcccgcgagtaaggagggggcgggggaacccagttgtctgcatcgctttcgtgagggatctggaaataagcgggaacggagggttcttgcaacacgcggcgggattcatgtgcgactcgtctgcgacttgcagcagcagccgtagcagcacgtcgtaatgtgtcttgagatcgcggctgcgtgttgtcgtaagggctgtctaggataggaggtatttcaccgtctgcaacctcatttgaggagccagagagataggagctgtttctgcgagggcgtgggcggttatttgaacttgccgccggatacgactcccgatttcctctgccagtgctgccccggtgtatacgagttcttctcctttccaattcgacttcagtgtctagactagcattcggctcacggagtagcacaggctctgcctcaccaatctcgataacgagctccgtcacatttccattcgtggttgagcatgtaaaatccgatattaggattcttccaccgtcaagaggtacgtcctcttcgccaaaacttgcatggtcaacaccaccaggtgccacagcggccagccgccgttgctcacccgtgctatcattgcgccgtacccagcgagcagcagtgatgccaggtatatcagttaccttgtgaccagtaatgagtaccttcggccggtttatggtctgctgcagccggtttagggtttgttcctgcagctgtaaccacggttgactgattttgagcagtgccacgaggtctgtggcccgctggcattctgcgccacaggggcaatatcaatgccgatcaggcagaccgtacacccaaactccagagccttgaaatcctagggcaacaagttcgcccccacaatctgcgcgggccatcatcataggcgggtgttctatattcgtatcttcagatatggggctggcaaagtatgttgtgccagaactagccttagtgagtccagttgctctgaaaactttgagtttgttatcaaaccccataatccaactaccttcgccctctgtgtgtaaaggcaccaaacaagcataactgtaattttggacaacctctgggaagagtatctgagtggtccacatccgaacctgaacgtctttgatggagagctccggctcttgctcaccatagagcggcacggttatactaaccagacttcctgttgaatgattgttggacgagcccaggaggatgacaccatccgaggagaacgacagcgagtcgaccccagcacatcgaacagcccttcgctcagttgctagagctgtctccccgatagcgtacacttcaatcatgtcatcgtacgcaatagcaaggacactaccagccggggaaaaggctaaagtacgcggaacatggtttagtttgaggtcctgtataagtttcgcttctgcgctagaaaggctgtaaatgttgacttgatgacttgaagacacaaccgcaagaagcgacccgtcgtccagaatagtagcatgaagcgggcgccgcagagtcttgagttcatacttcaccgccggcgggtccgatgccacgtccaacacgacaatccgggaagagctgatgcagaggatgagttggccgtcttgagaaaaagcaaaccggaaagcttcaccgcgggggaatgctgtcgacgagctcatcgaggtggaaattaattttaccaacgtctggtgggggcggaaaaagacgtcaaacccattgcgcctgatctcagagacgaactgccgtttgagagccgccaggtcgtcagtttgtatcggaagctggtcattggccttttgcgacaatgcaaaggacggacaatgagacaagtgatggccatacagcaaggccgagtcagatatccgccgccattttcggttcaacaaagccagcgacgcaaaggtacttgcatcggctacataaagaatgctatatcgcgagtcaaaaataaagaatacgcatcatatatgggttccccggataacccctagccaccagagctgtgaaggcgaaattggacttactgctcaatcacagtccgaggtaaacgactgaatgggctcccccgcgtatcctgggaggcggccgtccccgtagcgttccccgttgaggtatgtgattctgtctcttgaggatgttgagcagtatcgggctcgatgggcgactcgctgtcaacaccaagtcgctctggcggagggggccgaccttcctccaccatattcaatcaaggcacattgaatgaaacaaaggcatatccgagatcaattccgtgcacacatgatcttccctgacgattaagaataaaatcaggggaagggagcgtccttgaaaaagccgaagatgctcgctagtgacccggtgctggtggctgtgtcgctgcaacgaagatcgagcccgctcacaagagggaggggccgccctatccgtctccgtacctattggccctcagtgttacagcaaaaccgcctcccggcaggtacttcaaacacgctagcacgccctgatacacgactgaagatgggagatgaaagttggatggccagtcgatgcacaatgtcgaggcaaggcagaaccgtgctcaagacagccttgggttggtgtagtatcccagtcccagaccctggccttgcgaagacgatataaataaaaggcacgtggttggccgtaatgctgagtcagccgaccccccacagcaaatcgtcgctctttggccggcgataagaatattagactctcgatcagttcagggcccgcaaagaaaaagaaacgaaacggcttgctgccatcgatagacgggtaaccgaagagcggccgaataggggagcatatactggcttgttcatcaatccaccccggcctcgtcggctcgtccttgtggtcagcgagggacaatgtcgcatgctgagtgactccgcaattgcaattggatgcccgcgctcaaacgaactgctttgtcaggctgtctcaggttgataagtttgaaccctggctgaatgttctagcctagctccaagctagagatctgtctgtggctatctgctcccggctgcagatcacaacctgagacctcggcagacattatcattcatctccttccttccgttccgcgcggtttttgcggagagcattggaacttccgctccggcgaacgggcgagtcgcgtgctccactgcctagttttgacggcgtaccgccgtatgattgatgcgggcagtgtgaaacgctgagatactatccgtcgtcttgttgggcacaacatgcctcctgcagctgtcaagcctagtccaaactcaaaggctgccactccggcattgaacgctggggcaagaccgtaccggtcacacaaagtcagggcctgcgatctgtgtcggaaacgcaaatcgaggtgtacagttgatatccccggccagtcatgtttgctgtgccgagtccaaggagcggattgtcactatcaggaggaacctggcagtgagctgtctgccgctcaggggccggagcctgcggtatggcattcgcgcgccgttggagacggtttccacaccggccagaagcgcaagcgctctccagacactgtgtctcctcccatgacctcctcgcggacagatgagattcctgaagtccggcgatctcactcagcagcgcctcgtcgaggaagcgaacctggacgacaaggagttgaggatccccagaacgagtctgttttcattgtcggcccagtagtagccgacgatgcaaatgtgatcgagaagcacatgcccccacagcagtctaacagatcagtggagccaaaaaatcatccatacaatgtttactcgaatgaccccagaaagcccattctctacaccacagtgtccaggcggagacagggtatgcgcgttggcatacctcccggagagaaccaaaaagagatattggaacagatccttgggccgtttaaggacgatttagtcagactgtacgcttctgaacgagactatcatgtgtgcatcctgctgataccgagtcttaggtttctagatcgtttcaatgcagcgtttcccatattcgacggcgaggctttctgggaagcatacatctcagattcacctagcgaaccgccggcatctcttttatgccaagtctactcgatgtcattagtccattggaagcacacacccaaacttgcctgccatccgaaacccgatgtccggtatgccgtaaatctgactgttgcagctctccacgaggaattctctgcccccggactctcaacgatcagtgcagctcttatcgacttaactggccgtcccattttttcgatgactggtaatgccatcagctgtggacgcatggtgtctctcgctcattgtcttggtttgaaccgagatcctagcaactggaaactgtctcggcaagagcaaaaccaacgtgttcgcctctggtgggctgttgttatacatgatcgctggtaagcctagagagtatatctcgcatatctattagttgctaacatgccgcttcaaaagggggagtttcggacatggtgtgccaccacagattgccaagaatcagtatgatgtacctcttcccaccgtggaagtattggtgccgccggcatcgcgctctccagagcgagtgagggcagcacattgccatattgcgctctgccgattaactgagatcttgggtgagctacttccgctcgtatacggtcttcaacagcgatcacctcgcgaaacgagcaaaaagatccgccagattcggacagacttagatatttgggaagactcgctcccggattggttaaggtctcctctgggcccttcagaagatcggatagccggtctctccagtctacacctttcctttttggcggtgaagttgctcgttggaagggtagagctaaatgtaaggcccagatagaaatggatctatgcgccaatctgactattctcatcacaggatgtcaataattcagaaacagacctccctgaagcccgccgatacttccaaacggagtgtcgcaaaggtgccgaagagatcgtacagttcatttcatctctccggaaagagaacttcaaggaattctggctaccttgtacgcgatcatatctatatgtctatcaactccaacaaaatcatactaacgccacgcagatagcgccttccatttaacctcaacagcaacgctcctcgtccgctgcgccttcgaaacctctgaccctgaagtcgcacgcacctgcctcgcaaatgtcgaatccttccgcgccatcctccgccgcgtccgcgaggaatacgactgggacgtagcagacatgtgcctcgaccattgcgaacgcattcttaaccgcctcccgcctgggaacggccatggagtcaacggctcttctgccactgcctctggagcgcccaacgcgcaaggcggcagcggaggaggggcggccatgggaccgcctgatagcacgaacgggcttgttaacccagcagcaatatcgatttcgttgccacagactcagacaaataatgacattgtagatgatatgaagtcaatatctaataccttcgggaccatggacgggttgccgttggatattacgga

SEQ ID NO: 1219 - DNA, 2611 bp, Emericella nidulans
tcagtcattgactttgggaggtcgtcccggacgtcattgccagccattatgatgcacagtaagccgcagagtgcggatgaagaaagaaagcagtcgatcagacagatctcaggtctcggcttcagacgtcagcttagaggtcggcttcaaaggtcgcagtgcgacttgctgcagaggaagaccatagcattaatggggacccggacgggctctgtctggtttcactgggctatcgtatggtccctattggaggggcgacgcggcgcttaatccttgcagaatgcgagggggccagatgaaatgtcggggccagaagaaatgttgctttcttatcatttgggcgtttttggactccgcctgtggcgcgggggctataggagcgggaagcgatgagttgtttgcttcatgcaggatcagcagctgtgactatggactgatccatggccgcatacatggagggtggccactggctcatataggatccgacagacttggcgattagccctacctgtaggagcagagtatggcagttacacagcatagtcgattctattccaaaagcagttagcgcccatgtgacccagctttgacgacggcttccgatgtcaagtgatgggatcgcccgtcagatcagtctggcccaaacacacataagaggagatcagcgtccatcactcgtattgcatccaagaatctcactgttcctgagattccatcggctccagtcgttcactaccactatcattaccactgccactgccgcggccaatactgcgcacgctatcactaccggtccagccaataggcctcgcccacaatgtccctcaacgcgggcctcagcgccgcgcacaccgcacaagacgtcatcagtgcgctgaacctgaccccgcacccagaaaaaggctggtatatcgagacctaccgcgacccgcacaacttcaccgatacgtccaacggcacgagtcgcagccgctcgccgtcgacaaacatctattatctccttgagggcgagtccgggctgtcgcactggcaccgggtcctcgatgcggtcgaagtctggcactactatgcgggtgcgccgttgcagctttcactctcgtgggatgacggtagccccgtccgagatctggtgctgggctcagatatctggacggggcagcgaccgcagatcgtgtcgagcgcggggagtggcagcatgccttgagtctaggcgactggacactcgtggctgctcggtagcgccggcgtttgagtttgaggggtttgagatggcgcagcctggatgggagcccaagggcgcggagaagaaggagggagagaacgcgtgatgtcgtctgtttaaacgggtgctgtaaagagtctgctctggagtgaggtgagacggagttggcgacgtgtggcgggctcccttgcatgatagatggagcgagggtcggccatgaatgacatgggaagcttttcaacaatacccataccttgttttgttatttgtttaagaccagacacggtcgttgatagaattcctacatgaatgcataactgcgccgatgacgataatgacgaatacgatcagggtcctggatgtagtacagtacctacgtatggcgcataccagcccgaaccttgttctttaaatatgaaaaagaaaacaaataaaatattcatagagcaatattgcctaaaaagccatcaatatacacaaaatatagaaaaaagacgtaatatactccacaagcagttgcgcgcttagctggacctttcatactgtagtaattcgaactgtcatcatcaccacaataaatgtctttatgttggaaattggctgagcaaaaggaaagggttagccttatgattcatgctttaagatataagaagtttctagtactcgacgagcagcagcagttctttatttcccagtcaatactccatggccgaagggagccggtatcacaaagaacaatacgtcaatatctgaactatcaagcatttgaaagtcaggaagaggcattcctaaatattattacttgatgacttcagggggcttccaaacatgctcaggtcaaggagatggcggcttgcttgtggtattcgttgcgaggagctatatcctgctgtatatacaagaagggtttgttagagagtgaaagatatcaagtgtgggtgagtagaactagggactgtattaaccgagcatctgcttgtgcaagtgttctgatcagcagtcctgagatgcgggtaccttgtacgaggaacacataagaataagagaagtaagcgaggacctgtggatagccttttttccattgcctctacttgtagtctttggacgaacttgttatataagtttcttgctctctcttttatcttatttcataaaatgattcatatcctccgttcatccagctgttactgccagagagtctattgattcgaatcgtcatgttgcctattgacctttcacgttatctacctttctagctttctttatcttgaagtgattctgaccctcctaacattcaaaacactttaaccaaggctgaatgcgcattacactttattgccagcttaacaactctttctttttttattcgtgcactcctttctgcgccct

SEQ ID NO: 1220 - DNA, 720 bp, Emericella nidulans
tatcttgatttttggcaaagataataaggacatcaagtccaccaaagatcagctgaagagcttccatcctataaaggacctagggctggcataaaaggtattagggatctggattatatagacaaagaactctatctgactggaccaggagctctatgcccaatctatcctagaagagtttggaatgactaaatcaacatctcgagatacaccgctcgatcctagtaccaatctggatgattaattatctaggaagctacctcgagacctgcatgacaagtttaggaagattattagacagcttacctacctagctggcagaactaggccagacatccagttctctataaactgactaagccaataccttgcagatccccaagaggtccatctcagagcttcaagacatctcctttgccatatcaaaggcactattatatacagaataacctacagtgcaaaggggagtacagatactaagaccctgataggatattcagatttattatataggaatgccacaaagcagagatcgaccagtgtgtatgtctttatgctggctaatagaccagttagttgttatagctcggtcgcaacctattagtgctatatcaacaactaaagcagaatatattgcagctgcagagttgctaaagcaggccatctggatcagatactgatctagcagctatatctaagcgtccttagtagcgtatagat

SEQ ID NO: 1221 - DNA, 1584 bp, Emericella nidulans
  unsure (1)..(1584): unsure at all n locations
gtgtaaagggacaaagggagtttctctttattaagtcccccttcttaggtgctaaaactccttggaataaaaaaatccggcctgatatgactgtggaaacggccagtaaaaaaaacccccgtgcgtggatccgtttaatttctcttcttaaagaagcaaaacacttcccaagtttagcattttcttgacccccccccgacggttggaatatattttccgcttgggccatgctttggcatagtttttacctagtcttggtcttttaatgccgcaggtgcacagttttgtttgtggtatcccccgcgagccacttgtccggtatggcatgacagatactgcaggtaaaagggtggctatacgacaaaagcttgctttttgactcgtgcaaacccggtacccaccgcccttgtagctgccgatctgcggagaattatcggatttgggcatccccgtggggaatggcagcgcgtactccaaaaactgggcccgagaacccagatcagttaaaaggcgcccnntaagtgatgactcgacctccctctccagctttctcggcgtttgtctgtgggttagcgccaacttggacttgatcgccagttgctcggggtatgtcctagaccgacggccactcatcgcagaatagttggagtataaagatcacgcccgccccagactgatgtaactcattgtaccagtgatagccttattgtgacaagcatagcaccaagacaaccatgagggctcgagtaatactggctttcgctgtaggcgtacaaggccagcagttatacattaccacgactggatactctgctcgacctgagtgcactgctgcgccggccaccccaagctaccggtttgagccgtttcaatacacactaaatgaaaccattcggtaggccgactgtctgtttgtgcagcgtctcgctaacgggtcaggtatgccacttctgttccagctcctacgacaacgcagacctttgcgccgggctataaggaagcactggaaatatatggcatggagctgtctaccaccacttggggcagctggctgcccggagagaccgtcatttccgccactgacaccgaggacaaatatggccaggctgcttggtcgtcgcagtggcaggcggccagcctgatcaactataccaccgtcggattgtacacgacaaccgtgagccctaccccaattccatccagtgaactagtcctccctccccgtgactacttcggtcctaccgactgctacgatttcccggaggatttcatgttcggcgtcgccgggtctgccgctcagatcgaaggcgccattgcgctggaaggcagggcgccaacgaaccaggagaagctcgtccaggatgaccggcctaaaaactatgtgacaaacgaaaattactacctgtacaagcaggacatccagcgcctggcggccatgggtgtcaagtactacagcttctccatcccgtggactcgtatcctcccgttcgctgtgcccggaagtcccgtcaaccagcaggcaatccagcactacgacgatcctagtattctatagtgtcacctaaatcgtatgtgtatatcata

SEQ ID NO: 1222 - DNA, 3812 bp, Emericella nidulans
  unsure (1)..(3812): unsure at all n locations
gattagctggcccagatgaagccgatagtgcattgcttagataaccatctgcataaccatgtacttatctccgcagtgactcaaaaaaaaagtcgctgcagaaaaaaaattatatatacaggaaaatgagagaattatcctccgtagaatgtcgcacaaatagagcttgcgcctaacttggatcgtaaatcttatagcaagcggcccaatcgcctacctttcgtcttcagcgtgacttctggcaactatcggggagaccccttgggtaattctttgatactagaccgaaggcccatcctaagggcaagactctggaccaacgcaattgctgtctctcctttttttaaaacttctcacactccttcatctcctggacgccaaactactacattcctttccacatttaccatctattccaaagtcccaattacctctcgcgccattactttctggtcccccacctgtcaacgagattcgccgcccatgtctgatgacgaggtagaccacgagctgattgcgcttcttcgcaaatcactggggctagggggaggggctgcaaatcccggcgcggcagagacaaaggtcctgcagaacgctcaatacgttttcgataatgccatcgacgttgccctaaatccgtcgaaaaccaaggaggccgcggagacgatatggcgccagatgcagaagaaaaaatactcaactagcagctggtctgagcacgaattacaccccaaggcgaaagacgagagcaccgtcgattttatcttcaccatggacctgctgaattttagcttttggtccgcggaaccggaagggaagcggtttgcgatcgaataccgaggaaagaagtggactgggtattggagcttggtggccgccttgcggcgggcgttggatgaaggcatcgaaatcacaaaccccgaattttgggtagatgaggaggagtgcagcgaggagcttatcaggcacgtctttcgctctgcgacggatgaagatatgcctttgcttaaggagcgacttgaatgcctgcgtgaagcaggcgangtgctatgcaatgtatgtttcctacgccctcctgaggccattcctactaacacataccccgtaggatttcgatggcagcttcaccaattgcatttacagttcaaaccgctcagccgccgctctagtcaaccttctggctgagagcttctcatgcttccgagatgaggtagtcttccaaggacgcagggtacgattctacaaacgggcacagattcttgttgcagatttatgggcgtgctttgacggggagggctacggcgagtttcaagacatcgataaaatcacgatgtttgccggtatattctgccacaactgcctaccctagcgtctgcaaccgctaacagatctctagactatcgcattcctcaaatgctccacttccttggatgtcttatgtattccccctccttagaaacccgtatccgcaagcaagaagaaatccccagcggatccaattgggagattgaacttcgcgccaccagtatatggtgcgtcgaattaatccggcgtgaaatcgaaaaacaacatcccgaagtcaagtccgtaaagactgaaaagtccacttcaaacggacactcctcgctctcgcattcaaacggattgtcacaccccaatggacactgcagagaaacctcccagacgcagaacgggaacgacgatcaaatggacacacaggccccccaaactggtcacttccgacggcactcgagacatagcagcgccgcgagcaacgccccactaggcacaggcgtcagcatcaacgccatattgattgatttctttttatacgatacgatgaaagagttggaaaagcaaggacgtgaaagtataccccatcatcggacgagaagtatatggtattaggtgatatctagaccctttttattcctgaaacctttcattatacccctatgataccactagtacttttatgggtagattcaacgtttattttcactgagactctcagcgctggaagccgggatgtgtacacacgatgttaatgctaaactagagataggtatggaaatagagaacaaatgttgacaaggtcgatgtgtgaaggacaaaccaacggagcgttgacgccgccagcattggtgcctcttcattgatttcacaaacatatataggtttatatgtgaagaaggaataagaacgtggcgtggcgggtatcgtatcattatagcctcggattataaattaaggcgacgctatctaactttgagcagctgcttccgcttgctgaatccgggccagaatatctgccttccactcagtgtaatcttcccggcgttcaggactcaaccagtccacacgatcctgcatcattgtccctaagcccggcagaagaccgcgtctcgaggctgcccgtggggcaaacaaaccgcgatcgctgggtagggattttaaacgcttgttgccgccttcacctgggtgtccgtcgtcatcggaaatagtctcaatgtcaccatctagatctcctgcttgcggaatgttctcgaaccactccctgccatgcgcccagtcatgttccattatgagtgcgatccattggtcgacatcttcgcggtgtcggcgctcagaatgaggaagaccgagacttgttagcgcggtctggcgcatttcggtgaaggtctttttatccatctttctggtttcttttagcgcagcgtccgcagaggtttcacttggttggcgacggcgtgcgaggaccaggaaatagactgctaccactagagcgttgacagtttccttgaagtcttcatccttctctctgtctttagctgttagaacggcctccaggaactcccttgcgtcttcatccaagtcatcatggctgtcgactaggtgtaggattgaggatacacccgcgaatatgtggggaggaagtgttcttgagataggtggtctggaccatgtactcattcgcggcgctggcgttgataatgttttgcataccgtccggatggaggtcatcacccatgaaggtgcatcaggaattctggtggaggtcaaatggctatcgctgtgaaccttgtgtggctgttgtgcagtacgcgtgttatcaccatttgtgtatcctctctttaaaggtgttgatctgctcggagtattctctaacccacgcggcgtcggcacagcctttgaagggctgcgaacaggccttggatgcttcgtcggcgtcgacggggcggaccctgaacgtgacggtgtccctggggctgaagttatttctgtaggtcttgggctcgccaagtttagagaccgttcaaggaacgaatatagcttcttataggtacgcggagggcatggcgggtggccgagtagcggaggaagattgagcgtacgtgcgagcctatataacacgcgagaattccgttagagcatgaacctgtgtatatggcctcgaggtgaaaaaggaccttttgcaagccaattcggcgcatgcgaacggacgcgcgacttcttcatccggtttcaagcttgaagaggaacttcgggattgcgcgaggaaagataaagcaaggctccggagctcgcgagggatatcttgtgcatgagtaggcagtaaagtagccaatgcctggtcaacaggcctattgttcattgtcaagccttgatgatatcttagattcagaggtgatcgagtgtacgtctggagggagtgggggatttggcgctgagagacgatatataacgcagaatttcgcgaagtggcccttcggagtgaaatgtattgcacgttataagccaatgcagccaca

SEQ ID NO: 1223 - DNA, 4361 bp, Emericella nidulans
gtacgcagtatgatgagcaggcttgttggcgaagaattgggcaagtgctatgcgcgcgagggcgtgaatcacctcgagaagtgtgggaaactaaggggtacgtatatttcttctcgaattacggatagtgttattggaagtaataatggctaacggagcttttttgtctgcagagaagtactttgagttgctgagtgagagaaagatcaagggttatctcttcgaggagaagaactactttgcgacgaagtcgacatagatggccggctaaataacgaacaccaaatgaattggcgaatagaaggggtttcctggaaaatatttcacagcaggattgacaggaccaaggaaacggtccgattgttcttttactttcctcgtgtgtgcattattcaaatgacattgtgattttagcagttgacatactaccaatgtacttttttttcttaattgtaagaattgttttctgcgcctcgaaacagtagccgagacttttgtatgcgattcttacgttatagtgaagtctgtgaatatgtgaattggtcgagatatttgtctagcgaaggttggccagggtagtttgatcaattatagatacagctatgttccgcacttgatagactagggtaagggatacacaagaccaaatttggatatcaatagtaagcattatcggcccgccctggaaacgccccaggtgtatgtgcgtcacctgcagcctggctttcaaagtcactgtccccatcatcacttccaggattaagttcaagttccgtaggagggccgcgcatctggaacagacgctcctcatctagagaaggcggggtatatggaggctgaggtggaaggacatcacggccagaggggaggttggcgacatagtccgctgacgaagggattaattgcgtattcagctggcttttgtaagtcggtagttcacgaaaacatagaatggagaagttgtgcttactgtatcattagcccttacccacttcgtctccaacatctcgagtactcgcccctcttcctctcgacctgcattatccccaggccctaatccgcccttatccacgcgctcaccccccgcacccttctctagtttacgctcctcacgtctctcccggaaacccagcttcaattttgacaagccccggctcttcgtcgtaacctcttctgcagatgcagagcccgtgtttcgtaatcccaaggcgcccttcgctgcgcggagccaggcgataccctcaccaaccttccccgcaagctccgcatctacccccaaaaaccggcatgctcttgcgccggcaactatgcccaaaacatgggcatacctggcaacgtcctcgtcaacacctgcttttccggcctccgccgctacagaactcaggcctgtggcagcttgttcggcatactcggcgggcgccaatacccagacgcgcaaagaggggtgccccggactttgggtatctctggtgcccgcaccatccagtctttatcattgaggttgcgggcttggatgcaagccacaacgtaggagtcatctttcaacacggtcaggagtgttgcttctgctaatgccagcgatgatagtgccgcctgcgttgcgggtgccaggtccggcaatgtagctgcttcagagactgttgcgaagtatggggatgaagacaggaacgaatgtatggtgctcgcttgtaggaggtgcttggttgcggtctggacggctgctgtgcgttgctctgcgctcggtgttgtagacgcatatagtgtacgggtgacacctgaccgggcgagagaggacaagatatagcccagtgttgtgagtataaaggcaagctcatactggactcccgttccgcgagtgcggttcgtggaaggacggcgtagagagcttgaagctagagtcgcgcgccattcgggctcgagctcggcgcgttgggctactctgatttcttcgaggtgtgttgtagtcgacggcgtcgtagtatcaattggcttcccattattgagcccttgggccaacgcgacgacatatgggagatagtcgttaattgcggagagaacggaggttaggtgggagtcacgctggaaaccgcggggtaggcggttgtgggccttgagggcgaggcggagggcatgtcgggctgtcgttgcggactgcggaagggatgggtgtgtgtgagatgagagggcagattgaaaagagaggtgagaagttgtcgggagttcaaaggggtagaccatggtgacgaatgtgtagtcttgggtggttgtagaggggaaccgacgtactatactccagacagttacggggacgcagttggttcttgaagtcaccgccaggccgcagccaagaagtacgctttccaaacgagctgaatacaaaatctcatttatggattttatcattgtagacatgatacagtacctctagatggtcctcagtagcttgacactagctcatcatcactgccagtcctccacccccacgagttctatctccctgtagatcaacgctaccggtctagtatgcgcgctctttcctcagtcttctattgaatccattcgccgaatacgtgccgagatattcgagttgggagaaatgctcgctcgtcgtattgggacgttctcggcttggactatgaagcccgccgattgtacgcatctgcgtacaatggggtatactcgaacaaatcctggggatcaacggagaaatcgacctgcgcttctcgtaatgcatagccgtattgcatttttgtttcgaaagagcttctcaggacgagatagctcgctgcccattcaatcacacctccatgccttcggtatcggaaaggttgcttggggcgctgctaacaccagacgaatcgctgtcagccatatacggtgctcgcgaccgcatctgcaagctccattcctggattgtaggagcaccaccctcgatgattaccggatgctcttcagcattcttcccaaggactgtaccggcgtatcgggactcctcccccgtcttgctgtgcttcttcttcaaagacgtaagatagtcctccttttcaagcgagtcggcgtcgaccacatcgccttcgctgggcacgaatccagctatacgtcgaatttcgcggtttgcagggcctgtaaaccacgaaaggaagttttccaagcctcgcatatcttcctcccctgcccaccattcttcccattctcgtagctgcggtcgcaacgcaccggcgtcctgtagcgcctggtaaacgtcttctaacaccggtaccgggtcgtgtggatgggcgtttgcggcatgatccgcggttgaggaggcgaggagcattatatatcgggcagtaaggtccgcaagagtgtcgaggactgaaggacgcgtcgcatggaaacctgctgcgcgtagaatctggattatcggtgggcggagaagagcgttgtgaaggttcgcgccagacatggtgaagaagggctcagcagcccgtagtcagcaaaacaataagtgagattatacagcaacccggtgtctctaactatgtcactaggaggagcgaagaactgacaccgtggttggtggtgatgaatgttaaggtgaagaagaaagcggactgggactgcgctccctcttggcctcggccgccttgcccgacttctcttccaacacctctcacctcaccatcacgtctttatcatacctcgacccacgattgactacgtttacagtcatttaagtcaaacatgtctgacgccccaaggccggccatcaagctcaccttcggcaagaagaaggccgagccgtcccaaagtcaaccagcgcctgctccatcctcagatcaacctccaccgacggcgcctcaacgcaaactcacgctcaagatcgcccggaaaccgaccgacgatgaatcacaagacaaggcaaagaagccgaagatcacaattaagaagaagaagcgaccagcagatgaggccgctccgaatgagccgtctgctggcggcgcgtcagaaacaaccggaccaaagcgacttaagctgaatccatccaaaaaacccggcgtccagtcaatcagaatcaagaataaaggacttgtaccaaacagacctaccggtgtcggctacgactcggaggcatccgatacggaaatcgacccagccattgaagaacagttcattttgcgtatgctgccgggagaagactgcgagtatcttcgacgcgcgatcaacgaacgccgattcgaccgatctgaattttctttcaaaccattgaaccgtgagggccgacgagctgttctgaagattcgcgacaaacagtatgctgcggccttggttgacctaccgtgcattattaaggaataaaagttggatgcaagggggtcaac

SEQ ID NO: 1224 - DNA, 1126 bp, Emericella nidulans
aacaatcagcattagagaatgcaaaggctgggaggaagtacctgtaaaagtatttgcgttgcgctccagccatccgccacaatctccgtcaccactttcgaaactgcttcatacggagaacccatcctcttcggttgcagcgattggattagcccatccagaacactctcagggacaacgccggcaatttcctcaatagtgctgacggtgatcatatcagacccctgatctttcatttcctcgtcctcatccccgtcttttgcagccttcgccgcccctactagccttgccgcactctgtaagtatgtaatagcacgtcgtagatcgccatcgctgcacgatatcagcttgtccacaaccccattctcaagcgataacttttctaattgcgcgatctgcgctagcctatccccagcggctgagttgtccagcggcttgaagcggaacttgctgcatcgactggcaagaggctcaataatacgagtgacatagttgcagaccaaacagaatcgtgttattcgactgtactgctccattgtacgacgtagggcggattgcgcatcctgcgtcatgctgtctgcttcgtccaggatgataatcttgaacggagggcaagggtacttttcaaaatattcggcgtctaacccggtgggatggctaagttggacacgggcaaagccttttactttttcacggacgattccgattccacgttcgtcggaggcgtttagttcgaggattcgggaacggtaaagggcagggccgaagagagatttggcgagggcgaggattgtagacgtctttccagtacctggagggccgtagaagagcatgtgagggagctgtagagccgcctgattagttcttgcccatgtctgctaaggaatgccatacattagaagcttgcagtgtccgctgaagcaccttagtcgtgtggtcctgcgcagcgacatcatctaacgttttcggacggctaaaacaatcagttctagtctgacgccgatagtgatgctagatgtgagaacatactatttttcaacccatggttgcaatcgcgattgctccttctttccttctgtgggcttttgctttgagctgctgaatgcggcggctgcgccagccttat

SEQ ID NO: 1225 - DNA, 5157 bp, Emericella nidulans
agagcaagagcacggccgtaaagacgttgacgatagccattggaccctggtcgacggatatcggcgactgacgggtttcgtaaatggtattgtatttcgtagtaacggataaattcggcgcatgttggctttgcgaagaacgaagagctcttcaagcgaccgcggattagtcgactgaccgatcggcgagtcgccgaaagccagtggtggacggatcccgtgatggcctagtctggaccaccattgttccaatgtttactagcgcccaagaggcatctatgtccggttactctgagtagtacatactacagccccttgtttagtactataacagctacattatttactactgctaataagatacatgtcagctcatgaatacagatgatactagtataacctctaagaataataaaaatagcctcttatattatctattcagcttgtagtcaccttcgtagctcataactacatagcatcatgtgacttgctaataacacccgaaagcaacctccagggtcaggcaactctttcatcacctacaataaaaatcacgcccggtctctaacactgagcaggtatatttctactatgctcagaaccagcatattcgagagcggatacggttgagaagctgcaccttgcccgtgatggagtcttcacatcaccttccgcaagacgatgatgtcttgtcctcaagtttctcagtccttcagacttctactccaacaacaccgcaatgtctagactcgctatcaccaacctcctcggcgctagtgtgttgaagtacgatcggtatgcaagctgtgctgccgcacttcaagacagcctcatacggaccatggagtacttgatttttcaggcgtcagtgcagaggacttccgtttccttccgtctgataataataaactgacaacaagtatattagtcagaacttatctctccaaggaggggtcagccctttttggttgaatgggaagttcgatatagacttttgaaatccgccagactctcatgcaaacttctcaaacgggctgctcacgctcaaaatgcctagattcgctcacgagatcaccacaggcctgttcaaagctatagttgacaatcagcttttcgcgatgggcgtattcgacggattcatgctgcttgccgcgcccctgactgcactctgcgccgagattggcaatcaatgcaagaggacggctggagactcccagatctacagtaaaggcgtgcattacaatcgatattatacaagctagcaatttgattattgaagtttggcagcttggcagaagggcttgtacagtttcctcttgaaacccacctctccgccatgcgagtaacatgttgagatctctgacggagaagcagagctccagatacatggatgggagatggatcaaggttcacgtgttgcctttacaatggaaattcggctagaattcgcgatgtttgtggcgtccggctgccaccaattctgaacaagacattgttatggacagcagtactctggttgcatttgccagaaggttctggcgtcatcaaaaacaggcgctgcaaagctagtagctgccttcttttgatatgtgctgccttggttgcagaagtgtcaaagtacttttgagaactattcaactgatggatgagcagggctcgtgccttgagtgcttactctgggcctaaacagaaggtttctgtttattataggttgctggatctttgctctggctatatgttggcgttggtttacattcccgaggcatttttaaggctaaattcttactgacaccctatgattgtcacttttacctgaacctcgggcaacaataacttacatccttataatatcattgtcttccctccttaaaatccaaaatcatgggaaatttgcagcttttggctgagtattgaacataaagtctccgcgttgcgccaatgagagaatgtaccaccaggtttgaccttagtagtaaacattttgtacacccaacaacgggttacaaaatacagctggtgatctcggagaaaatagtgaagctacgcagaagcctaatgaggtgatgttataatatgcccaataaaggcagaatatagctgtatcagccacaactacgtagcctacaaaggcggattcatttgaaacgatgggcacaataaacgggatggccctctatgcgatgctctttaaattcccacttccgttgtctaaaataatagagaagctttgaactgaattcagtacagatcaccctgctcgacagaccacctggtccttggccccgcggcctgtaaagagtggtttttcctggaagtacattaacatgcaggtaagaggttggttatggcgactcctagaacggcgccgaagtacttatggccgctaactgtcaccactacatagaggatatcttaggcataccctttctagtgagaattgatcttatagtcaaaactatcaggaatcatagaccgcaaattctaattgaacaataatatggacaatagccaaaaggccaacagtgctaagcttagctcagcaagccagctaaccaataatggttaatgtagcccctccggtcacctgactttgtatgatttagccccgccatgctgcaccggtcgccgatgacaacaaccaaataacgttaaatatttcttcttaaaactatatttttaaactaaaagtaaaaatatgaagcgtctgttgagtaaagatgatacctaagctataatatttttacctatcaggctacgcagattacaagggttatggtgcacttgccgctatgaaggggccgtctgaaccatcagacgtttttctaatttccccgccagctttctttagatcgacactgtataagagcttgtgttctttacaatctaccccaccactaatttatcacaataatcttgatctttctagatattcacactgctgctgaaagctgttccgcttatcaccctctgggccggcgattaccaagatttctccctcgaacgcgatttttgggctcaagactggataacgccaatatcaactttgagcgctaactcaatgtctgcttcagtcttgggtgaatcctgggtggtagcctcagctcacaccgagggagaagatgccaaaggtggaagctgctctgaggtgccggaacagactcgatcggtcatagaatctggatgtaaacatggatccgagtctacgacctcgtccgtgccaggaccagagttgataatgccttcaatctacgagactccaatcaccgaatcatcttgggttctgccgagtgtgcgggcaaaggcagaacatactactctcaggagaaggcatcaatcctccgctgagcctgccagggcagagaaggcggctcccaatacaccagaccagaacgctcattcgaccgcggcatgtgcagatcaaccgcgttcccgtctggcgttgtttgaggcagcgatccgagccatcatcaacatcatactttgcgccgcaatttcgcatctgcttgtccttcctgagctggtgcaacagtatcaagccatgtgctccataggtgccatctcggcgctatacccatccagctgtatctcaccgcacgtgccgcactttagctcccataaaaacagccaatggtcaaccccggaagccgttctatcatctcaggcgcggctagaactcctgttcaatgcaaccctgcgtgaaatggcacccctcgacaatgctctgaaacagacagagtctcaactccgcacagtcgaacaggaactgaaactcgcgcaaccaggcacgaaacacgagttggaccttgaattcgagagctgctggcgcgtcatccgcatcgcggcgtggaagttcgactccctcaaggttgacctccgatctgcagtcgacagtctcgtctcagcgggcaatgtgaaatcgaattttgcaccaagcgagtcgcaggcctctattgcccacgatgctcgtctatctactcagatgctacgtcgtgaggcatacgttaaccagcttatgacacgcatgcgctccaaggccgactcccttgccgctgaccttgccacgctagatgaccatctcgagtccatcgaaaacatcgtggaccgtgaaataaaacactcgtactttccttcgcagctaaaagactcatctagtcgactattggcttttgtagacgtcattgtgcctcccggcgttgcgctcccttcatttctcagtgcgcgcagggccggtaggcccgacgacagcaacgtcgaccccgcatctactaccccttctccgaaacttaccctatcagaaatctttggtgaagctacaaggcaccaccgctccgtcgctagggtagcaaggaatctatccaagcagctgcaatagttttcgggaaataggaaacactgcccattcggccgtccacttaatactttgacgacgcatcatgaccacagcaactcggatgagaatcaaatttgacaccgcggatacgggaccgggatttggcgtttttgggcatttacaaatgtacgattattcatttcggtatacataggggcatctgaataccacgttgaggaaatggttccttgtttcattattatctaggcagtatataccttgttgcagtaaccttgcagcatccatgcctccagtccacaataagttcaaaaaagagagacagcaaaaaccagggccaccgagtcataacatcacgcgtaagcaagcataaattgccctggaaggccttgacagcaaaattaacaatcggaataattcgttaaaaatccatcgagatggtgcaacattttccagacccttttaaggtgcaagagtggacatggggtaaaaagagacaccaacccattgcgcgcttcataaaatccaatcaaccaatgtattcacatcattagtatgtgcagcgcctattaatatcgtggacgcgaatgggagaaaagtgatcaaattacagctggagcatagcggccatcatgcccaagaccgtgaaaagcccgccagcggagcgggtcagggacgaggcagcgccagtgaactccgggtcctcactagtttcgttggaggtaggcgttgcgctgccagagtctgaaggggtagaggaggctgagtcggactcagagctggacccagagccggatccacctcgaccc

SEQ ID NO: 1226 - DNA, 2479 bp, Emericella nidulans
cagagttctcgcagccgttaatcacagccctgcagctgattatgctcgacatcctacgggcatggcgagttcatccgtgtagtgtggtcggccactcttccggcgagatgagcacgcagctgcggccgatcttttgtcccccgaagaagcgatccagattgcgtactaccgagggaaagcggttgttgagcggcgcaataccgccttgccggcaacaggtatgcttgcggtaggcttaggtgcaggtcaccacgttcttgaagaacttctccaggcacatagggattcaatcgccgttgcctgcatcaactcccccgagagcgtgacattgtcaggccctttgaatgtgctcaaaacggcgaatatggtaatccaggagaagggatacttcgctcgtcttttgcaggtcaatatggcttaccataaccccatgtttatgacagacattactgcgcagtataagcagatgttgcatggtttggggctggactcaatgtcgtcaccggtgtcaaaagcaactaaggaacaacgtacagtaaaaatgttctcctccgtgacggggttggagacgatgggtccttgcaatgtcgagtattggtgttcaaatatgcaataccccgttcagttcaaccaggcagtccggatgatgctaagcgacgagaagcaaccgatcaatttcctcattgaacttggcccgtcgggtgcgctcgctagccctaccaagcagataatacagtctatgcgcgacaagaaaccagatctcgccattgaataccatgccgcatacaagcgtgacgtggttaccgcagctatggggctatttgaagtggcagggcatctttatctgtcaggtggtgcggtcgacatcgagcaggttaattcacaccacgcgcacagggagaaagatcagcatcagccgtccgtaatcgttgatcttcccaactacgcctggaaccactcgataaaatactggtatgagagccagtccagtcgagattggcggttcaggcactatccaaaccacgatctgcttggtagcaagattctagggacgtcgtggtttgcgccctcattcaagaaggtcctgcgccttgcagacctgccatggctgagggaccatcgggtcgctggccagccactgtttccggcggctgggtatattgctatggccgttgaagcagcttaccagactggtcagcgcagcgggatgatcgacacgggcctaaaagtctcgcaagtaccgtataggttccgcaatatcaagtttgtcagagcgctggttttggatgaggctgcaccgtcgacgttgatgctttcaatgagtcctgagcgtggctggtataagttctcggtctacacggcggatggcgagagtgtcccaactattcactgtgaagggctggtctctctccatgttgaagtcggcaaaggtacggattgcctgttttcacgttggtcagaatgcacagggtcaattgatcgagcttaccccaatttagctccaccctcaagcgcctttaagcagttgctctaccccactcccgccaggttatggtacaaggccatggacatagtcgggtacaattttggttcagcctttcaaacacagctgcaaatcgaatccgtggtagggactcgacaaaacagagccctagtgtcgtttttagagcctcaatcagcgtacgctcaatcactctactccatccacccggccgtcctggatggttgtttgcagtccggggctccggcgctctggaacggggtacggagtgcagtgcgagaatgccttgtgccggccatcatagaggaccttgtcatcagtgcgcgacagaccgctgccagatcaggagcctcggtctgctctgccgagtattcgggcgttgggtcgcgagacgaaccatgctcgtacaagtcgaatatcatcgtttcagacccggccacgggagatacgctaatcagggtcaggggtctggcatattcggcacttgaccgagaggaagctttcagccaatttacccctagcatgcggttggaatggaaaccggatatatctttcctttcccgcaaccaattgtatagaattctggacacttgcgacaccagatttgcgccctatagtgctcatgatgattctagagcactgtcatttatcagcctgcttcttcacaagaaaccagcgctacgtgtcgtggaattcaacatagcaccatcgacggacagcagcttttttgccatccttggccatatcccgtttaccgcaaaaggtgctgtagagtatcactttgtgtccaataacgccgctgcccttgtggcttttcaaggaatggcagacggctgtggactgccaaacgtccaactgagcgctctggacgtgtctcggcttgatatagactcccatctgctcggagacaaggcggacttggctgtactgaacacagaccatcaaatttgtggagaaaagctgcataacgccattgtt

SEQ ID NO: 1227 - DNA, 4245 bp, Emericella nidulans
ctacgatatccacctgacagcgcagatacatgcggtcctatattctttgcggatcttaaaacaaatcctcgatctctttcatccgatggacgtggtggtactgaacctaagggcaatcctcgataagcttcccccattgcatatcatgatggaccctgcttctcgccgtgcagaggtatacatgagtatccttactactgtacagctatcagattgctttgggtgcttagtacagaggcggcaatccgactatacgaccagcactggtactgagacagcaaagcgtgaaccccgatctttttcgcatgtcggaactactgagcagggcgctggtgatcgtatcccatcgcacacatccaatatatacgagctactccaggaggagtaaatctcctcaactcaatatctagtgtacggggtttcagtggaataaggtgtatttctaggaatagtgtatcggcatttgaatatatgcagcatacgctaacgggaagacctcaagaacccaacaacgcctcgacagtagccaactaaactggccagacgttgagtctcagcctgttgtacgcgtttccaaagatcaagatgctctctcagctcactgtccgtaccttcactttgatcagagcacgccgcaacaacatccgagtgtattctgagaaatactgccatccatgcattggcgagctcaaaatcctttttggaagcaaggcaactgcatagcgccatgacaaaagccgacagttcggactgcccgccattgacttgcgggtctaacgatcgaatctcgatttccagtctggacgggttcaaagacttcatctcgaagaagaaaggttcaaagtctccagaaatgcaccccgtccgcaacagtgatgtgaatcgagagactgcattggggttcttggtgatctgtaacttggcgacacgtgatgattctgtgagttttccttcttctagtaacgttgcattggcattgtgcttaggtgcaccatcagaagcaggcgcagggaggaagaacggagccttctcaggacgctttggtggttcctttggcatgttccgctcctaaatacgatgttagaattgggtttgaacgaaaatctggaacaactggagtaaaatcagagaaaaatgttaccttaatcaaatccatgtgaacaagtgtctgccacttattcttgggaacaacactaagcgtcaacatatctcgatcgagttgttctgtacatgagattggaccatcaccgtcatgttcttcattatcctgctggaaagctgcttcaataattccgacacctccctctccagaggaagtaggaagtccggtatccaagaggttatccacgttcagatcccgtgtagatactgggatgaatagactcctatttgaccagaggccgatgcccaccccatctgcatgtgcagtggctagaaaatcaccagtgggtgacatggccagagacgtgcatgtgctggatacgcggaaaagatcaatcagatgaccagtgggcaagtcccacactcggataatggagtccatagaagcagcaattatccaacgcccgtcactggagaagatgaaatcatttatttgtccagcacatccccacagctcacgcacgattttctttgtttccatgtcaaccacacgtatggaaaggtcatcacagctgaatgcaactagctcactcatactattataccttagggccgtgattgctgtcattggataccagtcaagttccttgattaacaaaccagactggaaatcccagaactgtaacagggtagtacacagtcagtaatagggaaaagagtgatatttatttgaaaggtcccaccttaacttttccatccaacccacagctgagaactgtccgattcaaactgtcaattgccagaccagtgactgattttgtatgctgagtatgaatttgcttgttcgagtatctgacttcaccacccaagtcgtattttgttttctgacagggatagctccgccggtattgacctgattgcatattgaagaggcgaatgctaccacctgcagatccaaccactgcaaacgtaccacattgggaaatagcaacactctgttgaggatgtgggtcagttaagattggtgaatgccagtggtcaatcttaccttaacatcggttccatcgccagtctcaaacacccaacgtccagctttctttttgccccagaaccaggtcctggcatatttatctccacgatgacctgttacaatactttcccagcccgttttgttcgacgcagttgtgtcggtagttttagggttagaccagatcgtacccgaaacagtgacgcccattccaccatctcggttgagagaacatgcaatacaagtgacttccggcgccctgagattgggctggcttgatatagatccattattcacgtctgagatcacgacacctttttttttggcaccctgttctacagagccttgagatagctcagtgctttgactgtccttccgtagactgaatccccagagactgctgtctttgctcgcactcaatagccattttgctgtagtttccgaaccgtcggaatgtgatgggagaaaagagacagtggttatggtatcggaatggccgcttcgcgaatgaagaggcctcggaattggtgaaaatggagactcatccacaatccatgtccgcaacgaattgtcctttcctgttgatacaataactggttgcccatccaagaactctatatggtttatacctgaacctgggtcgcccgcagagaccttatgggcgttgcgaagaacaccccacacgcgaccaccgcggttcaaatcccaaagtgtaatgtcgccgctagctagacaagcggttgccatagccccagactgctggccatcttccccggcaccagcatcgtcattccgaaaagtgagagaggttatagctggcactcgtggcgcctgtggctggaaagaaaatatagactggccagtttcaacgttttggatagatattgacccatttttgtaggcaatggcgatgactgaaagcgctgggcttggtcgaagtacagtaactgggccggcgttggggaaagctgcaaatatgctatggacaagccttccggttttcacattccaaatgtccacggtcccatctgactttccgatgagaaccttgttgaggtaagttggcatattgcaaatctgggttgcataggccgcttgacccgggttatcccgagagtgcgcaaggatgagcgtcgtgtaatgctcgtatgagccattcttccaaacgtttaccgactgcccattgcagcctactatccaggaaccgaagaccgttaggtgttcgataggcgcgtaggcttcgatgggtgtttcaagcgatgcaatcttcttgccacgcttgaagacccaaactccaccggagcctccaggcccgagagctccccatgctgcgaataagatatcgtgccatgcgaacgtagcagtaatgtcgcgtggagtctgtgggcggctaataaaaaccagcttgagcccctgacgtagatcataggtatgcaagcaacgaccgacagatgttgttatttgaaatgtggctttccccagtcgcgtacacgtgaagggaacagacgttggtgaaactagtccaagtgtctggtcaaggttggtcagatacagttggacgctcctcgaaaatatcgttaagttcagacttacgcgaaatggggagaaaatcctagatccagcatggtacgtattcctttgagcagcctcatcaacgaccaccttctgtctcttggcaagcggcaatgagaagccatcattatttgtcaatgacattttcacgcatgtactattcactacctaaattggttcaacattgaagtttttggaaattatttatcagatgactaatcagaaaaggcgggcttaggaccggatgtgtcagattggcggatccaaaatgtgggtccacttacaacgggatagtacgtcgcgacaccgggtaattagaatccaactcggaatcccttgagtcagcaaccaggcacttaagtgcagttaatatgctgctgagtctgcctgccacaaggcagcgctagcatttaaaccatacttttttatttttcaaaggtcgtgatgatcttcagcaagcaccaaagccagtctgtaatagtgctgaagcatccagtaaaatgctggttctattagggctttctaataatagagatgatattata

SEQ ID NO: 1228 - DNA, 1118 bp, Emericella nidulans
cctcctcagatctcatttggtcggaacgaatcgaacatgatccgaaggtgtcgtaaccagacgccctgattggcgagctggctcaggggtctctctgcgctctaccgcatctagatgcagtagagcacctggactcgagtctggagatggcagccgggtctcactgcgcttgctgagcagtgcactggtgactgcaatgttctgtctcaggagatcttccagggcagagacgtctacgagtttctctgggcctgatcctcgaggatcataactgtcctggcggcgaaatcgacagctagacgcatagccacggcgaagacaagtgtcgcagggagcttggtagctggaggtaatgcatctgatcttgcgttggcggcagttttcgcagctgatggggattcgcttcgacgacatttctgccaagcaagtgacctcaaggttctcagtgcgtctaagttgtggatgaaggttggaacgaattatatgtagtctgggatctaactaaaaccgtgggtaacgccaatttacgggttttggtccctatttggggtgcggggttaccatacagttaccataccattaccagatatagaactaccaagacgtctaccagacattcgtacgaaatatactcccacaggtaatacaatcaattcagttactggtatcatatcatgttatcaaatatcaataagccttctgcatcggcgtctttatctccagctcatcgaccgcctgcgtaatcctttgcgtgagttcctggctcgccgctatattgggggcaagcaactccctcctcccagccttatgaactcgtccatttatcatgatgacattcagcctggaatgatcttgaagaactgtgatatcgtccagcgggtccccatcgacaaggacacagtctgcaaagttgccagccttgatctggcccatctcgtgcgagcgcataaacagtttggcgacgccatatgtagccgcgatgatcgcctcgtggggagtgaaacccagcagcttcgtgaagtgctctaggtctctggcgtatgtaccgtgaggcgttcaggcaaaaccgtagtctctgtttgggcggcgcgttagtcttcttcattgtccggggggtg

SEQ ID NO: 1229 - DNA, 4433 bp, Emericella nidulans
aaaaacagtttaaaaggcttaagcggtttataataggttggccacggtacggggggagcagccgacttattgtaatccgaacaaagcacgttaaaaaaaaccgtaaaaaatgccagggttatgcgctccccacaagtagttgttgcaattagttaagtgtaaagacaccaagctcttcagggcagcttagaagcatcctcaaggtcttcttgttgtaagggtcaagcccaagaaggggcggaaacaagagccgaagctacaaggaagctcagagtgggcgaaagacaaccagcggaggatggaagcatagtcctgcttggtcttgccagggagggtagtcttctcgttctggaaagtcacttgatataataattagcatcaaatgtcaaacaaaatagacggtagaaataaagtgagtcacaaagctgcgccttggccaaatgcttttgcccaagggcggggtagccgaaaaaatcagagttgtatgttatcaacagtatatttctgacagggataactaataatggattgctcatcatgcaaacgaaatcggaacgttggaaagttctaattgataccaagttggtatacgtaccgtagacagcgatggcgataacctcagagagagtgaagccgttagcgccctcaaaagcggggatcttgcccagaggctgaatcttggtgtaggcatcggacttgttgaagtcggcagcagggttggcctgggtctcaacaagctcaagctcaagatcgttgtgcttagcagcaacgaggaccgcaatagtgcgggtgttgtcctgtttctgcggtcagctcctattgaataggtggggagatagcattgtatttgcgatatgaacaaatacaaaacaaaaaggaatccgacatacaggacgaccgtaaagcttgccaaaagccattgtgagtttatcgagagggagtgggaagatggaggagaaagagaaagaaaggaggggaggactgtctctgaactttgcagtggatgaaataattttgtgcgaatcagacgtagtctcggcctcggaggaacatttgctcgaatcacgtgcacaagtatcgaaaaacctcagggttgccaaagacggcaggcattcgacagcgaagtccagccaattcaacttttcctgtcgactctccgtactctcgggtctcaattgagatctcgacagccgctctaataatgggcttgcaaaatccccattgcgtggctcacgccatgcattctgcacgttcagcaacctaccttcgagcggctctcgtccaacgctcggcttctcccctatacctcgccgccggagctgtcctgccaacgcatacgtatcgacaccaagttacccgaggctacgcaactgaagttactgaagctcatcccgctgccccggagattgattttaacaaggtacttgagagacgatccgcccgcgttgttcctgcatcaccctcctatttcactggaagcccaaggttctttgatcatcttttgaggctcgagaatatcctggcgaggtatgcagcactaccgacggtggctccaaacgaggcacccaggatggcttggctgaagctgccggcattccgggaatttgttggcgaacgggtcccgacaaagaagtacaagggcttgattaaggtgctgcagcgccttaaccgcatcaatcccgatattctccccgatgaggttcggcgcgcactgaaagatttcctccgacccggaaatccatacggcactcagtcaataacgactacggtggatgaactgggtcgtgcccgtggaaaaggaaagcgaaaggaatcttctgcggtcgtgtctctagtggaaggggatggagaggtccgagtcaacggaaaaaccttggtcgaggcgttccctcgagtgcatgaccgagaaagcgccacatgggctttgaggtgttcaaatagactcgacaagtacaatgtatgggctactgttaagggtggaggcacaaccggacaggcagaggccctcgccttggcgctcggacgagcattgatgatacacgagcccgcactgaagccaattttgcgaagaggtacgcattcctcatccattcagcagatgatattagtctatcttgatgggcaagtgctaacatttcaatttactaccagctggcgttatcacggtggatgcgcgtcgcgtggagagaaagaaacctggccatgtcaaggcacgcaagtctcccacttgggtcaagcgttgaattacctttacgagcagttttatgcttatgtcactctattatccctttatcgttcgcaaactgtattattcgactttcggcgaatgcatataacctgttattttctcacaacttggcgtcatggtgtcgtttccaggtacgacactgcatgttcgcggcgacccgcatgtaactattggcgtttctctcgtctgatcaaatcaaccgaagatattgtagaatctgtacgaccagcacttgccgtggtcagtcggcacgcacctctgctattcagcctaaaaagaacgcgggctttgagtagacgaatcgaagtacgagatcaacgggacatagcataatctgacggagcggtgactgggatggatcaatctaaagtacgagtactctgaaaaagttggaaagtccggagtacggaagtccaaactatgcacaatgtggcgcaggatcgccagctgcattgacttttagtggctcagcgccagcgaattggaataggaaattgaaatcttcgagttcgcaggtgttcatcacagaagaggagaaatcagtgaagagtgaaccttgtgggagtatgcaagcgcggacacctgcattattgcggagttctcgtcactgaccaccagctcgtaccggttcaccggcatagtccagggccggcttagatagcctcattcttggacaatacataggcaggtacgtattggtctcgcggagatctggcccctgagtttcggcaatattgcttggttgtcaatgctcaatgctcattgccaaacaaggtcaatggacgtaaggagcaagcccaagttcctgtccttcctgcctacccaatcacatacccagcctttctgtccgatgtactgacgacatggatggcaacgccagaactgtgaatcgattgggtagaagggctcgtgagcctgaaggcatctcttctagttacgagactggcgctgctaagccaattgatagaggccagggaaaagtcagcagggaggtgctgcgaagaggtacctcagataaggctgcaatacatgaaggtgttttcctggaagatgaatagtctgtcaaagaggaatggaaatgaaggagcgtcaggtgatttcggcaggcagaggcagaatgactacgtgcatacgaagtagcagacagaacaacgcttgtactttccttgttcaccctgtaaacatttcccaaccaagaaatgccaatcttcatctacaagacagtcaatctcgatgagacaggacggcttacgagtgatactgcgaaattgaggtcaatagcttctaccactttcgataccacgtacacaaggcaaatttggcttcgccccaaaatcgaatcaaaagaaattgcttagtttatggagatgaggctctcgtcattaatgctctttcgaggattagtgtgaacagtcaccgataatgatgagataagtactcagaaatgttgattccaaatatctggccattcttatctcgctgggccatagcgcgggtctgcgtcttcttcagcttggggtgatcgacagctacccccaccgtgtagcccagccttgggctagtcgtcgatccagcgccaaatgagcacacctacggggccggggatgtcgctactattgatattaatacgtaaggagattagtttatgggaatacctggtatgggcgtcggctcactgctgaggaatttcgcctacgatctcccaggagtcctgagctcagaactctcgggcctcgagaagaccgagtaaggcgctactggtcgagtcagggcggacaaaggaattatgacaagcttctattggctgtagctgcatgcgtcgagctcatgcagcaccgtgacatacgcagccggaatctctcgagaaaactccttttactccaggattccttgcctattcacgtacttgaggaagcaagtcattacgcattcgcgaactgaccatgctagtattggcccagggtttaatcctttgggattttcgcagcagctgtcactgtcagcggttcctcccgtgcagccccaaggcgatcttacgtccccgtcgggccgtcgttgcgacgaggacctgaggttgcgaggacgaaaagtcaagtcgcaattctaaatacatcttacgccgtacggcttccaatcttgcttctgttcaggcccctccaattgattacttggttgttgccaatgc

SEQ ID NO: 1230 - DNA, 5977 bp, Emericella nidulans
gataagacggctagcaatcgcagcgaagacggagaaaggctaatggatgcagtatctattgctatggtgaggaactctagaactaaaagaagtcagtatgagcgttgggctatttccaaaaggttaagcatatatccaggacgatgctatgagatagcagagatcggcacttcgcagtggacttgacctcaatcgtctaccagtcagtacggacgttgcttctatttagaccagaagctagactcattcaagaaccaggcctggtcgttctcacgtctgaatctgcatcctgactttgcttggatatattcacgccatcccctcagcgcaagacctgcggtagtcactcgggcaaatggcttgattcgcggtaaaacactattccctctccatgcgtaagcctgacgagactagatggtcttgttatctttgcattcttctaagcgcattcagcaatctatgctgattccacccaggttccccgcttctaatgagaacagcacttatagaagcagagaccaatctcttgctcaaagcatctcttcctttactttcactgtgactaccgcttgccaggctattcctgatatcttggtcctcactcacctactatgaatctcatcgcactatgccaagtccgcgccatccaacaccggacttgttatgtccggatggaatgccgtctagccagtaccaaataccaacacagtctgattgcgagtcattgtcgaggtatcctatgcagcatctaatcccataacaacttagtctctcactcttctcgccggctaatctttgcttgaaggtgagatggctcttttgccctctgagccggcctaggcaagttcagttcaatgaagattgcgttcaaaatgttcaggaaatgcaacatcttccagtcgtcaggtctcaccttggtaaacatgtggagccagtgaatagatctcctaaactggggatgtgcaccccggatcaggtccccacggggatgattagcccggctcccagctagccctgtctccaacagcgcagtaaccgatatatccggggaaatggatgttcgggctcatatatatccaagatttgattggcttccccacggggaatgacaagagaacgatatgatggcttggaattcttaactggggtgccaattttcgctaggactccgtctataaaaagccctgctcgcctccctccaagctatatccggatgccgcttcgcctccagcttttgttttctctctattatattctcctgccgcccgtccaaactcgatcatgtctgaaagggaggttacccatctagacgaacccaaactccacgagaaacataccgaatcgttcgtcgagcacgctcagtctgtcatcgatgaagagaaggcttcgcgagttcgaggggattactccggagccgttacgaagacggacccgagagagatcaagctggtgcggaagcttgatatgagagtcatgcccattgtctgggccatgtacttcctcaactacgtgggtgttttcttacccatccagctgaccgcacctgagactggctaaccctaacgcctggccaggttgaccgcaatgccatcgcaagtgcacgccttaacgggctggaggaggatcttggactccagggcacgcagtacaatacctgtatctcgattctctttgtcgggtaagtcgtcgtgtgatatgggttgccactggctgatggttttcgtaagatacctgctcatgcagatcccatcgaatatgctcatgtcctcgggaaaagtgcgtgcctccgtctacatgagcatttgcatggccagctgggctatcgtatccgcctgcactgcactcacaaagaattacactggcctggtggtggtgcggtttttcctcgggattaccgaagcccccttctacccgggcgcgctcttcctcctctccctcttctacacccgcaaggagattgcgctccgcatatccattctgtactcggggaacattgttgcgacagcaatgtccggcctgattgccctagcgacctttgagactctcgacggctcacacgggctgaaaggatggcagtggctcttcatcatcgagggggctgtcacgtttggtgtggcgatgttgggcctgttgatgcttccagaccatccgcttacaactggctggctgacgcctgaggagcgcgaactggctcatggccgtatccttgctgataccgtaggcagcgagagctccaagggggtgctggctgggctgaaggaggcctgccgtgacccgcggctataccttctagctttcatgcagaatatgcatctcagcgcctgcagcttcaacaacttcttccctaccgtcattgggagtctcgggttcaactcgactatcaccctggcgctgacgtgtccgccgtaccttgtttctggcgcctttggtgtcgttgtgggcatcacgtccggaaaatggaatgagcgcacctggcatattacggtgactatgggcattgccgtcatcgcatttattgtttcatgtgccaccatgaacaccgcagccagatacctttgctgctttctgttcaccagcggcgcgtacgcagtcaactcggttattctcggctgggtgtctgcgacactcggccagacggccgagaagaaggcggcttctctgtcctttgtcaatgtcatcgcgaacgcatcgtatatatacactgcatacctctaccctgactccgacggacctcggtatctcatcgccatgtcgagtaacgcggcatttggcgctgccacggttatgagtgcctgggccttgaggtggtggctgcaggctacgaacaggaagattcagcgtgggatgctcgctggtggtgaacagggggtgttttatgcctactgacctgatgctatattaccacaatctttcagcactctttacttcagcagactgacatccggcttcaattgtttgtcattcatgcaccacgcatctaccggtcaagacattcgctatcacaatgacatgctaatcccgtgctaatatactatagttctatgatctgctagccattaactaggaagatttatgtgtactatacttcgctagaaggatgcatggactgcaccgtagctatcaaactccgtccccaatccgcatcttacgcctactttacaagcactgttttggacgtcgcggctctatgtcttctagccttttgtcgcctttcccagttgcatctcccatttcgcgaagaatatgtccctccaaatgggtatatcaggcatgacgcgtcccagccccatttctaccatctctgtggcagctacagcagtttattatatgatcatcatgaagcttgttgttgttttcctaatcctagctcggttgagcgataagataggtagcaagctacggtaagctatatacaccacatgtgcagttctactgttgtggcggaacgacgccacaatctccacgcacgcaatgtcggcctgttcgccaatgtccaccattttattttttttttatcttagattgttgtaaataaataaataaatatatatatatatatatgtgtgcattctcactttatcattgttacgtctgttaatatttgatttcaatattctttattttctttatttatccctttttagagaatgtgcttagctattcttagacaccaagtatgatcccaagattgaaaggctcatactagatatatttagcgcttccagcagtttttgcagtgtagaatactagggcgaggcccacatagctagctttcacctatctacacgagagtcagtgctaacagagtctgacccaaagcaaggccacaatactccaacatttggttcgccatgttacattaaggtaattacgggcatttgtaccactataagggttagttggataatatgcccttgcgtgagtcagtttgtggtaacacgcccaggttagatgccagctaatgactcttaagtaggaaagatgagatttacactgcaagaggctacttctgggaagcccaaggacactccatgccctctactgaaggttaaagaatcaaatgtacctatagcccgatatatatacctccttaaagccaatatcagtcgactcagccgaggaacgcggcatctgccatcgtctgaaaccttggctggagagcagagtaaaacctaaaacaggcagacatatcaaacgccgaaggcctattgatggataataggctgctatttgcgagcaatcccaggtcggcccatcaaagcctggccattccagtaatcccatcccaaccttggggatctctggactccctgatactctgccgcacaggagtccagtaaatgtaagagggtgatatgtctctttcaatatagcagatacaaccagtgactgcttgggcatcttcagagtgtacttgcctaagcagtagctgcctgcccccactgtttacagtttgataccctaatcaagtatacaacaggcattacgttgcctgcaaattaacaagagacaacaatataaacaccgtactccaaaccccggttggcaatattattattcaaagcgtattcagaccttttcagagcttctcagaccgccttggggatttctaacagcggacaagtgctgcctacagttttcgaatcttgtcacgtcttgacaagatcgccacattcaggtcaactcgatcgtagatgggatgggtagggcgattccttgaccaagaccgcaggtctttccaggcaacagtcccaacgctcttgttttgtcgaccgattcactgacgatatcttcacaggacccgccgaggtgctggcgtacccctcatgtgcatcccgaggatcactaatcacagaccagccggcagcagctacctatacaaagacgacatttggcggcgatgaagtatgagagggagattttgttgatgccgatccaataatgtcaaccaaacagaccctccaaatcaggccactaactcacaaaagacggaatgatggctttccggcctgatctgggatggcggctacaaggcagcgcgcttgttggggtgaagactgcgcgacgttggaacaatctggaaacgagagcgatgactgaagccgtaccgtggcgactggcgactgccatatacgaaacgggcgagctctgcgagcctctagcaccagtaagagtgggctaattcgcccctaaccgtttcggtggctacaagggccgtccagttgctgggggcgaggatctgcaaagaccgcgggggaaattcgcgacccaacgacccagcgacccacgaacgcatgaacgcttgaacgcatgaaaatcacatgcggccaatttgagccgaaatggggctctgtgggaatcgattagatataagaatcccatgcgtccaggtatgggacaactggttatcgtccggtcagccactgcacgaactgcttgctattcatcatgagtgtaccgcgcaaccccaaggactcgatgaagtccacctggcgaaagacggaccgtagccagtggaacatccatcactggctcctcgagatcctcaacatccactctgtctccctcgacaaggacatcccagtccatcccaaaaccgatagggtgccctaccttccagaatcgcagcagcaccgctgggtaatcacgcactccctgctgccgcttctgatccatcatgtctatacctcctacaccggccagaatttcacgccgctgggcgcagtcctgttctacagtgtggccttcaagctgatcgccatccacgagctccatgtgctgcgtcgcgtcggccattacaccggctttctagacggcgactcccatgagcgagacggagtgccagacgtgagcgtcgccaggtcgtgcgctctctgctgtcgacatccactttccgccccatctttaccgtcttccctgcataccggaccagccagcccccgtcgcgatcactggtacctgctaccggagaggctgg

SEQ ID NO: 1231 - DNA, 2882 bp, Emericella nidulans
actgactattagaaggttggagagtgttaagacgtatggagaacgtagggtaactaagaggatagacagcgcaggagatacatgactagatagtaggcgagtaggtcagacacataatgagcatattgaaacggaagtatacagtatgatagaattgttaagagttatctaatcgagacacaccaccataatagtatagagagaacaagacagaccacagcaagatagataggcacgaatgagtaagacggctctgtaagacaatatagaggaggtcatgatgcggccaccccatagataacacctctgatatatcagcgaggatcgagagagtaatatactggaactgaggggacgccagcacgtgacgataagaaaacgatagttcctttagtagagatttttgagaacgcatggtgaacacagaaagaccaggagagaaaattacacgctttgaacgggatttgtgggtggtctaatgagattcgccctcatagtgaggaacaaggaaccagagagtttcccttttgttcgctttaggattagttacactgattaaagggagcagacggggatggggataatcatatatgtacttggggtgagatgtattattcaatctccgatggttcggacttcagtggtaagggcctcctctccttcagttaccgtcgaacacctaattcgccaaggggactaagcacaagccctctgactcatcgaaattccagctcagtgtattcgcctctccatattccacatccaagtataggtcattctcctaatgcgtgaaggaagaccttcgccagttccatccaactcctccgcagagaatctccgtttctccatgccgacctctcgcttttgtcacgttcagtaccggcaatgcgcgtgtatccgtcgttggatggctgcgtgtcatcggaccaggtgtctaatctgagcactccatcgactccgtccttgcggtctcttccagacaccgactggaactcgcgcgagatccatgttcttccagacctcgacgattcgcagcacccgaacattgcgaaccctgagactgaggaagtaccgagcatcgaaattcctatcgaagatgcggacgacgactggcgacgcttcattggggagtttccgcagattcctggccaaactacatcgcaagccggctatgttggggttgagccagcccgcgaggacaccccttctgacccaggcgttgctcttcctgaaggtgctctggcaacgttgcagtttattcctctggaaggaacgccggaaccctggtcggagacttcggaaccgaatgaggaaatgtggcaggttgcagctccgccagaaccacgccggcttgacgatgaaacgccagtctctgagttgtcagagtatagcttcactggagctgagcataccatctcctggaggattcttcaactcactggcccctcgggctcgccatacctggtcacttccgaagctcaaccagccgcctacctcagccactgctgagagattctacaaccttccgttcaacagggaggaaggggaaattattgagcaagtcattgatctcccagagagattgaatgatgagcagctgacagcaatctacgcaccaccgacagcaattaagatcccagagagtcccgcacacccaccaacggagggttccattagtcctgtcagcgaacgtgtgcacgagatttcgagacctgctaccgcctacgaccccgacgagcaagacgagaattatgcggaggagctgcacaaaaagcgctgtccagtttggacagaactagcgtctggctggcggcacaagcttcgtattcttgcggcgctcagagaaacgaaccccgtcaacaaccttccagatgaagacgagcggcctcaagacgtcgacgagagcccccaacacgtttctccggcactcgagcgaaatgcttccgtttgcttcactgggatgtttccggaacctcccagttcgctccctgctgctaatgcgagcaaggattcaatctattggcgcggattccgtttcttgcttgatcagtccagaagccgggatacctttgtgcatcgtagtactcgctttgacgctgtgcaatctttccgtcttggtctgtctggtttgcacaacaagtgcctgcttgggaactatgagttggtgcttccagaccgacccgcctacagtgggccgttcgcgaaagcgccacgccattctgttcttcccggaattctccaacaaaaggctgagttctccatgattgagaaggagcaacttgtcctttcccaaatcagccagccaatgtgggccatggaagccttgcgatacctccaagggggcaatcttgttgtgagtcctgctcggaagcgcttctcgaaacgtgcgacagccgcagccccccacaagacccccaagcgccgtcaagtgagggttcttgatctgggtggtcatgccacagccgagtgggcctggcatctcgcgcacgactatcctcatgtcaaggtctacactgtgtacacagagcaccagcaagtcaacaaagccatcaagggccccccgaaccaccgtcacattcaagtgccccagctatggaagctccccttccctgacaataagttcgacgtgatctcagcccgctccctacctgcattcctgaagacggagcgtccggctggagattgtctagacgagtacgatctttgtctgaaggaatgccgtcgctgtctcaagccaggcgggtatctagagtacctcgtgatggacgccgagatagctcgcgcaggtccatacgcatctgcaacatccatcgagttctcgttcagtttgaaaatacgaggttacgacccagctccaacggagcaattcgtggatgcctgac

SEQ ID NO: 1232 - DNA, 2692 bp, Emericella nidulans
ccccccccttgacagttgcccccgggttaaaaaaattacggcgtaagggcccaaagattgtgaaaacgatgagaaggccctaaggggacgttaagtattactccctggggagtagagtgccttccaggattgccataatacactacctatgtgcataatgcgggtttgccctcgctagtcactgttcgttgcatcgtgggtttcgccatgcgcgtccgctgtcggtcatcaaaattattattgatcttcccacccggtctccttggtggagctcagctcggcgctcgccaggatgactgacgcggacatcgcccacttctacaatttaccatcggcatatccagacgaatggccggcagagctggacgacgaggatgaggaggagggagaggctcttcagcggcgcggttcgaagtccagctatcatgtgctcgatcggagcaacagtcggaggggtcctaatcttggatcaatgaaggggaataatagccgggaaaatctggtcaaggttgactgtttctgatcctttgggctctactagcagcgtgctcaacgctctcaagaaacgcgggttacctgttgctgaagacagccggctacgaaatcgcttcctcctatcctccacgggcttctctcccgctctgttcctttcccaggttcattccgacgcatccattgaatctcttattaatggcctcaatgtcctctcgcagtcaattgaccagaaatccgcctcgctgaaggtccttgttgaagccaatttcgagagattcgtccgcgctaaggcgacaattgacagtgtatacacagagatgaggaatcaaggaagggagcaggaacaagtggctcagcgcaggtcgattggtcatgtccgaagcatttccggggcgaaacaaggcccactctcgtccatcaattcttcgaaattcaggaagaacgcgttgttgaaggagagcgactatggcgtgaagggcatctgggcgcctttgacagaagcctccgtcaaggcggaagaagtctggggcccggcattgagtggccgtgagagggaacaaatgctgaagtcagttattgatagtatggaaaggcgtcgagaggtgtacgagattggcgggcatctctcaaagtcgatcaaacaaaaagactatgaatctgtcttcgaacaatatagaaaggcgagagcgcttacccaagaagctaagaatatcgccgacatcgcgggaagtgagggccggccattgacggacgaagaaacttatgtcattttagctttgggcaggatgtggattgatgtggatcagcagattcaaggcttcaaacgtgatctttggaggcgtctcagcgaggctccgagcacgtcaacgaggataacaacatctggacccatcgaggaatatatggagttgatcggcgctttgttggaattaggcgtgcacgacaaccctatttgggtctggcttctcagccgttacgattacctacgcgcgaagatcaaagccttctgtgagcgtggcaaggtcgagatagagatcctgagacgccgcctcgcgagcggtgccgagccgacgcctcaggaagtagcttcatatttgcgacgaacaccccaggacagctcaaccggccccgcacatctaccagacacggatcaagtgatagagctgtgggaatgcgtccacacatatctgaatcgattgttgtcgtcccagggaggcatcctcggggagattttagatttctgggaagtggcccagtccttcatcgatggaaataagcaaaagcttttgccggttgggtttgagggtgagagccgaaagcaccataaattctcttcaagcgatgtcagagatctacagaaaggacttattgagctgattagcctggttcgagagggtgttctatctcttttcgccgaagcaccagtggaagatgtgtctcttctcacttctccaatatcaccatcgagtcctagtagtccggtaagcttgggagtgactccgactgagtcccgcttcaaactcgaccccaagaatataccatttcccacgccaaagcgcggcgaaccatgggaagactacgcattctggccccctttttccaattccctcagcggagtcaactatcttggtcaatttcttattataataggcgcagcggccggggagatgacgaccctcgaaccggtctccagcagcagtacctcccaggaactgctccgagggcttgtaagtatcatacgtgaacgcgcagtgcgcatctcctgttctgcgtgggcgaaggatgcagaagtctgtaggctgctggaagattggacccgggacccgaaacgaagggacttgaccaagatgccggcactctttgtcaatttccagaatgcgatagtcagcggattacagaagatcctttacatgtccgaggcaatggcgaaaccaggcactgtaaccgttgtcacacagccacccaccaaactactgcaaatggtgcgtcgagagttcatatcgagtatagagaaggctctgggaggtcttgtcgagactgcggagcatccgacaactcgtgaagagaacgatgaatggtctgtctcggaggccacggcagtagttaggaacagcaatggatcttcagcttcccttgctgcagacgctgtggattcccaaaacagggtaaccagcatcgaccttcttttatattatcc

SEQ ID NO: 1233 - DNA, 3973 bp, Emericella nidulans
gaaacatcaagagccattgcggcccattataacctttatccgcaaggaggttcaaagagcaaagcgctgaatcagggtccgagaaagttggagttggggatctactggttgggactgtcgggttcgcgatgctccagaggtggggtagaaaaaacacggagaggcatatccgtctcaatggtggactagagactgtatgggatgttgtgatcctagacaacgggattcgtgcggatgtccttgatatgcagcaaatacagcccgtaaacaaccggcccgagatcatgcgcaaccgatcgcgacgctcttcattcgtaactctctggaaatgctgaggatgagttcgacgtggtggaacgtccggaaactgcaattgatgattccaagccgccttcggttatcataccggacgttcagcatcatatatctgacgaagagatccggatgtacatattgaagcagctccctcgaggctgccgcgcctcgatcaaaacagacactgttaccacacagaccatcacggtgaacgtttatgacgacgatggagagattgtagcccctccaggcaccatggtggttgaggagaggttttataatcacactgatgacggcggccaggggtcgtctgtagggcaggccccaaaacacaccatcgtcttccggaccgcattcaatagatcgcagagtgccgatgtaaggccaccgtcaagaaatcttgtcggtctacgcgaaccgaacaacgatcatagtgatgatcaccaccatgtcttatcggacgactctgcatttgaggttgggccagaggacacttgtcacatcagcgatagggtttcgaaaagtcagggacaagataatcagcaatcagtctcagtattctctgaagtccacgatccgggcacacctcatccttcacccagggagacgccgcaatcagcaagacgagtttctgggacatttggcagaggctcactgacaaaatttgcccaaagagtaaagacgggcacaagtgaaaaaaaggaccagtcgaagaggtcatcgttgcgattaccgtttcagcagtcgaaccctcacttaacaccaagcgtctcaacacagcgcagtaagcccaggggggctgctacagaacgaaagccttctgcgcaagcatatccagataagcctactcgtcaactgaaagcaggaaaatcagtcgtaccttccatgagcgagactgctcaccttaccgcaaacagaggcgtcccaagaactctttcgcaaaatcatcgatcacagcatagttcaagcacaaataaacgtgatggccgtacagcgggccccagagacgactattattgggtgcatgagagtagccaagagtcttatgttacgcgaactgacacctactcgccatcgcgagaattgaggccctcctcgcccacggcagctagctcgtatgtccgcagcagtagctcgctgtcacttacacggtccgagtcagagacaacagtcaatctccgtccagataaacgaccaaactctgctcatcggaggtcaaagtcgtactcagctagcatatactccttggcaacagccgggtcagatacctcccttatactagcccaccgtgctcggaaaagtgcgtatgacgatgcttcaacaattcaagctctcaatagggacggccttgttccaggaatcttccctaagaggcatttcgttcggaatattaggcgtttctgtcgctttgcgtcagcaacttatggggctagtgctctccaggtcatgggtttaccgcgacagccgagaggtcctaaccgcgacaacccccacagtcaagagcatgatgacttttctcaccacacagggctaccagcgtccgctatccttctttcgtcctacgttgaccctgcaggtggatccaacgctgctggtgaaactgaaagcggctttcccctcgtccattacttgttcctcgaccacgaatcgaaagctgttgtgcttgcgcttagagggacatggggctttgaggatgtattaacggatatgacgtgcgagtatgacgatctggtgtggcaggggaaaaactggaaagttcataagggaatgcacgcttctgcgaagcatctcttgatgggaggtggaaggagagtcatgattacgatccgagctgcattggaagaatttcctgactatggggttgtattatgtggccactcactgggagggggcgtagcagcacttctcgcaacaatgatctccgaaccgacccacgaggcatcgcttgtgtccttcacgaccgcttctcgctctgacagaaaacttatccttccaaacgccagattcaccgacgattctcacccggcttattaccttccccccggtcgtcctatccacgtctatgcatacggaccacccgcggcaatgtcaccattccttcgccgcgcaacacgcggactagtgaccactgtcgtaaatggtcaagacgtggtaccctgcctttctcttggtattctccatgatttgcatacaacagcactggagttcaaaggagatacctccgaagccaaatctaatgtccgtcttcgtgtctgggaaaatctgcggcaaagtatagtcaacaaattctacgtccacgaggcgccaatgctccttaatgccggtgatggtttaggcgaagatgcctgggcatggaaaactctgaaatctctcagagaatccatgtgtgcacctaaattagtacctccaggagaggttttcgtagttgaaaccatgcgggtgctgcagcggagtgcctttacctctgatgttggggaagatggttccttgcggctcggaaaaccagcaaccagagtgcaactaaagttcattcgtgacgttgaatctcggtttggagaattgcgattcggctccggcatgttcagtgaccacaacccagcaagatacgaagctagcctcgtggctctcacacggggcattttggatgactaacgcgccatgaccgccaatatgaatatctctccgtacacgccgatttctctagatctatggacttttctcaatgatttcctttttcaattatcgggtgaagattgagcagacctgtatatacccatgtggatctttgatttatactccaagataagagtagactagaatacaatatatccgatctggttgactgtatagcattattgacgaggcgaactttcagtaatacgatacgccactcgtcttgcaagaacaagtgggatagtcaccattcaggagctcctgatcaaagacaacgaacatgcaagtataattgtcacttacgctgctctcgcccttaatcaaacatctcatagccgtcctgcccgcaaaatttcggacatttggagcgagtatagcataggctaagacaccgcagtaatttgccagttggaaccagtcatcagcatcgactttcagctgatgcttgtgggtcgatacggcggaccaggctcgaccatcaactccgattatcgaagggcaggtgggtgtttaagccgtcacatatggttcaagtgcaatgacgggacggcttataactcgcttcagtcataggatgcaccaacactctatctcctttcacaccctcttattatcaatacccttttgtttcctttcttctatcctagcgtctaagtcacgcatctgcttttcaacgagctcttttttgccgacgagaacctggcgcgtgctttgaagagaggcaattcgctcatcaagtgtaatttcgcgggctttttgcgtttgctgcttcgtcattagatcagggcggaaaatgcggagttggttggagcaaagtacttacctgagaaccttcctgtgggcttcaagcctggaccataatggtcccgtgatagtgactggggttcaggttcggtcagaacaacttttttcttctgggggaatgaggatgactatttgttacctaatgaactagctgtttgcaaggatcttccgtcaataaatt

SEQ ID NO: 1234 - DNA, 4285 bp, Emericella nidulans
  unsure (1)..(4285): unsure at all n locations
cagagtgtcagggtgctctagacccagcacttgtttctgggtattcaaaacccgtataaacagcgcttccgcttctttccattttccttgactccagtatgttgatgcaagattggccatgctggtcaaggtgtaaggatggtctggcccgagtacctgtttgctagtctccattacctgcacaccaagcctttcggcttgcttcaatcgaccttgacttcggtatgttgatgcgagattagccgtactgatcagggtatcagggtgctctgatcctagcacagttgtctgaatctccatcgcctgtatgaacagctcttctgcttccttccattggccttggttttggtaggttgatgcgaggtcggccatgctggccagagtgtcagggtgctctagacccagcacttgtttctgggtattcaaaacccgtataaacagcgcttccgcttctttccattttccttgactccagtatgttgatgcaagattggccatgctagccagagtgtcatcatggtctgacccgagtacctgcttactggtctccattacctgcacaccaagcctttcagcttccttcaattgaccttgatttcggtatgtcaatgcaaggtttgccatgcttgtcagagtattaggatgctctggccctaatacctgttgtcgggtctccatcacttgcacctctagccattccgcttctttccatcgcccttgatattgatatgttaatgcaagattggccttgctcgtcagagtatcaggatgccatgatcctaatacctgcttccgggtttccatcacttgcacctccagcgcttctgcctctttccatcgcccttggttccagtatgttgatgcaagattggccatgcttgtcagagtatcaggatgccatgaccctagcacctgtttccgggtttccattacttgcacctctagccattccgcttctctccaacgcccttgagattggtatgttgatgcgaggccagccatgctggccagagtatcagggtgcttcggtcccagcaaccgtttccgggtttccatcaattgcacccatagctcttctgcttccttccgtcgttcttgattccaaaatggtacattagtatatgcaaagttccaccggctggtggtgtactaacctccttcgatccgaggtccgcaatattccaagaaagctttcgccgccgaggctccagtcactgctgcatatgcttgccaagatatgctcctgtgactgtcggcatagtcacatatgcctttaataataagacacggaacatcatcacgtattcttgctccctccgtctcgaatgcaatgacctcctccgtactagcaatggcgtctcggttccgccctgatttcaccactgtgtcggtgaaggcgactgctccaatatgtacggacactttggctgcttcaagaggctctcgacaacgtatcacttgactcttgtcacagccaagatcatcacaatcttttttcagtgcggcctcacaaatattatctggcgagtcattctccaaacagcagcacccagtagaagaagcattcccgtaatgcttgtgaagataagaagccttgaaaagagcatcattgatttgtggatggtgccacttcttgcttgcctgctgaagtgtgtgaacgtattgctgtatctggttttgaaattccttgcaagcattgtcaccactaaggccatccagaagagttcgaatttcttgacttggccggcctagtgtatacttaacaccagccttctgtggaagaccaccggggtatcgttggccaaatgtgtagttaagcacggcgtcaccaatcacaacatcgcctagatatacctctcgattatttggtgttgatggagcccctccacagataccaacaattagaacaagctcaatgcccgtgtagctgactcgcaagctcgaggcaatactcgcagcccctttctctgtcctaggcacgcagcacaagaccacattatggtttcgaattcttccattaatatatgaattcgcatcaccgagttgtttgccgtaatatctaccaaaccggtcataggtctcatcgaaaagggcttcaacagcctcagcctcaagaggaagagtgcagataatcgcgatcgcaaaatcattccggcttatgggtcgattttcggttggaaatatcaaagcttatccgacagttcagttcagagatacacagtttcttctttcgcatagactagacagcgaggatgtcgatgagatgaagctgggtagtgatcacacctgcgtcgttggagacgagttttagtccacagccttgcatttcactcaccaaccacatgctgtgatagccgctcatggaggggtagtccatgaggctggcatcaggcagtcgaactaacagccaataatgtagttcaatagccttcacgagactagatgatgaagattagtgattcacagcctgcatagcaggcggaaactgtacctacaacgtacaggctctcacattctatttgcaaatagcagcccacaatttccacatgtcagtcctaaccaggcgccttcctcgtccaggaaatcggtcaggttatgcagttcgtccaacaaactgacatcatacaagggtccagctgagttccagttagggccgctacagctggggcgaatcgcttgatgacagaaagatgcaacagacccatcaccttcatcgccttgattgactgtgggctatctggtatatgcctacccgaacgttctggctcgaatacgcacttcaataagagcctatcttatagtagaattcacatacacacataacttacaccagacgccaaaagggctttcgcatattgctcatgcagccataccacgggcccaggcattggaagcttcccccctgcagcggggcccagcccctgaaagaaaacagtcttgcatccaaactcgaccagaccatgttgctggtcgacggatgccgtgagctcaatgaacccgtccagcggccgcaacccccgattagatattttgtcgccgccgcggatgagaattgaatggccttgcttcggccgctcgatcacctcaaaatggcccgcaatgtcagttcccggtttgtactcggattccagtagctctgagggagaccatagcgttaccgattccggcgccgctgggtcggttcgatccgtctctttacacagcagtgcgaggagaatccgttgtggggcgaaacctgttgtggcataagttagcatattcttgtcagaatggcctatactttgattgcagtagctggagctggatgttctgcacccacctaaaccagcccagacgcctccacaataccgctctagaagcttgtcttcgtccgcgcggagcttaggatctatctgagataaaggaactctcttaatatgcaggtcatgaatggtagggttgccgtaggggttatatcgcttgaagtgctcagaatggaagatcgggtcggacgattccaaagggacgaattcgatatctcgtgtgaaaaagaaggaagataggatcgtgcaagctccgcctgtcccgactgtgctgcccaagaccttccaagggactggaattctcattctggtatttgataaatactaccaggaagacaaaaaaccagaaccgaccgattatatccgcagcagctgttatatgctatctacgtttagggcacggattccaagctaagcccgtttggttcggagatccgagcaatcagagtcggaaaaccgagacacgcaccgatgagcggtgcgttaccaacaagccgggtagttaacaagttaaatgagaaatccaagagttccgtaaattgttgtgcgatccgaatggtaaactgagaaagcctatcggtggcttccctgagctggagcggaacaccttcggcggcagtaagcacggcaccgaatctgtgggtaaacatgaataaacgttacaaatacttctgcagatctcacttaaaggatagttattatcggtgtgtcccgagccggggtaccggttccggcttaaaggctgcgctgccgtctgccacttagaagcgcataatggaccggtttgacagccacctgcatttatccagcaagtccatcccagtcatgtcagccatcgtcgtcacaggcagctcgcggggcctcggcctcgagctggtgaagcaattgtttggtcgagtgagtgaaaccagcgggttattgatcgtgacagcgcgncgcagcntacggcgatgcncaagggtcaggccggttatttttttttt

SEQ ID NO: 1235 - DNA, 4113 bp, Emericella nidulans
agttcactagttttaatgagatgttccagaggcagtactgattaccgaggcttctaggaatgcagatccattttctaatgatctgaatgaagattcagccgagccggccccccttctaaagcctcaggaagctcttggtgctgtacgactattaatctcttatatgcagggtcagagtgcattcaaggctccttttcttagatctcttgagcgactagagcgagatctagaggctgaaatcaccacaccgtgggctcaggccaccgtagatacttaacttagaaatgtttagataaaacatagaaacttcatcttggggataatttcagataggcgtattttccgctgggatgacttgtaatggctcaacggggccgcactgtagttaatctgtaacgtgtaggatgaacttgtcatcaggttagagttcgctgggtgttgtcaagccctctcttagccggtaaacctgctctcgatatcttgggcattcagttagctctgagactatatatagagacttgttgtaatctgcggtgtatctactttgctcttttcaaccacttaaggacagaaatagttctgtcatctccgttttcttatgtcgttacgaattctagctgacactgcacgcaaagattgagggctacacttttagacgacctattaccacaatccaaaagtcaaaagttaaaaaacgccctctgttactgtgcctagccatcggccgctcacttacacatgacactcgatctaacgaccgccacaagcggtgaaaatgaagctgctgagccacatacaatattcccttctcaataaccctttgatctgtgaaaatgacgtgccaatgaagccatctagacttttcatgactcgctaaaccggtgtggcagccggatttgccttcctcgatgacttacggcggtgacgccctttgggagcatcaagtgtttgggagagggattctgcttttttgggcgctttggagctgcgggggacttgggcttgccttctttagcagtcacaatatcatcttgaggctgtatttctgactcttcggctatccaagtctcctcgttctggtgttttctctggcgctttttctcctcttcttcttgcaatcgaatctgttttcctgaggctttgatcctcctcctcctcctcctcttcttagcattttgctgcttctcttctttgtcttgctgtcctcgtagcttggctttctcttttgcagcttcagcttgctgtatagccttatctttctccttttgcaggttacgcgcctgctgggtcttcctaggagaatagaagactgtattaccactctctgcggcctgtgactggaatataggagactctcctcgtttctgtttctttttctcatttgctagcgcatcctcaaggtctttgcagcgcgccttcagcatgattttctccgtagaaaggtgatggattgtaaggctcaacttctcagtattttcattctgaacgtcaacattcgcctgcttgagaagcctctcaatatttctccagtcttcccctcgcaatatagctcgtgtagactcactaggtgaagttttttgtgctgcattctccttaaaacgagccagaacaacatcaggattccagggcactaatccagttgctctccatgagttctcaacattggcttgagatacagccttattccaggccttacagaacagtccgaagaattctcgttctgtaacagcattgaggccttgagatgcatgcagaaatgcctctacttcatcatcatacgcctcggataaaggagagatgatgccaacatcaagaggctgcaatgtatgtgttgaatgaggaggatatgtagccaggagaatcttattctcttcacagtagtcaaggaacttcattgtgacaaatgaaccataaccatctagcaacaagagcctccagcggccccttgcctttggcttcgtctccctgtcgaaaacatcccgaagccatgccaaacacacatcgtcattggtccatccagaaggggaggatgtaaagaagcaattgtgatactcaggattgaagtcttgaagccatgtatcttgtattttgcttgaagcagactgatagaccaggccaggaggcagcttgcttccgtctgcgcaaatacagggaattgcagttatcctttcacagtcaccatcgtgaagatgctttttgaagctcccgatttcatggctctccttggagaagattctcttgtttttagagccgattccaataagaaactccttctcatccacgttgtaggtatcctctggttggactttgtattcatccaatttccgccttaataaagcaaaatattgtgagtacttaaaggtagtctcgtcctccctgtgtgaagaatcactgccggttgtacagacactcataaacttgctctgatgtcttctttgaaagcgcgaaacccagtttgctcctggctctttttgagcactctctcgagcaaagttctcgatcatctgcctggatgccgctaggcctttctcggactgcttgtcgatgtattttataagctcatcctcctgttgggggttgagcagctgctgttttgcatattgtgccttttttgagccctgaacaccccgatgtcttctagacaacgtcgtacggcttacaccatactgctcagcgattttagcatagctaaaccgttctccaggctttatggattcgattgctgccagtgccgactccattgaagccatatttgttgcgctcatggcttatctgcaatcaaaaagtcggtgtatacaaatctcggcgtcacgtgtagatgggcgacaaatgataaagcacggcagtacctggagagcacactccggctttcatggtgtgtaattatgatattcccacctcgatttgacaagtctgcagagagaagaaggcgggacaatcgcataagaccattgagaggttagagcagctggtggccacttccagacacaaaatgtgcctcccacagttattcaatcgtacgtgagaataccaacatcgtgtggctgttggcttgcgtaccgtagctatgggtttctctatcctacctctgttcctcttaataataacctaaagacccaggaaactagatttctccgtagcctgtgtgaatgtggcctgaagaagttatataattcgaagtcaggtaggtgtttgttctttgcccgagtttcgtgttgaatgacgaggcatccattgtcagagtctttgtactgaaacagatgatagttggagtctagagtcgcgtttctgttgcgttacatcttctgtccctcgttactagctttttattggctttgttgagaatgggatattgggatggttgcacgttcgccgatacgtgtagggttggccataatcatcagggatatgcagtccatcagatgtatatgcatttctagatctaaaggtacatacgtcgatcaaattacctgctccaaaatctccagtacctgctccttctcgttcaaaggaaccggattcgatcgacaccaccggtcatgcagagagtttgccgcgaggccgtccagcttatcctgggcaacgccaacttcacccagtgaccgcggcatgccgagttcccgaaacagagcatctagcacgtctcccaggtcaagactttccttttgcagaccgcgcgactttattacatccgcgactatcgactgctccaggaggaactcgcgcagccgggattggcggtcgttgttggcgttgtattttgcgttgtacttgcatacggctgggaggaggatgcagctagtctcgccatggccgacgccgagaggaccgagctggtggccaattccgtggctagcacccagttgaacctttccgctcgtacaagctgccatggcatccacggacccgagctgacatgtcaaccgagcatcaagatcttctcccttcggatcatgacgacacctcacaagccctggcactaagttcgcgagcgctttcaacgccagtgagtccgattcctctgacgttcccttgaccgcgcagaacgtctcgacgcagtgatccaccgcacgcacgccggtgcttaccaaactgattccggggtcttggata

SEQ ID NO: 1236 - DNA, 3659 bp, Emericella nidulans
ccactagcaggagcggacacgtgaggtaatctaacatttcagctttttgctgcacgatctcaccgtcacaaagacgaactctttggctcgaaatgggaaatttatgggcctagaacggcagaaaagatatttttttatgcctgcattctactatactgcaagtgtcaatccacagtcggggaagggccaggtttgtttttagagcgaattttcagccagacctaggaggacagcatctgtctcgtgcatcacgagacatcctatgttcacgttccagccggcattgccaggatagccagcgggtgttaatagcctggagaccctgtcaaagaccgtatacatatataaattatggtgaaataccccggaatggggacaggctaacggctcgctggggcaccttgggccgtgaattagggttagtggatactttcctcaagtccttactgtagcctcctcccatcctttttctccaactgacacttatctgaatagatcagagaggaggcgtctggagcacgtgcaggatcgtccctcttgaaatgggattgcgttgcccgccgttgctcacgtccgctctcatccctattggcgagtagaggaccgagtcctgctacagaaatatgacatttcggacgactgcaactgcccaagaaaaggggaaacagcctttgataggccgcattgaggctgcactgcaaggctgccgcagggaagactgcgctatggcccgcacagaaaccgacattggctcaagtctcagccttgtctggagctgcggcctctataagaatgatgaagggttctcccctctccatccaaaaaaagagcctcagccgtccaaactgacctctgttcatggccgggacaggatgtctccaacaactagtagccactccgactatgacccgctccctagccaaggtcaccaatcaccacgtccaatccaaaacgcagagacaccggcagcatggggaatcggctggaagtgtccgaatctgatgatcgggctcgtcacttgcggcgcgatgctgtcagtgggacatcatttctactaccgcagcttcgatgacaccctcgtcgattctatcgaccagcaaacatgggcgatccgggttggaaccggctttgccttcctaatcaaagcatgcctcgtctccgcggttggagtggcagcggtgcaggagacctgggccactctccgccgaaagagtgtgaaacttagtgggattgacggcatgtttgctgtcctggacaatccgcttgcctttcttacccctgacctatggatgcacgcgaaaacgctcactgtcctggcgatcgtctcttggtatgtgccaatttactcgtgctaaatatagtgagcctatgacttacccgtctgcaccggaccaggctaatcccattgatggctattgtcacgccgtctactctctatgtcattgccttgccaacctggcagacttcccaacttgaagttccaagcgtgagctttgctaaatccttctggatcggcctggtaacactcgagggagcaggatacatcaattcaccgtcgcccggcatcagccgcctcttcacaatgatcgcctcgtctatgcaattgcctccagtccctgcaccattccccagatcatcctacacgctaacattctggggcccctcatacaagtgccagagccttagcgaacgtctcttagacgtgcacgggttgagccaggcactgtgggatagcgagatcgggaacacaacggaccagtcgcgcagagcttattccggggttgctcctcaagatcttaacaatacactttttgtatgggctgcagggcagaactcgctgtggaacgatgacgcctcgcgaccgaccgagctcgtctgccagctctggaatacctcctacgtggtcggcctttctttcaacgatggcattcagaccctaacacctatatcagtagatcacgtcgcctattccaactggactgcaggcgctggttcttcctctctactcgaggatataggcccgacagtgaatggggggttctacgtggtacatatgctattttccggccttatccagggtgactggctcactggttctacggggtcagtggcagagaacataacctcacagacggcgttcaccaaattgtccatcgcacagaccggcctctttgcatgtccggagatgtggaataccagtcaatatgattaccttcacggcgacagctcaaccacttcttgtcggaacagaacactggctcgagcaatcgaagatctctcgcaaaatttcacctacagcctcctcaatctcaatgccgcaaacaccactgtcgacgtgctggacttgacatcgcgcaacttctaccagtacggtgagggatatctgatactagcctacatgactgcgattggagtcactgttgcgtgcgtcattgttggattttttgccctctggcggaatggtgtctcacagaacacctcgttttcgagtgtccttatgacaacgcggaatccggagctggaccgtctggccattggccattgtctgggatccgagccgttgaaaaaaagaatggggaaggtccggttgcagtatggggagattgagggctcggatcagcggtataagcacgcggcgtttggaaccaagggatcggtgatggctctgacgaagggagagcattattactaggtgggtcaagtagcaggagcagtggctttctgccggctttctgccacgggggcgactgattggtcgaccctgtctgatggtgctttgttgctattgagaattgctggtatatacttcaagttattgtctgattaccttgaactacactggttatatggctttcaacgttctaaccagccctaaccccaactcttcttcagtccactccaagtcggtacaaactatgatagtataccggggagatgctcattcgtgcttgagcatggtgctatacgggtggactagtgagtaatcttatactttatcgtccgcataactggtgaaccaatggtggtgacctaggcactctaagtatgcgccatggaatccctagtagctgtaccctagcgtcagactacttcttcaaacccaagttcccaatagcccctgtctccaggaagacaattcggcatctaacccgctcctgtcaggtagcactcacttgaataactagtttacaagtccgctgctccctttcgaggaaactatcctataattgaaagtccgctccaaagccatacaggcagagaagaatctgtttgtcagcgccgcttatccttttcagccgaggatcatcactgcttgttatgatgctgcagaggctgtttgtcttcaaggttaatgtatattgttgcctgctgtggatatgacgtaactaaggtaatcacagatatgataggttcagcagggtagtaagcgtgactaaaggcagtctcttgaattgacgagctgtgagagaaaagcgaagcgaagtaaagaaagagagaccgcagttatgctagcagctgggagacctgcgcaactcaccaaggccagcatcatccgtaatcatagagaagccggactgttgcgtccatcgatttctaacgcaagcatacctcccttcactgcgaagacaacatcagaactttagcgtcagccgacactt

SEQ ID NO: 1237 - DNA, 2698 bp, Emericella nidulans
gcgggggaccggtcgtccccgcatcacccactggcttgctgcctgctggcttctggcttcaacatgggctctctcttctgttcatcctcatcatacgccccttgcatgcatcgttgcgtctaggattctaaagtcaaatggatgatcgccgcgggacgtgccacagcatggtttgactcttgcttgtcttgtgaatccgtgattttcccgtcgagttcgaaacctcgaagattaaattgagtcaaggccgtggttgttggatgatctgatccatcgtacgattggaaaagcctcctatccccactatggtccgcttcctgcacctagctgggacccttccggtcctagcctctggcgcagtccaggacgccctccggccagttgccgagtccgccgcgaccgtaaccgcaaccgcgaccgtagccgggcaacaggctcaatttacactctcggattatgtggatgtcggggcagacttgattgccaatgtggacgatcccgaagccgtcaatgcccagtccgtctgtcctgggtacaaggcttccgatatacaacaaacggacctgggctttaccgccagcctacggctcgcagggcgagccctgcaatgtatacgggacggacgtcgagtctttgactttggagatgcagtatcaggatacggaccgcttgaacatccaaatcacaccgacctacgtggacgcatccaacgcgtcctggtatattctgccagaggaattcgtcccccgaccgaaaccggccgcagtgcgtccgagtcgcacagtgacttcgccgtgacatggtcaaacgagccaactttcaactttcaggtcacccggaagtcgacaggcgaggtgctcttcgatacggccggttccgtattggttttcgaaaaccaattcatcgagtttgtgacatctttgccggaggaatataacctgtatggtctaggagaacgcatcaaccagctccgtctgttgcgaaacgccacactgacctcctatgcggctgacattggcaatccgattgatgcgtacgttcggttactctcatccttgccccatgctaatggtatgcagcaacatctacggacagcacgcattttacgtagacacaagatacttctcagttgacgaggctggaaaacacacatacgtgaaaagtagtgaggctgaccttcggcaacatatacctcctactcgcatggggttttcctcagaaactcccacggccatgaagatgtgccccatccgcagggcctgacttggcggacgaaagaaggaagcatcgacctcaccctctactcggggccgactgtagcagaggtcacaaagcaataccagcgcagcaccgttggtctccccgctatgcaaaagtacgacacgcttggtttccatcaatgccggtggggttacaacaactggtcggtctttgcagatgttcttgcgaatttcgagaaatttgagattccgttggaatatctctggtatgcacgaatacgcacctatttgaatcctagcttacatctttagggccgacattgactatatgcatggttatagaaattttgaaaatgacgagtatagatttccatataacgagaccaaagttttcttggacaagcttcacgcaggtgggcgccattttgtcccaattgtggacgcggcgctgtatatccctaatccgcaaaacgcttcagattcgtaagtttttcgtttttattgccgagtactgctgacgatcttagttatgaaacgtacactcgaggcgcagctcgagacgtcttcctgaagaatccagatggcagcctctacatcggcgctgtatggcctggttatacagtctttcccgactggcatcatcccgatgcggctgatttctgggccaacgagctcgtgacttggtatgagaaagtcaaattcgatggagtgtggtacgacatgagtgaggtatcgtctttctgtgtgggaagctgtgggtctcgaaaccggacactcaaccccgttcacccgcctttcagattgccaggtgaaccgggcaacgttgattacgagtatcctgaaggatttgagctgtccaacgcgacagaggctgcttcggcatctgcagcttcttcgagccaggccgcaaccaccgccacagagactacgacatccaccagctcttacttgcgtacttcgcccactcctggtgtccgtaatgtcaactatccaccttatgtgatcaaccatgtccagacgggccatgatcttgctgtgcatgcagtctcgccaaatgctactcacgttgacggttatcacgagtacgacgtgcacagcctctacggacatatgggtatccaggccacctaccgaggtttgactcagattgcgcccaggaagcgtccattcatcattggccgctcgacgtttgctggctctggaaaatgggccggccattggggcggtgacaactactcccggtggtcatccatgtacttttcaatctcgcaagcgttgcagttttctctctacggcattccgatgttcggagtcgatacgtgcgggtttagtggaaataccgcggaggaactctgcaaccgctggatgcagttgtcggctttcttcccgttctatcgtaaccataatgttcttgggacaatccctcaggagccttatcaatgggcatcgaaaattgatgccaccaaaaaggcgatgag

SEQ ID NO: 1238 - DNA, 5624 bp, Emericella nidulans
  unsure (1)..(5624): unsure at all n locations
gcgaccgcgggcccgggacgagagcacgtgaatagccaggctgttcctcctcctgcggcttgaactcagattgctcgttctaatctatagatgcctatcactgattccaactgatacagttgatatcagccaatgtcgacgtatacccccctccggcccttcgcctgactactatgtatatttctgatatgtatgctgtgcccttgtcatgattaccactctctattctagcctgtcagtgtatgaaatacgcttctatttctttgtactcccctgggtctgcgggcgtctagaaatcaagatatcttcatgtcaaatatcgtggtatatttctaataacggtgtctccaaccgtactctctcatttcaataatctcagatatggcacatatcggccctgacctagactgatatggcagtttgctgggttcgtttcgtaccatgtccctaatacaggcgtatgtacaggaagaatacatccatgcctactgcatccgcacagattgaacatttgtttcttatacagggatatttcgatgcacattgcaggtggtttgagtactatataatatctacaagacatcaccagcacagcctccgtaggtactcatacgatatgacctgactgagcgctaacaaaaataaacaattatacataatgtatgtctattcacttctcagactgtactggtataaatcaggcagtcccaacaacccttagcacttcgctaagagcatgtaaaacctcaccggctccccgttccttacctgccacttgcaccgcctgcacaacaagcggataaatccactctaggtgtttcttgcagctcgaattgcacgtcaagccattcgccataggcggtggcgggatagtagatggttcgctttgcagctcaaccataccacggagaagatgcaacagtgctctgcgcgctggggtgggctgaggcatgagtccgcgcagcggctgatccgcgatatagcccttcaaggagacgggacagcgaaggataaggtatggtgatatggaacgcgcgatggaggttcttttgacagcctcttcatcaatattcaggcttaggctcggcgaagaggaaagttcgaatagggtatcgagtgcggcgtatgccattttacttcgcgtagttggcggcggctcaaaggtccgccctgggcgtatgtgatatatgccttcaagtgagccatccgcacggtatttggcgggcaggtcgtgtctttgcggaaggtagatgaagnaggagtgaagtagggcgcatgcaaaactgcgccggatgtcgtcatggatcactggtgcaccgatcgatgggatgatgagggatttcagttccaaaaatgcatcaatgtcgaaagcctcgtcggacagcaaagcaggtccgggaatgagtacggtgcggtaccctctcgcggatacaatgccatttacaatttcagctacccatttccagaatcgagatacttcggcttcacttgcggtaccatactgcttctcgacataagggatcgctacgcgcaggatgttcaacagcgctgtagttgactttcgccaaatgctgggctctttatccttgccaggccattcatacctctgaatgatcggagctgcgagatgctccaacgcagtggacaaagagccgtccgcaaatatgtcttgtttaatgccatactcagcaacataccaactgagaagatccatggcactcttggagaaagcaacataggtcggttttctcgaatcatcttccggagaccacctggttagagcataatccgtgaattctgatagacattgaatgatctgtccttgagagtcgtccttttctaggcacatcacccgcacacagtcaatgacaagtacctgcaaaactgatggccgatcgatgtcaggcgaatatttcggaattatagagttccgtacaatcaggttcatgtgttgcaagatggttccaatgtcttgtttcgtcaggttgtccttgtacagccgatatatttgctggaaactatgcaagtaagaaatagcagcttcttgattaggctgatccaagtcgagcatttctttcttgtccgtaggatgtccattggaccaaactgcccacgctgactgcaaggactttgtgcttaggccggtgggcgactgagcccgcaaaagaatgctcgacaggctcgaaaagacagcctggctgaatgccaacaggcgccggctcgccagcttttggaagtgaccaagcaatagctcccaggactggtcaaacctatcatccttcgcgatggtctcaaagtagttagtgataaggtcgcaaatcccttttatcacaagaaccatagtctcaatccatgctttcgcctcagaatcccgtccacccttgatcaatatgctagtagaggtggcctcaatttgctcgagcattcggaataagacacgattcaagcataaacaccaggccttgggagaaagctgttgaccgtaggcatcgaagatccttagtagggtatgaatcgcacaattcctgacttctgacctgctatccgtcgtgatgtccacaattcgcaagaggagtagtaaccagagtgcattgcttgaagcaggagggccacccgttttagctaacgcaaccagctcttcctcgctaacagctagttctacatagatttcaagcgagaagtgcccagtctgatcgtgaagaaagtcagagacattccagaaggatgacgttgtggtaagcgagatattgaaaacttgttgttgcagagcgaatttggatagggactccacaagatgaaggcgacagggaggtggtagctgcgagagaaagtcggaagctatgagttgcagacttttgtatgccacttgtatcagtcgaggagagtcggctattagcacccgtttgcccccttcgacgtcttttgagctgttttggcactctttcgctgcatgctcgccgaatacgctggagatgagaccaaaaacagccgtccagcactgaacgaaggtctcagcatattgctccaagatgttcttcaaagtttccaaactttgttcgtgaacatccgctatcgaagttgatggtgatcctaacttgcatccagtgctttcgtaaagcagattgacctgagactgaagcgtctccaagtttctcaactgccgcacatctctgtctgcgtcgctttcattatctttctgcttcatggtctcaaaaactaggccattgaggacttcattcgcccgtaggcggagatcttgattgatctctccgttagcagcagtcgccatcagccggtctgtcagaagctgccaggcactctggtcgttatctcccatcgaagatagtctttcaaggttcgctttggctaagctatgtgccttttccaaaacaaatttcagctcctcttcctgaatcctagacttgcccgacgcatgtgaagcacgacgagatgaccggcgcatacgaccggagcttgggtgcaagtgcgttcgccctccagtcatttcagaagtctcagatgctgctgctgctgctgctgctgctgcctcctcagtggtcgcagagaggtccaagagcgcaaccaggaagtcgcggaaagtgtttactgggaaatcggtagtgctctcaaacagtttagaagaagcggagtgcacggccataatttcagttcccaggtttccctgaggtccgcttcctttagccacacctacgacttccccagtgccaccagctgaactttgcgtctttgtcaaagatttattaaccagcaagtcagtatcctgaagggtaccaaggacaattgaccaagcaggttgatcaagagtcggaccgagagcaatccctaaattgagaagtgcacgtaggcaaagaagattccttgtgctgagagacaaggcttggtcacccatcgtcgctaacggcccctccagtgtttggggggtactataagagacgtccttgcctttatgtttttgttccatagggttgttttgttgagtgccctgtgttgctaccgggctcatgggcttagcaacgttcgtgtcagccggcatagaggccttcccaagagtggtcaggaaagcgtctcgaggcgtggagagccgaagaagaccagcaacgtgggttagcttctggaatgaacggacgaggttgtggtaaaagtcatcgtctaatgatgcatatagaaaggttgaacacgtggcgagcacagccggccaacaatcttcaactatcccggcacaggcctggatcgccgagagctgagggtgagattccaactcgagggggttgatagggacagggaatcgtttagtcgatttcgaccgtttgagagaattctccctgtgcaaatcgggcgatgacgcggtagagcccccatttcgctccccagcaatacggcttttccgtttcggtttcaggtcaggcactgtaagtggaagtataaacttggcgagtccttcagcaaaggcgcttacgcagtttagcaccaagctgtatatgtatgtgtcaggtgacagtgaaagttcgattttatcgagcagctctaggtagaaaaaacgaactatgcaccattgattgctgatacccggcatattagtatccttgaccggaacggttgttccaatgactcctgcaacccctccaacttcaagagatctttgctcttcggtgatggatcttgagagctctgcacttgacggtgctgctgagcggctgctcacgccaatcaaagagggtttctcagctgctaatcgaacaagagaagccatatggtctcgaaggatattcttccgcccttccactttatcatataacgaatagatgatcctgacgagccctggttcggcgtataacccttgaaacatctccatacaaagcacccgtttccatgaggccgttccatcaggctcaagtaaatgtatcaagaggaccagggccatttcacactctgcagtgattagtgatagataccgtttgagaagaataagaagaattctcgcgatccggactgtctggggaaagctatgcctttccgagagatacctaacggtcatgggaatcaggcgggcccgtagcacttgcgtgagttcaggatggtcaacaaatagttggccactgttaaggagaacgctttcgatgagttccaaagtaaatgctggagacaacgacttgattcggaggaagtgcaactgttcaccatccacaaggcggcaaagatcatccaagaccttgagaggtcaggccagctagatctggtcagggtgttcgattactcacttgcagtgcatccatggcaaaatacccaattctcacggaaccactatcaatgttgactgtggttgttggccgagattcttgtggcatctctgaggagtataagcacacgggacggatattatgcgtctaaaaacacgagacttactgtcttccattgatacccgctcgaaggtggagacaacgagctgctggagtgtagcagccgccgtactcgagaccgcgagggtcttgctcgactgtagagtggcgcatatctcgagtgtcgttacaaggagttcaccacccaagtcattagaataatgctgtaataaagatggcagggtctgcagaatcttcaactggatc

SEQ ID NO: 1239 - DNA, 1813 bp, Emericella nidulans
tcagtcctggcagtcccggccgacggaaaaaaaaaataaaataaaaggagactcacaaaattgagattaggaatcgccagcaaaatgcagccggaggtacaaagccacatgagagtcatgttggggatcagacacagcagcatctccttccagcgatgtagctggtacttggctgggagctggaaacccacgatcaccaactgaacaccgatcactacacgacatagtccctgcgccatcgttagcctggccgctggtgtgagcagactttgctatgttcgcgcaccagggtgatcgcatcctgttgaccccgagctgcggacgcccattcggtggcatcgagaaactgcgccgcatatggccctagaatgatgccaaccaccacagctggtacttaattcgcgaacgagaaaaacatgatttagcatccggcttccagagctgcatgtaaagctactaggatagaaggattcgtacacgcttcacccagataccactgtgttttcactttcaccgagatcaacgcgtaaagaagaatgaaggtgcctattggccaaattaggttgttgagctccaagagataccaaacaaatctctgagaaagggtagatacccagaaccgatatcaccacattcagctcgctgacatccagggtgggcatggtgagttgaaagcggttttagaggtagagagagagcttgaaaacagaaagttgagaagcagcagacatgccaggttgtaaagcttttcgagcaccagaagatgaaatagaaaacgtacaacgagttgcagtatattgttgatcattattgagtttcatggcagagactgagcttacaatggaggcccagtctcatgttgcgtcgcaccagcaccctgcaacagacgagtgatagcgccgagggccgagagagagtatagcttggcataacttgccacgcagccattgagtgcaatgagcagcgggacatctgatcagttcgcaattttcaggggtaaacgacggaccaagatcagcggcttggaagcgcttgagaaagcagatacagagctccaccgaatgaggaatcgatcctagaagggcggattgcttggcatcgatcagccaagacgcaagggtggaggccaagaacacgctggttcctctgctattccgtatttcgctaaatctctcgcgctgtttcatggtagacccccctgccaagaacccccaaaagagctcacttccttttcttttgggcagacggcgagcatctgaggtcttgttatgacaacgagaggtttggttgagccgtcgactgcgtttcatacgtgggggacttactgaccagatagtgggctgattgttaaaacacgcccaatgccggcttccctgctatttttcgagcaacgttccgaaaatacctgcctctgaattgacttggtattcccggaatgccccaccggggaagaagcaagtttaaattccgggatttcgtctggcggggggctgaaatagttatgattgggcagtgccgcattacctagcctttggatgttgctaagtgaaaatttggctgggccagggttcctttttgaactaaaacctttaggagtctgagtgctggcccacaggacggcccgttgcagtctgatccataagcagaatatttaagccagtgatcgaaattgggccaagactcggggttggccgctaccggattaggtccactttatttattgggggcaaaggtagaattgtgatgtactcttaataagtcttgttgttcaatccaatccctgttgttatgtgttctcccccattttataata

SEQ ID NO: 1240 - DNA, 2237 bp, Emericella nidulans
ccaaagtctggttttgtcaagactcccattgttctgatcccgctcggatcggcttcttctgcaagtttcagaatctcctgggttgtaatgtcgacgttgcaaggcataaccgcgagaatactgtcagctggttagtagactagatccatttgctttcctctttccgactgcgatttagcacagaggctcataccaatctactttgtaaaggagtaagaaagctctcctctcatcactggcttttttcatgtctgatactcaatgatattggcttgcatgatgcgattggttttcaatatgatattgttattgaaaaccaatggtaccaaagtcagggtgtagatataaaccgtaatcggaaagtcggagagcagaagcttctgctaaaagatagtctgatgtaacgcgtctgttcctgtgtcctagatgcgcactttctcaccatcagatgcagattctaagagccggctgccagggaggaggttattgatcaaactaaatatgatttacatcccgaattagcccgacgatctctggagtggaggctatatcaacttctgccatgccctgcgcactgtataccagacagtgcccaaacgcaaacaaagccaggccagccgcgactattgtcaagtctttgagacgtgctagtgggaatattctcaatctcaatcttgttgaagctgttgtcgaacaaaggggcgaatttggtaaagatcatggtatcgtctaggacttttcattcctacagcagtctttctgcttgcgatggagacgaggatgttctccctctttcctctgaatgtagtcttatcaccttctgtagtttgcgataacagcatatgcttgtctaactacctcttcctttcatgccagatgtattcattatgcataaaagggataatggcacatcatctttcaagcgacgatgtacaaaaccctgttatatagcttttcccaccgcatctacccaaataaaagcgatctatcccctacccttgccgtctcatctaggttactgctaaatttctaaatatgctgatttgatatgatagaataagacactttagccattgtttttacgcctcgtaactcgaatcatacagaagtgactgtatgcgattagaacattaaacaaacattggcataagcgagcaaacactaatgagtgcagtcatcttctcccgataattcaactcccggtctcctgcaagatcatcctgcacccaaactgcctttatcagtgcgcttaggatatctacagaccttgaggacgccgttttctctgtccgatcgataagctcaagaacagtacaccgatcatcgtccgtgcgggcttcgcagccgataatcaacagcgggaactgccggggacaggagtcgagagtggcaaagatggtgagcgcgcgctggatccgggtctggttggtagatctgggttcaagggcgtaggctgtcatgcggttgaagtagacgaagattgaaaggtagaagagttcgaaagtgggatctggggtatcagggagggggagattctggagttcccaacctaggttttgcaggattccggctggaacagattcggggattgaagcaaatatctggtagcccaggttgagtaggatgagtagggtgttggttggagacggcgtcagctgtgagacctgatatagagttaggggatgatgattagggcaaggaaacgagggaaaacggacgctccagcagttgaccgatggacagtactcagtgtgcaggggaggccgccagtgcagagtactaaaccgccccatagaatggtagtagaatacccagtccatcatggtactaatgacgctgttccatttgaaattcaggaccgaggcgtagagcacctgtctcaccccattgataaaaaagtgccattgggatgaggtgcacgaagctctatggatttcaaacgaacataagagcatgccggcggcgatatgctgcagcgcttctgcggcaccaatactggtaaacgaagccgcttttagagaatttatggcggagatcttgaactcgaaggcttgggcttgtacaccgtagcggtgcagcgacgaaaggccaagtagggcttggcgaaccgctgtggaggagggagaggaatctgccagtgccatagggataagtatgctacttatgcttataggatcgtgaccgagcacggctagagcgcgcgacggggtatgttcaactgatgctgttagtttcag

SEQ ID NO: 1241 - DNA, 1378 bp, Emericella nidulans
gattagtgatctttttaatatagctaattgtatacaggaaggtgaccgcgtgaagcaagcatccgcttgtacgaggccgctgattggtgagtcccgaaaggagggtgtcccgtacgaggaacccataacacaaataaagaaagatcaataaagatcaataaaaatcaataaagatgtttgtttgtacttagtctctttatctcttaacctagcacatggtgattaccttgtattcttatataattcatccaagggcgcatttcttagtgaatcaacccagtacctttataccacttcccgtcgtcaccacctaaacaatctattagccaatcccagagccattccacgccatatcgatgataattgatgaatcataataaaaagaagacttacgaaaaactctccgagtgcaagtacacctggccgcccgccttaccagtcaggattccttcctgtgcagcagccgctgcattccgcacatcatgtaacatcgaagcaggaccgcatacatagatagcgacatgctttccggtgtcggtcgtgctggcaactattgaggggagcttcggacgcccttgtgagaatgtgcggggtacacatgagacgggggttttgtgtgaggaagaggttgaggctgatctaactgggttgatcgcgtcatctgctgttgatgttttggtctctgtttgtgtgggttcttctgctgggccggatggtgggaggggctcaagggtcttctcgatgtcggtttcgatgtcaaaccttaacgatggcattgacgaagtaacgtggatagagacatcgatgtcaaggtcatatttagaccctttgacgccataaagatccagcaacaactcaatctcacccctgtaccaagctgctacatctggacgctgacatgcaaagaccacctggatcctcctcctttcacccttttcagctccgcatccacagcctgactccgtgaagatttttagagcagcctcgagaataccaagcgagaagccaccgccggaaccgccggagatgataagaacactctctgaccgttccagtgcgcccatcccgatcccgccatacggcccttcgagcagcaccgtctgggtgaaccccggcttcctggacgcaagtttggcaagacggccagtgatgcctttctttggtttaacgtagaagaccatctcattcgctctcttcaaggactggatatcgtgcgccgtcgagcagatggtgaatgggtgggaggtgagactgtgaagtcctacgctttgaatacccgggaaacggatgaagacatgctggccccgctttcaggagagaatcgtaaggattctcaattgaataagccgcagggaggacggaaagggtccggtgtgtc

SEQ ID NO: 1242 - DNA, 1330 bp, Emericella nidulans
  unsure (1)..(1330): unsure at all n locations
acgtacctgatagaactaaactatattgcggcttgagttttacacgccatcccttctgtcattggtcttgctggagatgatttagagaatatgaacaggtgcccttcaacggcctacctgcttgttatcttctggttgattggtagtcttgagggggtcaaatttatgggtgcgattctgtttatcataaaggaggttatatactttttctagcaataaccctatttatttctgatgctttcccgtgatatctactgcctgatatgagacagaattgatagacagagctttatgtttccaaagaagtctaactattttactatcaggggcgaagctggataagaagtaccgcaccttgattgcttcgaaatcgagcctgtttaaccagcgttaccatctaacgttcggagctcataagttacgagctcgccagcagcatcattagtcattaatctagggaaacgtctacggactttccataaccatggtgccggattggttaggctgtatctcgctatatagccaccgtatacttcaataatcgtcaggatccagcgtccgatatgagtagaaagcatagagagaccccaatatatatcactttaaacagatcggtcaaacacagtttgtccatatcacaaaggaacagttttcattgacggcaacaagaccattttgcatctagccatcaagggtgcacttgctgaagcgtattgtcctcgctatcattagttgtcagtcagtaaaacccagccaaccagttcgcctgtaattcccgattcgcaggatatttacgtttgtcgatgcagatgtgctcgtgggctgaatggtcgtggtatgacacgaacgctctattcgaggctgcattctgtcagtcatcatctcccttgaaaagactattacctcctattgataaggtccggatactcgtatcctgagtcgcggatcccgtacttttagaattctctttatctaaacgcaacatgggctatccgcatggactcgacacaggcgacgtcaacgcacctgctgctcgcataattaacgcgcactatacttgctcgcgcatgcagcggctggggaggaagggaggacatatgcccgctttaataagctgtttctggaatgagaggcggggatgataagatgcagctgaaccgtaaagtggtcaggttaagggtggcaggcgttttatgtgcggcaggggaggatcaagtgtggtccaggctagaatcaaggagaattgacgggataaagtggcagaaggggtatttagtctgtangaagacttagggttgctgctggaaggtaagcaaaagcaaaagcaagt

SEQ ID NO: 1243 - DNA, 1743 bp, Emericella nidulans
tcagaaatcccacaatattagccctattattatcgttcatctcaggattgctggctgggctaacggttcctgacagggaccgataattccctcttcctgtgaaccagagtatactttgctcgagagacatgtgcaattagtagcctgctgtctttagtctgtaatagtgcattagagatttttttttttataattttttttcttctttttctgttctggctttttcagcctcacctgtcatcgaaattggcttcgataatctcgctgtcatcgctcaacggcttctcttccccacagcgcctacccatactctagccagctacaccgtatctacacctcacgattcttcctggcgagtaagacaccgcccagaacacgggtccgcactgcctctacgggcgttcttggtacccccatctcttcttccacggttccccctcaccgtatcgctgtggctccgagtgctgatctgccagactctgcgacaggtggttgggtcattaagcacaccacattcactaaaatcaagacaagagcgactcacgattcataaacctcctccgaactccctccgaactccggatcaactgtctcgcgaacttcagcctacctcttgaaaacgaaacgttggatcgatagcggcggggaagccaccatagtgctcagtgcgctgattattttcgtcgtccgtccgcccctgacctggccaaaccgcctgctacgatctaaacgtccactgtcgagaccgcttcctccagacctgttctgatttttttttgaatactcgtgctcggttgaattccagctctgaccttgttcgtcctgcttacgacgcccatgctaccctgtcgcttcgagatttttctagcgccgcgcacggagataagctgttgagccttagtctgagaagacaatcataccgggataattacgtttgagccagaaaaccgacgcataccttctgctcaaaaggaactacagtagaggagctttattgcatactctaataataatctggaagtgggatctgcgatagttcgacttggaggtcctctgccttcaagatgatgtcgagaagccagtcgagcctgggtcacctggattctttccgggatgagcatcctcacactggtgtgtctccagggacgccggctcccaattcctcgccgaatccggtcaatctgtcgggtcttgtgtgtaatgttcgccgcacctccggacgcgaaccccctcctcttgttggagcgaccacaaccattctcggtgacaaactttatgtctttggtggccgtatcctttcgaagacccggccacacctgacgtccgacatatacgagctggacttgattcggcgtcactggtccaagatcgaggcttctggcgatatcccccgcccacggtattttcatagtgtttgcgcgcttggggacagcaagctagtgcgctaccgaggaatgactgcgatcgcaaaccccccaaaggactcgacaaatggtgggaatgcgccacaaccagaaacggaggcgacggctgaatcaacatattcgacgtcccaactcgaacatggaccaggatcaagactgacgactcttctcaagggcgaaacacgcactgtgcgacaatagtacctttcagtgcttatattacctcggcgacagctgctctcttagcgaatcaccacacttcttgctctgctaaccctgaccagggtatcattagcatgacattgaccggcttgccggg

SEQ ID NO: 1244 - DNA, 1795 bp, Emericella nidulans
  unsure (1)..(1795): unsure at all n locations
ctctcttccttcctcgcaggtcactagactcgatcttggccaacgtgggtgccccttagccacaagacgccagactgaaagttgaccaacattattgccatattcaaaggccgaaaggatccacagtcggccagggtcggtgactggattatagttcatatccagaatccttggtctactggggaattcatccgccaaaccgtacccaacggttcctatccctgtgccatggtgcaagagggaagtactcttatttctcgttactattgaactcgacaaaccccgaaggatcttggattgactatggtatagtcgtacgccacccgtcacaaagcagagactatcttgttctgtgtcacgccattcgtacagcgattggcatatgcgtttaggcaatcaaattgggacttcgaggtggtcgatttgccaatctcaaatgtgggagcagtgtcgacgtcgtatacttggtgcatgagacgccacttgttcctgctttgggcaggaggatagaaaccgatctatgaggtttacggtaaggataaaaggaggaactcgtgcaatgatgatctatagtttgctcccatatctcgttagtctagtataacgccacgccgagcgaactccgtgattttgccacattatcgcgatatttcggagggtcgacagaagcttcattgttctctgaacctagtatactcagtactcttagactgagaattgaaggatcaatatgatattgtgatattgcttcagctcgaactgaattcgcattgataatcatgagtaatcgaactggccttcccaatgacctggtcatcggttttgtcattgtcggcttcaaggaagcatacacttggaactttaaatttgctatatttttcgtattcagcccacagttccactcttgtagcacccaccgttcccttccaaatccttcagtttgtatctactactcngtactcgatcgagacaacagctcgtctcatctcatcttatttcgtcatgccagcagaaacatcacgcttctgcgtatttggctatttggacgacgacagttgacgcgtcctcctacgatgaaggcctaacgtactgagatttttcgcccgttacggctagccatgacctgatccatagacatatcgacgtggacaagtggaagaagcgcggcgagtcgccttaaagcttccaagctctatcctactaatcattccaggattcaatatctctcagaggatatctgaaaagactgcgtctccattcctcgaatccctggataagcaagataacattttgtcgcctgaggctacatatttaacggaatggactttcttgggtacctttgtctttgcaacatactgattcagagcagagcgttattatcctcttcgtactatctggcgccccgcattcattcgtaacagactaactcgagttcagttcattgtttgtcttggcttgtgataagttcttagaccgttgacgccagcggcatccccgcgggaaagcactccaacttgcgttttccgccaggagcttcgctcgccgcgatgtcattagtgcttatcggagggcggcgcaatctggtctggtccgttccggacctaatcgcatacttgcttccccggacctcccaaatcatgcctatcgatgcgagtgcgggcagaccagtgaatcaaccgcggcagatcgtccctcccgggcactaccgggcatagtcggaaactggagggtaaacaagccggagatgacgcttctgtatggctagaatatggcagacttgcggtacgatagaaaa

SEQ ID NO: 1245 - DNA, 682 bp, Emericella nidulans
acatatatacctccagacggcatgctgaagggctgattgatgattatttatctcccatccaacaacaagatagagaccttatcacctgatataccacacttatgcattaagcaatagcggtatatatatgaatcctggaaggttcaaaacaaggtagacactggcaacttaccccaggggctaggatacagctgaactagttggatttgtagaacctagtgttagttctgcatataccagcagtcaaactaaacgatataggctggggatattaggacgcagagtagggattatggtcgcgtgttatcgtatgtactactagggtagccaccttgactgtgctagagcaaccgccatactaaatgcagtggcaaaggctatagagccacttgtaaggcggcaaaaaattatggcaaaaagtatacggccctagccgcggatcgaacgcgggacctctcgcaattatgatgctagggttagccctaagcgagaatcataccactagaccaccagggcaattgttgagtacctacacttgctgacaaatatgtatggcctagtaaaatcaaagtaacttttcccataccaacctgactgtcgaggcaagcaggttgttcgagacgataagaggcgtatttctgatgaggtatatgtcaccttcgcatgaatataaggtagtaag

SEQ ID NO: 1246 - DNA, 3585 bp, Emericella nidulans
tgatgattgacaagactgagatttgaaatcaagaagctctgaaagcgatgaatgtcgcagtttgtcaagacgcgttgacgtatgtggatgcattcatagatggatcgatggtctaaccactggcgacctttttatacagggcatttcagtataaccttggcagccgaagggcttgttggaattggcccaatctaccacgaaggcttagtttacgaggatcatggactcatggctcgacgttgggccagtcaagcagtcgttatagactacaatgcgactctgcgacatgaaagccacaggaacgggatattggggccagattccccttcaggaggaaccaggcgtctgactacacacacttataccactcgacagtgtccccgccatttttcccgttctgagttcttttacctggttctggacgtgcgtcaatcgtgatgagacctagtgcagcgtggtagcgaggcgatgatcgctccttctgctcgataatatagactagtttaccgcttcgtgcttgttcaactcttatacgaagcgcagtctcgttctaaaacttcccaaacaagaacgagtcccgtcagtctgagctgatagatgcggcaggccgagtcgttcactggatccacccctgcgccatccttcagctcctctctggtctattctgcattcagtcaggagctagctttggcaagcatggctacactgaacttccatatgttggttggctgggtcggtcttcggccccaaaattaccagaattaccgtattcatgctggtaaccatggccactagatcttgtgggctgctttgtgattgctaaaattaaacgacaaaaatggcagtctgctacgacactagtggcaatgaagacgcactcagtttccttgctcggcagacggagcaccggcgcaatgctgtgaggtgcgccagtactgtgctctaatggcctttgtatgaacaacagtacagccgaaggcttgacgccatgcagtatcaagagtgtagagggcaggactggacccagggggcgtcgatacctgcactatgcatagttggtgagtgctagggctacaggcggcggaggcggcatctcagcctgcagctctggcaaattctgctgctacggctttgggggaggtgactgcaataacagcaccctagcgtttcctttagacgtcgtgagcatcgttgccacaatcacaggctcttcaaacatcaccgcagtgaccaccacatctaccagaacaacgggtcagatacaaccgcatcgcccaccgacgactcttcgatccccccaaacacaagctatctccgtgtcggcttaggggttggactcggcatgggatccttccatttagccgctatcctcattctgctcttcctccgccggaggcgcgccaacaaggatctggtcaaggtatcagacaagtgcgggtactatcagtgtccttttgacaagagcaggttgaggaatctgattttcaggttcagcagcagctacatccatggggcggacgccttatgagcataatctcgaacctgtatcgccggcacagtagccgccgtaacggaacatgaagccttcgagatggcgcatgtgccggtgcagttgcagccccaagagcgcaatcacatggctttgtggcctccgatgtggtgatatgagttgggcggttctaatatttcccaaaactggcttgtttccagtatagacagttgatgactactggaagagtcgccacggtatggcacagacgcaggcatgtttcctatattccttaagcattatacctgagcaatgcgatccaggatagactcagtgatacattacccctctgccgttactgtttattttaccaacttgagtaacctcgacaaattcgttgacttactctgctcgtgtactgtctgtacaacggtctgttcaacgtcagtacccaccattaatcggcaaggcagatcggaagtttgtttgagtatcgagtataaggtaacccttgcataacattcaggcaagcagcagggggaacttcgccggtcccgaccctggcaagctgcacagacagcacagacggcgtacaagaccgagcctctaatcctctcaaggcccgtcaaactcccattagggtcggaatgcagtccaaagatgttatgttcgtggctatggaggccaagtggaaggcaacaagtcactgagtgatttgaattattagttgatctggatgggttaggcagagagtgtcttagtagtactggtattcgaaaaagtagtgtaagagtatggcacatctgagaaggaaatgttcatactagtgagtgagctcgagtggtggataagagaacttaactcctctgtatcactcatggggcaactgcaagtgtgccttcaatcacaaaacagaccgtagttacttaaccaattgctatggggatgaataggccctactgagttgagtcgtatgtcctctttttaccctttcctctaccattcaagattattctgaccgtcgaatctactaccactaaggcaatccaattctttgcaaactagtggaggtaagcttgttggctagacctatcccacaggaaagacaagatgggtgctactaacgtttctcagcctgctcatatcttgcattgactcgcggttctcgctttgcaggatatatttcttcgccgagggatctttccagctttgcgtggtcctttagatgggtgaggatgcgggtttgtgtacctgtacactgttagacattttgtcttcgaatagtaaatagattagaagaggaataatatatctctcacttgcggactcgagataaaggtctaatagtttgtgacccggagtggaggctggagttgaatccctgttctcgtgacttagccctaactcaatctaccaccagacagctctagaaaacatacctgctactaatggatgaatgattctgatatgctctctccagtcccgatatcatgtttttgatcttgctctcgagatccccccgaagagaactcaattcctgcgcgtttgaccctccctggctgtggttgtatagatcatatcggaccgaagtcgtccgctcagattgggggagaatgctcaacgaaattaagcattctaagccggggatattgaaaagaaacatgcttgggaagaggtaggtcgatgagggcgttggttcttcctgcaaatgaaaggaccgttggatggcatagattaatgaacggtagagcgagggatatgccgatatatgctctatccccagggcgtttgtgaggtgctttgtgggtactgttcatgaacattatcaatgcccgcagacctagaagttgatagacagcaaggtgtaggcactcacaggccattttccagttaaacccaccctccattacccctccgccaatccagctggatttgccaatcttaatgccgatatcctccaccattcttacattcattcctatcccctcctccactttcccatcatcttcgtctgtttcttccatactgaagttaacccagacaactccattgattacttgggtcctgacggcaaaagctccatatggaccgcggaa

SEQ ID NO: 1247 - DNA, 4204 bp, Emericella nidulans
atcatctggccgatggacactgatagagtggttaataattcgatatgaggcggggaatggcagttgggccggcgatttcgccgtattattagggctcttggttataaatacccggattatcatgtgcattatggagcgtattaggctattttattctattcaagttctcaaactgcatcaggggtcgaacccccaatggataaatagtttctgaatctatgtgacatccaataagcggtcagaagcttctgggtcgtgcagccgggcgatccaggggaaccagtcccggcgatgatgtagtcgtgggtactccgtcgaccaaatatcaccatgcacaaacacatcaaccgctatccaccacaggccccaatcatcgtgacaaattgttttattgaacaaatctggtcctgtcgacctttggatccagtctactactatagttggctggtggtggagccattcatttcggatcaacgttgaggcgggccgtgtcgctgccaaaggaactctcacaggcttcaagcagttcggcagacgctgcaaaacgaaacaccatattgttgccggctggcttggctcattttttttcgctgcactccttccccttcaataagcctctttatggctcgcgtttgctgctgttaaccttgctgcagtctggtggctgctaattttcccgccttcgacaaacttcctcttctgagggagctcgtcagcctctcgctttcgctatcgcatcatccttttatgtccaaattctacgcctaattcgctttgtcgttcgttattattgactgtcgttgagcgttgcgatcttcgattaaattctgccaatagacatactgaggacgagctatatacctttgtttactcatatctacttcggtcccgatcacattcattcccccttttggcccctccttgtttcacgtcgaacctgaacaacgcaacatcacgagcttgctagagcaattttttctgtacggtcgatatacacgatgacgacgcccggtatggtagagttagagcagcgaaatcgcttgccaacactcttcgaagtccttagccgtcgcactctcgcccccgtcgatctcttctccttctatatttacatgcgcgatcagcaacgatccgtcgattatctggacttctggtatgctatacataattattttcgctatgactaaagtcattgcctgtacgcatactaatggcactctgaactaggcttgatgtatcccaacacatgtcgctatgccgtcactatgtccgagaattacgacgctccgttctggttgcaacacccgatcttgaaaaggccgagagcaagggatcttcaacacctttagagaacttcgagagtgtaaacgatatcccactcgtggaagctggcccgtcagggctgcgacatggactccgtgacctggataataaggaggctgatcagagactgtcagctttcctccgctctgatggccactcgtccaagcactctccgcagaacagtttgggttcacagaatgatccggcccggacaatgtcgaatgagcagccacggccgagcctaactcaacatgagtcgagttctccaggtcatacggtggcacgcggggatatccgcgccagcgcagagaaaatactctacacatatttgcttcctggagcagaaagagagatcgtcttgcctgaagaaatggtatccagtatcatcaatctagtggaggacgacggcagagatgacccggaagtattcgatccggcgaaggactacgtttttcaagcaatggaacgcgatgccttcccagggtttttgcaggcgaaagctctgggcaaccttgtccccttatcgataatggcacgtctagccttcgccctcatcagcttcggcggagggttctggggtgctttctatgtggtcctccgggataaaccaagaaacattcgttgctgggtacgtaagatcctattgcattgtttgccgacatactaaccttgtctaggtaatcctacccttcgtcatcgcctgctacttcattgtctcctaccagtacaagatcgatcccgtcatggcgttcgcagggtatagcgagtatacttttatgaactggtcaccagttcgtgagccgtacgttcgaaagcttcttgtgaaacgagctgtcgccacggtcttaattgcaagttttgtcgccgcagcgctgagcattttgttcatattggttcccggcaccatgctttagccttgccttgaatcagcatacaatccacttttcacccaaccttatactcgggagcgccgataatgtcgctagaactgccgccggcatgcctcaaatccaacgaccttgaacccagcgaagacatccatctcttgcttttgttcagcctaagcagtctcctttgtcttggtttgatccctcttgattattttcgctttctataataccccttcgctactaaacttgtacgttagatgaattttgctgaagccttggtgttgtggatatattgtttcatacttggtaccacttggcttagtatttgagagtaaacgtaattacagatttatttgcagtgttatactcctagtgcataaaacatctgcagtccggtttgaaaatctatattacgaggagaacgcgacgctcagtgcaatgaaatgtcgttcctgaaccgtacaatgagatgctatgacttcttcccaagaaaacgcttcgaatgcctagctccagaagccctagccccagcaccctcatcgatatccatcccagaaccatgctgatcaaaatcgctcgatcctccatcgaagtacccatcatcatcaaactcccgcttgttactcccacccccgaagaaccctctctcgaacattgccgtactcagatctctgggtttccatcccgcattcttcccgagaccgccctgaccctgaccctgaccctgaccagggtttccgccttgtagttgctccccaccctcggcattccacttctcgagtgtcttctcgatggccacagcacgcgcatgttccttttgacggcgctgtgcaaaatcagctctgattttagctatttctgtttcaatatcggagattacggagccacagcgggcttcccaggctgtgagggtggagatcatcgttggaagagagctaggtttaacgtcgcgcagtggcgcgacggacgttacgttaactgtgggtgggtttgtagctggcgaaaggcgacccgttataagtgaagagtagatcgctgttgtaacaagtgattcaagttcagatggtgcggagagggagagtgaggtcataagagcttcgtaggtgaggggttttatcgtagaggcaagagataggagggtgagtaggcgaagcttgcgggcttgctcttcgctcaatggtggaaggttaggcgtttgctggtagtcttgccatgtgccccaggcgaagatctcaaggagggttaggtagctctgaaattcggcgggggtgtctggagaccggagtgcttggactgcgggccgttcgagcagctcagcgaagacgtacgtatgtgggctggacgtagcgttcgtaatgatgctggcaatgtaccgaggggatgtggcgctactggagtctgtgagtgcgataaaggattgtagggcgtccagggccctatggtggacttggtccatcagtgctgagtgctggagcttgagctgagttgcaggttgaatgtgcaagttaggtgctgccgatgatagcgtataagttcagctgaatgtatagttcgaggtacgtctgaaacggggcgagcattggtgattaggctcgtggctggtgttgttggataactggtgattagtgtacagtactccgcagatggagcgagaaatgaggtccaggggtttgcagttaatgcaaacatatcctccacttcacatcaagtggaccccagcacaaacacctcaaacacacaataacatgtccattttctacgtggagcattctggcagtactaatatcggttgattctctaagaaggcgaagacagtgtggcccatgccgggatttttgagaaatgcattattccagatcgctctcttggctgaagacccgttccgacacgtgactgcatcccactcagattgagctttatatctcacgccatcttggttcgcaatgagctttgcctgaagttggatctgacgcttcgcatgcgaacccctt

SEQ ID NO: 1248 - DNA, 5763 bp, Emericella nidulans
tattagtttagagagattaaagtgaaaaatgaagatcatgcttaacagtgatgaaatatttttagaggggaggtatcgtacaattgatgacaagaaaaacttatgacattctagccttggaaaagattgagatacctggatgggctgggtgggcaagggttcataacgaatggggttctcttcggaagtaacttttaggttgactaggtgtcggttggcccattaggaaacatacctttcgtggcgaggccctcaaaattccacttactaaatctctgggacaagaagtatgtaacaatgggactcatgggcagttactgttaatataaatgatttttgttttctccaagcaactaccatactcggctccaagataaggcgtcaaatgatgttaaagttcaattactataagtagtcgtaatgggtaaaaatttcgccacagtacttcaccgccgggttctcctggtcttgggcaacgtacggattgactaccaggataaagatggtgatcaactgcagatgatctgttacatgttagtatactgtgtttggatatcgcaggggtacttaccagcaacagcacgctggccctgctcatccttagcgttatttgccaggttcatgatacgtgccatgattggatcgcagaacatcttcatggtctcgtatatcttttccagtggctgcacggcaacgacagccgctactccttctgtcacttcctcctggctgctcggcttcaatttgtcgatgacagattcatagaaggagtgaagctgagcaatgtgtcctccaaggagtttctggcaatccgtccctaggaacttgaaagctaaggcagaagcctgaaccacttctatggaactgtgctggaagccggatataacatagttgagctgtgcttcgagcgtctctgggtgttgtgctgtccattctgtgtagcgagcaagcgccataatggcctggaaacgaactttttcttggttcggaatttggacgattagaggaatgacttgtggcaacaccgcgctttcttccggatcaaccatgcggcccatagctcgaagactgaagagcggtgcctcgagctcttgccagtttggaacatgctcgtctgtagactgagaagcatattgggaaatccattgctgaataacctggtacgccttggacaaacattcggcaactcctatgacgacacagcagtccttgaggacatcacccatcgagtgtcgaaactgtctgaacttttcttcctgctccctgtcacctccgaagaggtcagattccccgtcttcggggcgcgggtactcgagatgtttaatcatgatatccaccagtctggagaatacatcgctatagacggcccgcgattcggcatatcgctccagcgtaacgtactgtttcagctcataccagaagacgaaagttatcgagacgacgtcgcgctcccaatcccgcgcacaacattccaacactgcttccactagctctcggaattgcgcaggcatacgcgcgataagcaccacccatgcttcaccggcttcggcaaatagtctcgtaataccccggaacgcttctgtatcctccgcttcggcgaattcggcgatctttgggcgtagtgacattactcgcgggaacaaggcctggatgagaggtaacgaatcatcgacttcacgagtgtccctgtatagagtacacatgctgtcaacagcagcgtcaaaagatgcgtcgtcatccagagctttcacaatgacgtccataagaggtgattccacgatcttcgaggcgggtatttcgcgcatccaagacgttatacaatcaagaaggcgggggttcgtagatgcggcagctgtacaagctgttagtgtgatattatgcgtttaaaaccaggaagaatactaacgggatgattgagcatattggatcaaaatgtgcatgacttgctcagcattgtcttccagcaattctttggtcctcaatgtgagttcatcttcctaaggcgaatgtattagattctgaactttggccgagtcgtcgccgttcgatggtgaagtcatggaatgctgagtttgccgaacatacagatagattgattttgcgcccctccgtcacttcttccgggaggatcctgagaaactccagcacgcagtcgcccgcactgcttccgagtgaagagccgacggtaaccaagacgtccttccattcgaccatctggatcgcaagactggctagacaaacgcaaagttgtgtttgtataggccgagggccagaaccaaaagccacaaggagattgagtaccgaatccctcagagcgaccactgactccgctggtaattgatcgagatcgaacataatctggcacagtcagtatgccggtacgatttcgcgggtccagcgcctgcttcaccttgcccttcaacgttgtcgctgcgaacaatttggcctccacgggaacatctgcggattgtaacatctcatgggtgatagtccatgcttcgacctaagtaatgagaccgatctatcagtatagactctttaaacgacacgcggtaatctgccgtggagaccggtgaggggctaggggcgacgtacggatttctgaaatttctcaagaaactcatgggcgtgagctttctctgaacgcggaacattcccttgcatagtagcgaccgctgctaggacggggccaaaggcctgtccggcagtttctcctttgctggccatcgtcgacggtatgaagctgttttggtgtggacgtactccgtgggagtgggaaagaggggttaactaggccgggcggctcaacaccagtgattttcagtcatgaatcattaaaagaataaataggtaataaaccagttattcggactgtgcacggtcacaggcgtgcgtagacagggcgtcaagtgatggtcaataggagtgaaagtgggatggtggtgactgacgatccgctcccaaggaaaagttggtgagccgcaacaatcaatggcgccgaactgcctggagcacccgcgggcaaagcaagcttcagaccatcttttcccctgcccatctccctccacacacgcgtccaacaacgttactactcgatactttcctattcatcgagcttgcttcgctattttattgttgttaattcgcgttatcaatcgccatcatgaccggtagaggaggcggtgccgctcgcaagacactgcttgcgccgattcacttcatcttcaaactccttcagcaacgttcaacagtctctatctggttatatgagcagcttgcattccgaattgaagggaagattagagtaagattacttcgttgcgcaggatactgcaatgactgacggtaaggctaggggtttgacgagttcatgaacctggtcatcgacgacgccgtggaggttaggctggccacaaaaagcgaggaagaaaagaggcggccattgggtatgggaatatctattgccactacttttctggctcagtactgatcgtgccttaaatacaggtcaaatactgctcaagggcgacaatgtttctctcatccaagctgtccagtgatcgcgaaccgcaccacttctcctatctaattcgtcataaaaattctacaaagctcttcgccttctcagctttacggagatcttgataacagctatcgacgctgtgccactgggaaggttatggatggaatagacaaatctgcggacggaaactgttttgggttttctattactgttggcgcacgagacaccggtcatcaccgactatcacgacatctacgagccagtcgtgatttgtaacgggcacctgttcaggcgggcaaagcgtttgctccttgagagagagggcgactgtgatctagtcaggaatttcattactctcttaaaaccgatataagctagcgtctcaccaagtaaaggcatgtttcgcttctcaacgcccatctcagtttcccatctcaagtacctcgttaagaaactgtcataatatccctttccatgaccaagtcttctgaaatcgggatcgaaggccattcccggcatcacaatcagatctaatccaaatggccccgccgtattacccttaggtagtggttcggatatcccagttccaccaaagcaattctgcttgttgactgcctgtactttcgtgagtgagggaattccccatttatcgcgctccaaggacatgaactcctccattgagtctaacgcgagcatatccataaccgagattttctgctgtgtcgttgtggtctctatgctgtggatataaggcacaaatacttccttgtggttcttcaaggcatcttccactattgctgttgtcgatagttcccctgacggcatcgacaggtatacgcctattctccgggctttttggtattccggaagagtgaaaagcctgttagctacagttttggctgcagaaggttagtagacgttgcggtgatcgggaatgatgagccagacattgagtgacgatagagtcagcgggaattctctgcaggacatcccgcattcttttgcgaagttccttcttggctgtctgtattccagcggccatcgcctcctttaggtgccgtaaaaagaaaacaaatttaggatatgagaattgccggtaaaatgtggcttaaagtcgaatgggcttttcagtagaataggtgtgttccgagttgaagctgtgcgagttcaagcacaatagcggaggagccttggcagcatgttttggttgcatgactagatcgacaggccagtcagggtcccttggaagggtcaagcactatgaaatgcgcccttgatcgcgatgagggtttctctctctcagctttcttgatcttctcccttctgctaacatctttaaaagctccacgcgcaatgcttgtgatatacttcataggtagccttctggccagccttgttagtgcccgcaacgctgccgatcttatcgggacctggaccaccaaatctcgccaagtctttacagggccagtatgtttatcagtgacctgccgtgtgttcgtggagctgacggtcctgcaggggttctacgatgtagtcaaggatgaattgattgagccaaggcttacgggcatctccttctctttcacagaagacggacatttcgaagaagcattctaccgagccgtttccaatcgttagtatattctaccgatccagttggtcaagctctaacgccgtgtttgatgcacagctcaggacccgtcatgtcccaagggcattctgcagtggcagcacggtacatacaccgtcgacagtgatggttctatacacttgaatcccatcgcggaggatggccgccagctcctgtcagacccgtgctcatcttcgaaaggaatatacactaggtataaccagacggagaaatacagcgtacgttgaccccatattggcttaagggttatgctgacaccaccagtctttcactgtggatgtcgacccgtactatgacagtatacgcctcaacctatattcattcgatggatctcccatgattccgatgtaccttgcctataggccaccagagatgctgcctaccggacctctccaatcgatagtatccaagaaggccaagcgccatttcgacagtaagaaggtcacgccttttggcttgaggacactcatcagcaaagataaccttgtggacccgaaccgctggctgtgggtgggcattgtgatgagcgcgatgggcggcattacactcttcttcacctagtcctggagtgattggtacaagggctggg

SEQ ID NO: 1249 - DNA, 1650 bp, Emericella nidulans
atggtacgtcgcgcttcttttattctatttacctcagaatttatattcagttattttttattctaaccctgctagatattaacccgcctcccctccctcgaacacaactaccagaacaatctccccgcacgcacgccctttctcactgaagccatggcccagaccgggcagagcacaatgtccccgtttgccgaatgcattatcatggccacccttcacggccgatgtatgacgcaccgccgcttctacgcaaacagcaactcgactgcgtccggctccgagttcgagtctggcgccgcgacgcgagacttctgtatccgccagaattggctgtcgaatgcagtggaccggcgagtccagatgctacagcaggtctcctcgcccgctgttgacagcgacccgatgctgctcttcacgcagacgctcggctaccgcgcgaccatgcacctgagcgataccgtccagcaagtctcctggcgggctctcgccagctcgcccgttgaccagcagctactgagcccgggcgcgacgatgtcgctgtcggccgccgcgtaccaccagatggccagccacgcagccggcgagatcgtccgcctggcgaaggccgtcccctcgctgagtccgttcaaggcgcacccgttcctacccgatacgttggcgtgcgccgccacgttcctctcgacgggcagtcccgatcccacgggcggcgagggggtgcagcatctgctacgagtgttaagcgagctgcgcgatacacacagcctggcgcgggattatttgcaggggttgtcggtgcagacgcaggacgaagatcatagacaggatacgaggtggtattgtacatagagactgattagctggccgatagcaatgccgccaataaaactgatagagatgcggcacgatccgacagttagtcttggggcgtgctcagtagactttccttgggggtaacagtatgatcctgcaggatcaagtgcagaagactggacgaggtcaaggagccaaggagtacacagagtacgatcggacttcggtcttgaactccgctggagtatcggccccggacggtcggccttaaataactaatctccggtctgtgtcatctctccttccactctgggaacttgcaacacctccaggtgcacctcacctttcgccgtccccccaagtcgccatcaaccacgcagtcaaacggattctcgagctcaattccatctgcaaccttcattctccaccagcgctgctgccccatcattgatcagctcgtcatcaactagtcatagctaatcatcagttagtcatcagctagctcatatcgatcatcatccatcatccattagtcacgtgtttccatcagctggggcctagatatcgccattgagtgccagccagctagaagtttcacttcagctgcttatcgcgatggaccggacacctactcaccagtccagtacctacggccaagcctgcacccagtgctacaaggccaagtgccgctgcgtgcgcacgcccagtggcgacagctgcgagaggtccccctccctgccacagatataaatgcatgaagagcaatagctgaataacaaatagatgcctccgtctcaagaagagatgcgagccttcagagtctgttcgacggcgcaatgc

SEQ ID NO: 1250 - DNA, 1585 bp, Emericella nidulans
tatgtaactgattcttagctttcagcgtgcgatatgttattatgagagcacaaactccctttctcgaggctgaatatatccataaatactacctagctttatgctgcgtacctgaagcgccgcaaggcaatctagcagggctgtttcagtggcttaaacgcaatctcccggctctgccactgcttcaacttggtggcctcaagcaaattttctgtcccacgaataatccagtcaggtgctgctgcacctcactgaacagcatatgtagtgcgggcacagaccgccttctttgggtataagaggggatgtcttgtccgtggatgaggaaaaatagtctctgccatggtgcaggacgccgggtttgaaagacgcctgtgagaaaggagaagccaagcttggacatatccagtcggtccacatcagtatcgtcagtctttccatgccagggctttccagggcttttgattaaagctcctatatttctctgatccctcaagtgttggtatatgcctcatagctatatctttagccaccatccccccaaaaagggaaaagcaaaaacgacaaaaagtttgcagacatatcgtagaagaaaataatgtcactgagggtactaaacagcttttatgaagctttcgtataaaagtccaaagggatcttaagagaaaaaaaaatatataaaatcaatgccccttgaaagctcagtaattcagacatttctctatgcgaaacatgctttctcaacatgttcccagtactatcaaaagtctatcagattatacaactaactaacctacaatataaaaatagttgattgatcaagatatgcgttgcctcaaatagttttaatcacttaagtgctatcagttaggtgagaaagcagcaaggaaaccaaagaggtgaataagaattaaatcttctactagcacatatacatagtatatggacaaagtcattgactgggttatacatctactcagccaaagtcaagctcaatgcccaatgcgtctcaccctcgatatcaacaccatcctcccacgagacggaatccgacacgctcatacagcctctttgcctttttattctcgcgcgccaccagaggtataaccgtcgcattgactttgttcgcctttctctcctcggcaaccactcttatagcattctctagcagccgctggcgattccctgctccgcgttcttagggaaggacatacatgccaacgagggcataaacgacattcgagccagcgggaatagaggcagcatcccttgctgcttgtcaaagcaatatttttgaataaagccacggtacacgggctgcttcttgttgtgattgggaaaagaccggtccatataggaggtggcggccaggtgcttataacatgtctctatcataggctaggacgtatctgacgagctttgaaaggacagagactgtgtttgattagagtaatgcccgctggcacaacgcttagggctgaataaattttgtctgttagaataggaggaagtttgctttttttatggtatcggtaattctatacgcccctctccttcattttcgtttacttaagatcttcctgta

SEQ ID NO: 1251 - DNA, 1063 bp, Emericella nidulans
gcatcgaataatacactactatagggagacccaagcttaggatcttgatgcaggcgtatttttagagttcgaatggccgatcagcagagtggtgctcacgtgcggcagctgtaggtaaatcaagacaagattcagggaagcaaaggcatgtcgaggatgtgaaaacgagacaatgagttcggtgagttaggatgaaataattttatggaggggaatgaagttgtgactcttcagcgcgagtggcagtagaaagacgtggcggtctaaaaggcaacgaacgggtggaagaagaaactgcggaagctgcgggcaggaagcggcaggcgcagaaatatgggcaattcttattgcctggcaaagaaactgcccgtgctcagtcctcaggaagcaatcagattcagtctatagggcagcagtgggcagtgggcagcagacaccgggaaaacgtggagcgcgttggtcgttggcagacagcgacagctggcgggcagtgacagcgcagactgtattctcttaatgcttgctcttgctggggtttgattcctgaacgatcaagggtagaatccttcctggctttgcgatgtgatacacaaatgaataatattcttgtcagagagaaatctcagcgagggcgataataatagaatattgatggaatggatcagggcagcgcagacagagcccaccgtccagtcgcggtcgtcccagggttccgttggaagaagttctttttgttgccacgactggtcggctcttcaggtcggttacgcagggtcacaggaagcttaagctgattgtatacgacagctacggtactttgtccctggcgtcaaatgaacctactcctcctctaccttacttgaagctccagaaaaccccgacaatgacgctgaacatctcgagaactaacacttctagaaacttgaccgatcagcgcccaggctaaatccactcccccagcaagagaatctgacactaaaatcgtctagactccgaccgactcgactggtccaactcgtcgggtttcttctcggcgccgtgcgacccatcaagacgagaagaa

SEQ ID NO: 1252 - DNA, 4711 bp, Emericella nidulans
aataagtgacattaagccacactcaatctagtctcatattcacagatattacatagctattaaggatgtttagcacaaacaaccccaccgaaccgtcctccaacccgcccaaaacccaagtgaacccctacgcctacgagcctccagcccccagtctcaattcgagtactaaagcagacagaagtgcgactgaatccaaaagcgaacaaagccgacgaattcatagtgcaaaacccggcgacgcgtcggattcttttgactcgacaaactcaaactcctacccgaactcagcgtacgattcgcaagacgctagtgttggcgttgggatagggaccaccacggaacttgagaaaatttctgacaatgggctgtgaggtcgcccataatagagaggattgagcttagaaaggagggagaggaagaaggagattgtagcgcaaactgtgaggttaggtgctgcattcatggatgattactgttcatcagcgaatattctaatgaaagtatcatggtgtgtttgtagttcatttggctaaagaatcacggcatattatatttgccatgccccttttcctcatctaacgagcgtgctatatcacccaggcccattacctcaagtactaggagattatgggtagttaagtagctaccaattgtacaggaactagcgctatacactgataaataatatgtaccaatcaggctggcacataaagggtatcatatccttttatcttcccatagttctatgggtgatgttatacgaaagactcatttacgatgtgcaccagtcagaacctggtttcgtactgtgacacaccgtaaactccttcgcccagttctaaaagcaaacgaacgggatcatgtaattatgcaagatatgcttttaagtccatgtgtggacatggggtcagcaaggacacattacctgtcagaattagggtggtataatgctcaaggtttcattgtgaagaatatgataactagacttaccgttaactattctttacagcaaggacagccagcatcagcagtttatatctgacacataaataagcctcagtgctcacaatgattgacggcagtcaacctccaggtgttttgctattaggccatctagaatcgatcagaataactacatccgttgtactcacactctcagcaggctgatggcaatttatcggcacgttcaccggcaagtcatattcgtaggacaagattttgaaggctagatataagagaaggcaagaacacgacgtaaacgcttgacatagcgaccacgttcactgtgctaccgctctgaaaagagctacggtcttcattttgcgcgaacttcttgcgcgcagacacgtctgctattcggcaatgccaatgctgacgacgaagtgaaggcattttcccgtgcgtttgcattgcctctcgcggcgcgaatggctgctctgtgggctctacctctttggcaacgggggctggcagtcacggtcatcagagcatatgaccaaggcgtgtcagtaaatacaattaccccaactcactgggaaatgaatacctcggacaattgccaacgaactcgccaggggggatcctcaacctgctgcaggaagtcagccatagcagctcttccgcgtacgccaatgccgcctcgcctcaagtcgtgtcatgcacagctcgcatggcagccctgtgtactctggatgaccacagacacgaagtgacagatatctccctgccggatcccggcatccatatcagagcaaaagtcccaaatcagcgcacaaggtcataggatcctgctgcgtttgaccacctggcttccgagcgcacaatatcgtcatgctgaaatccaaaaccaaaggaaggcttgccgtcgcaggcactgcggcctagtctgccggtgtgccgtccaaacagtggtagacagagtagacgagctctgctgatcctgagactaaggggctagggtcaaatccgagggggaagcactgactctctggtccggaatgcgacactggctacgaggtgaggtccctacgtggagtgcttggagcttcaaacgcgcagtcagagtacatgtggctgcctgttgaatttactggtcttgcatgctgagcttcttcatcaattcaggtccgtacctaaatactctaccgcaaccgtctgctacatctcttaggcgtggatttgagcaacagcggcctcgatagtatgtacattgtctcgtttcacgtcctggatattccataattagacctggatctccaagcaactgtagctctcatacgttcaggcccagagtgttagcaccgcaactggtgcacactctggagccagaacccacttcttagccggcactgtccccggctggtccagtatggcatccacatcgcgatctttgccataaaaaatcgccttgggccgcacccagtggagtgccaacacgcccgccaactacattagactctttgagttctcttgcatagacacgaagcaataactgagatatggcctgcagggcgcggatcttgctgggctactcgtgctagggttgcccccttgtggccccttgcggcaagaaaaacatggtcgccccagaatttttcgcatgtactctgtgcctaagtcactcgttgacacacctagtccttcttcaattactatcttgacgaggtgtctccgtggtctctggttcgatcgccgtcataatttgaccacagcaatagacatgcgctatccccttcggatggagactcattggccgtattgctcggccaaagcgagagataccaggttgcactggcccgaaatagcccagactgactggcccccaaagcattggaatgtcgatcgtaactgtcgttgggggctcagagcgcagtttcggtaagggagttgtgccatggggcccagagtattttcgagacgacacgatggctgggtacctcggtaccctgtgcagaagcgatattggcccattctcatactcaatcttagataaacgaatctgcaggcgatcgatgtccctcgctacaacggtgggtcctgtacgaaccacggggtcgctccctaaccctgatcgtcaagcccaagccgcagcctctcgtatcccaatacggatccggccccatctctcgcgggtatttgctatttagagctctgatctacatcttggagagtacggtaatgtggggatattgctatctttgaacctcgtgcctgagtatgggtccccacgacgcagcgacctcgcttgtatggtctcctggaatacgaatagtgtcgccgatcgtcatcgtgtttgcctcaacgcccatgagctgtgcccgtggcgagcgaaagcacaagcatggaatggcttcaacactcgtgcatttctcacgatgcgacttgagagtgtcaccctggtgctgggactccacgcctcgaaaggcataaataccccttcgatgcccgctgttctgtctcaatcccatcaacagctcaatcaatcaagtcaaaagtcttctaatccatcaaacctcaaagaaccgtcttccagaccaacttctcaatcaaaatgcaattctccgccatcgtcctcagtgccgtcgctctcttcggctctatgacctttgccgctcccgctcctgctcctgacgcagagctcatggctcgctcttcgtgccagcttggtggtatctttggtgccggtgatgctgcctgcagcgcttctgtatgttcatatacctatctaccaatggcatcttcgaacaaaccgtttgctaaccgatacacagtgcatcagggctggaacctaccacggcggttactgcaacgacaagcagtaagatatcccccttatcctcactgtctgatgtatactgactgagacttttagggtctgcatctgcacccactagattgatgcatgcctgagtgcgaaaaatatggccatggatagggctcgcaactgaatatggtggaatcatggtggctaagggtcagaagtggtgtttttagtttctacctctatcattcgtttgcaataaacttcactttgtttcgctatcacgtccatcacgcggcaaataatgttcacaggtaatctccgtagttcgatgttccgattatggtcctctagatcgacccgcctttttggctggcaacggatgtaccagtaaccttgaaggctggctatcaggaattcaggttatagctggttaactgcctaggtctaagaaaagccttaaagcttatttatgatccttcatcaacagctattcgagccgcaggacctatgcaatggggttggggaatcatcctcaaaacaggggtgtgcggtggtgaatgcaggaatcatatctagttaagctggccatataattgcaggtgcgatagacatgaagcgcagaggattgggtggtagtcgggttttgctgtcaaatatatattcatagcgtagatcgggatgtcattcccggcaggcaagtatatatatgaatcttacaaaactctcatttcttttgcaaggctcttttccactgtagttctggacagtctccctagaaacgtcagtccctctttctgtctactctgctgtagcttcgcgctttcgctgagggtcgcccatttaggactcagccggagtgcatgtgggatctgagccgtactagtttcagttgagcagtgaaataccctgtaaaaaatatcctacgcaatagcccatggggaaaag

SEQ ID NO: 1253 - DNA, 602 bp, Emericella nidulans
atcctaccatcagatgtgccggtggaacagtggcatgttctacaagcacccagcgcttaaagattatcgctactactggcgcgtggagcccaaagtccagttcttttgtgatgtcgattatgatgtcttccgcttcatggaggaccgcaacaagacttacggtttcacgattaatttgttcgatgctcccgagagtatcccatccctgtggccgacgacacaggagttcctcgccgcgaatccatcttacctctccgataacaacatgatggactggttgactgacgaccagctccgaccggaccacacccgcgatgcgaacggatactcgacctgccatttctggtccaactttgagattggtgatatggagttcttccgcggtgacaaatactctgcgtactttgatttccttgatcacgctggtggtttcttctacgagagatggggtgatgctcctgttcattcgatcggtttgggattgttcgaggacaagaacaaggttcattggtgtgttatctccccgaagcaaacattaactattgctaatcctggttgtaatataggttccgcgacatcggataccgccatattccttactt

SEQ ID NO: 1254 - DNA, 5786 bp, Emericella nidulans
cttcggtcccttgtccatactcatgtcattcaggagagctccctacaatccagagtgcggccaaccgtgcgacaaaccctgaggtgtaatgcatatggaggcagtatctatactggatcttgcttgcgagacccaggcgccaaagcctcagttgccgattagcaatcatgagtgccccccggttcttcatctagcatatggctcggtgacatataacaggcaaggtataaggccttgaaactctggaagagccttcttgttccttgagacctgcgataaggctctgacatctgtgattgcttcagcccctaaactcaactcattggcgccctcgtattcgactagattgtaaaaacattgttggtgggttggaggctcggtacactccttggcagggccttggctgagcatctgatcggggttgtcaaaggctggagaggctctgcttagcatatataaaaggcctccaggctacagatgcagtgcgagtttgctcgattgcatagaagccaacaaggcaaacggatttgccatgttcttcctcccacttttcctctctttcgccgcgcgaaccctcgctcaatgcgagacagaatgcaacccgctcacctccctcctctccgactgcttcctaccccaactaccaacaaccgagagcggcaccgacgtgcccccaagcaaatatcgcaacatcactggtctagagttctacacaaagccctacgtcctcccgggcccccatacatcattcctcgaaaccgccacgcaggcccgatgcttctgcatcgagggcgtgcacatcctgcctgaatgcaacaactgtctctcggggtaccggttctcgaattctttgccgatgttgcaagatgataggcgcgcaatggatcggtacaaatcggattgtacggagtgggggtattttgcgaatgagacgctggcgtacccgagtaccacgcgcagcgcgatgccgtcgtcggcgacgggacctgctgatccgggtcccggggataaagtgtctagtagttgcgcctccgtttgcggcgttatccgcggacagattgacgactgtggtttgacgccgctcgatatcgatgaggatgatattccatgggcccgcgctgaccctgcatattcggggagtgtgctgctgaaccggacggcgggcgaatgcatgtgcagtttgccagtgctgcggcggctgagggggtgttggatatgtgttgatgctgaaaaagagctcggagtgcccgaccttgttcgctattatcgggaggagtgtaatgagcttgggtattggactgattcggcggttgttgagcctcacgggaggagcttgaagaaagcgaggagtccggcgagggagaggaggttataatgacggatggagctaagacggccatgtacatttctacgggcaaggtggcgcttattatgggtttactgcttgtgctatccggatcatgttaatgatgactgtgctagtgcagggtgaattgttgcaatgagcaaagtttgatcaaatgtatgaagtattattgattattgtgttctctaaagctatcggtagtgatatcatttatagttctgcgccagccgatctcctaggtcacgggcattgtccgggcatcgcgtcgtctttgggatagggcaacaaagtgcccccggaaagaaaaagccgacctcggcgctatataactaaaagggatgattcctattataatcagcaacaagatcttccgctcctttgagctgttctgtctagacttgttaaaccacgggttggggcgggttttcaggcctagctgatccgcccacgcgggttttggggtgggttacctgaacagtaaaccgcccatgggtttagcaactaatttaagccaacctaaataacccaaaacaacccagttatgtatatcattatttcaataagcagtgctctacatagcttataaaatactgtatttaaatactgtattataaactatctaagtaggaaaatataatctaaatacagtaatatatctattcagatatcttggcaacccatgggttcgatctcatactatgactccagcagccagaacttgcgcccagtgcgacattcctcgcaaccgcccctgtcagctttccaataaacgggcttcttagcttcgctcatttttgcgtggcctgccacgtgttgggactgcatccaggtcaatttcgagatgctcttacagggacgacgggacactctcagggaataatcgttgcactgccgtatcaggctcaggcagttgggaggtcttcctgcgcgcggttgatgttgcgatgaagctgcttttctggctaggttgggaaagtcattaaggcaaaccgcaccagaaaagcaactgcctgagcggtgcgacatcgatgctcagtgtgtgtgggatgaagaaggaggttgtggaacgggtcctgcgtgaatgtaactttcatttgagtgaagatgagaaggaatgattctggaacagcatggtactacgatcaacacgaatcagaacagaatcccctaccctgatagactcccagttcttgactgccagttcctaccaatatctgccgcctttcattcgcctcatgtatatgaggcttatcgtcgtatttgcgagcgccctgactctgctggcttattcaagaggctcgacttcaccatccctatatatcatacctacactggggaagacatccatctttatctgcgcgatgactgcgtaccgatcctggctcgggcaatattgtgcgaacctgtcgactgggccaagacatgatgcgcacatccaccacgcatatactagactttgggcgggtaaacaagtctgttggcgcatgatcatctcactgggtcaggtcgccgaatatcctcgcttcagagtcgatggccccatcgcacagcgtgggaggcaaacatgaactcttttctccccagccaccgatcatgaatgagaactgggctaaatgctacggaccaaggttcatcaccgatgaatccggccggactcggttaataacacgcatgtgtccgactctaggggctccaccggtcatggatgcagaaatgacaccgaccacgagcgcaccgaattttgtcgcttgtatcatgaatgctgggtatcacgttgagctcgcaaccgcagggtctccagcaggccatgaagagcttgttgcatcgatgccaaaagctcgaggcatcacttgcaacgtgatctatgccaacccgagagctatttcgtggcaaatccctctccttcgccggcttcaagcagaggggtatcccattggaggactctgcattggtgccggtgtcttaagcccgaggtcgccaaagagtatattgagacgctcgggctgaagcacattgctttcaaaccttcgtccgtggactcaatccttcatcaagttcttgacattgcgaaaatgaaccattcaactccggttttgctccatggacgggcggaagggccggtggccatcattcttacgacgacctacatgagcctctcgtcaagacttatgggtctatccgaaagtataccaacgtcgcactgatcatcggcagtggcttcggcgatggtcaaggtatgatgatatatctgactggcgaatgtgctgagacctggggctaccctcgaatgcctgtggatgaagtcttgcttggtagtcgcatgatggttgctaaagaggcccacacgtccaacgctgtcaaggctttgattgctcaaatgcaaggggtgactgacgtagaatggcacaaaacatattcaggaccggctggtggtatgatcaccgtaaggtcagaaatgggtgaaccgatccacaagattgcgaaccgagccgtgatgctctgggattattttggatagatctttgttcaatgtcaaggacggggagcaatatatgcaaatattgaagaaatgccgcaccaagatcatctctcgactgaatagcgattacgctaagccgtggttcgcagtcaacagtctaggaagtctgtccagctgaaggatatgacatacgcggagtgcctgcaacgggttattgccttgatgtatatgcacccgcaaaagcgatgggttcatggatcctatcgagcgttctctgtggacttgatggatcgaatccgggagcggttcaacgtggtagacgagcactgtatggacggctccttgaacccgtctgactttccagagaagctcttcaccgtctgtcctgccatgataactgacattctctacccggaagatgtcgccttcttcatgagcctgttcaagcgacggggccagaagcctgtcaacttcatacctgtacttgatgcaaacttcgagacctggttcaagaaagactctctgtggcaaatgaagaaattggaatctgtcattgaccaggacccagagcgagtccgtattattcatggtccagtggtggctcgactttcgaccgctgtcgacgagtctgcagccgatattctgaacaggattcatgatgaaattgtggacgcaatgagacccatagtctcgattagttgcaatttcgagcttgatggagagagttctcatctagacattccgggcagtggcctctcgactcggttggactttgctgacatatcgagtcatgcaacagagctgggaatccaagtagactatcatttcacgaaaccactgcccaatggcgggagccgtttgcttctggatgtacttggtattggtagatcattggctgagcgcctgcttcaatgaggagactgtatttgtcgatcgccagcgacgaccaaatcgagtgcttgctgcattcctccttcgtgctggggacagggtgactgttcagtgcccgtctgccaggagcggctgtctttctctctctcttttctccaatattccaggtcagacagacgctcactctaccctttcacttgcgtctaccgatggcagcctgatccgcttcgatcttcgaggacctaaacaccttacatcagccctcagcttcgaccttgagctatagtgcgcaggagccagcggacactgcacgatactacccaggatagcgaggcaaagttgagacgattctatgcgtcttgttggtccgtcgatgctgaagagccgactaaagattcgattggtgtaaagctcaccacgggtcccgttgtactctcttcccaagttgtacttaattttgtctctctgatatcgagggccaaaggtcattaggttcgtccacatgttctcaacatggcctcccttgatgttggtatcattgttgcctgggaggcgctattaaggtcacttctaagcccgggactagggggggacctttctcgcttgttgcacatctcgaacacctttgaacccgtcccaggtatggaaccgcttcgcgttggcgatctactgaagacaacattacgcattaccgcggtaacaataaagccactgggaaaactggtcgaggttaccgtggtgattaaacgggaagaggcatccatcatgaaaatcacgtctgaattcctcatacaaggtcaatttccccatcatcatcagagcttcccatcctcagaggccaatgagtgggctctacctttggactccccgaaagcagtggttttactacgaagcagaccgtggttcaagccagatgcaaagtgtccagagcttcttgacaagactctcctattcaggatcacgtctcaatcgagcaagatgtcactttgaatactagtggtgcggtgtcccttgtcgtcaatgggagagagcagactcttgcattggaaa

SEQ ID NO: 1255 - DNA, 2945 bp, Emericella nidulans
ccgaaaaataatacatattttctaagaaatgtgaacgcggtcaattccagggatgtaccttaggaggggccagaaagacaaaacatcaggggttgagttccagaaccacaagaatcttggcatatcagttccataaaacagtcttgaaggaattggtttcctaatcagcataccatattttaacctgccattacaaacgacttcaatatcagcgcatggtgaaacgcttcacgcattttttttttttcttttttttggtacccaatataaaatcttacactgtccaggggcaaacaaatctggggctcagacaccgataaggataccctcacaacagacttcgagctcattcgcaacaacttcaccgacgtcccactaatcctaggtgaatacgacgcatcatcagttaacactgagccggccgcgcgctggaaatacttcgaccatatccagcgcgtcgcatcccaattcggcattgcaactgttatgtgggacaatggtgcagatcatctagatcgtacaactgggcaatggcgtgatccgacaactctggacatcgtcattggtacaacggctgagacagctaacagtctccctgatagtactgaggacgcttctgcaacagagcagttttcatctgcatatatatatcaccaggttgggacgaacgttacgtctcaaagtctcccgtacctctttaatggtaattctctcgtatcaattacggagtccgatggtacggtgctggtcagcggctccgactacttggtttctggtgataacatcgtcttctcggctacatacctgggaacgaagtacactgcttctagcacctctggcattatcgatactttgactttggagttcaatggtggtgccacatcccccactattcaaatcgtgcagtgggatacaccagtcctttcttcaacctctgcatcagcttctgcagtctcaggggctgacctttccatcccaattacttggaacggcgttccgaaacttgcgtctgtgaaggctgttacgagctcaggtatctatttgttcgacgattggacccagtggcttggtccgcttcaacaggctcgtgctgtaagtctactcacgttttccctcttggacccaatctatacaatatcgccatcttactgacctgttctccgtatcaacagacttacagcaaccactggaactgggacgacaacaatgctatcatcacggctgccgcaattgatgcagttgtggcagccggggaaacctcggtctttacgttcgagttttaccctcgtgtggatggggaggagaatacagttgacttcacgttgactgtttaatttctggttcaatcggtcgaagtgattttttattactgtattgtgctgcgctgtgtcccataacatgcaaaatgtctgttagggttccaataaatatttggtcttactgtacctactttttgtcctgctgaaaatccactgagtttataagatggagtcacatttcacagagaacgaaacctgtaggtatcgttcagaatgactacgatattgacccttagtaagcttcgtcaaatgatacctaaccacagctgccccgacgatgcaggcactctaatttaacatataacgccataagccataatatacgcgcggaatatacgcgcggaatatacgccaaataactctagtataacgtctttaactcccaaagaggcaaattcggatcgaacttatcccaaacaattttcccccgctcatccaaatgtgccccattatctgtgattgggatactggggtcagattcttcaatctcaactttcgataccccccatttatccctcgggatccatatggtaggcgtcttcgctgtaatacacggctcaaaatatgcattccttctctcctcatccgagtacctgatttctacatgatcacgacgaacttttcgcctcagcgcggcgaaatcccgatacaggttcggatggaaccatttcagtgtcctggtccatctgctacgcggcattgtctggagaagcgcgagttcttcctctttggcttgttgcagttcttcctcaacgtcaagggtgcgtggaaggaaggagtatagggggcccaaagcttcattcagcgaaagatgcgcgcagatgaaaagtattgtgaaaaagaccatgatgagcagcgggccaatggcggacttgatggcgaataggccaatcaggcagatgttggcgaggtagacgcctgtaaggagatgttggagggcgcgggggtaaacgagaccttttgtatcgatgcggatgtcgtagacgaaaaggaaattgtagcggtaggcttggtagacgaggtagacgcccacgaaacagaagccgaggatcaagggcgcgatgcaggagtatgttaatgcttattaaggtgagttggagttaacttcgttgttgttgatgatgatggcggagtggaggacataccgattacacccatgtttgtgaagacaggaaagacgttgccccagcttatcccgctgagggcggcccaccgctcgtacaggcggcggggggagccatcgaagaaagtggttatgaatttgaagacgagcacgctcatgatctgtactacggccatggagctgatggtcagtccctggaggagaaagtaggaaatgtagaaattcgtcgcctttggcaagttctcagctaggagatccttcgctgagagagggtcttggatgatttgcgccgttgctgcggatgctgcagatgtcaaagtcgttacgaggaatacctgaacgacctgaaagcagaagtgtgcactctgggtgaaaagctcaactcgagacgcagaagggacgccggcacgccgggcgcgtatctagaaacctgttaaattgcgcaagaataagatataaagtggacgtacaacggcatattataggaacaagggacatcagca

SEQ ID NO: 1256 - DNA, 1248 bp, Emericella nidulans
tcaacatgagcattcgcggccgtataatacgactcactatagggatcgccgccttggtcatgattcagcctgaaggcaaatgatccgatctccgatgtctcctagaagttatcatgacggtttgatgacattgctcttgacctttggagatcaccaagcctgagtctcactttgttaggataccggcagtgagcagccctaaaacctcattctgagctgctaccttggataatccggctattcaggctaaattcctgcctgctctcgcctccccgcattgtacgccctgatcggcatctccaaatgccggtatccttggatcaccggcgggcgagatggcgatcgtcactgcgtgagctggagctccctttatccatcggcaatagtccgggacattatgacaataagcaaggtataagaaacgctcgacgctcgcggcagtcacagtagcggaccagagcaaccttcaagcgcacaggtagagctcaccatgaggtctctcatctctgtggccgttctgtcggctctgccgacagccttctctcaagcgaacaccagctacacagactacaatgtcgaagccaaccccgacctcttcccgctatgccttcagcatctcaacgcgtccttcccggactgcgccagcggcccgctcagtttgacccccgtctgcgaccgctcgttgagccctaaggaccgcgcgacagcgctcgtctcgctcttcaccttcgatgaactcgtcaacaacaccggtaatacaggtcttggcgtttcacggcttggactgcccaactaccaggtctggggtgaggcgctccatggcgttggaagggctaactttgtcgaatccggcaatttcagctgggcgacgtcattccccatgccaatcacgatgatggcggccctgaataagaccctgatccatcagatcgggaccattgtctccacgcagctgcgcgcattcagtaacgccggactcggcggagtagacgtctactcccccaacatcaacactttccgacacccggtctggggccgcgggcaggagacgcctggtgaagacgcatttcttacttcggtctatgggtacgagtacattaccgcgttgcagggcggcgttgacccggagacgctcaagatcatcgcaacagcgaaacactacgcgggctacgatattgagagctggaataaccactcgcgtcttggaaacgacatgcagatcacccagcaggagctgtcggagtacta

SEQ ID NO: 1257 - DNA, 2669 bp, Emericella nidulans
ccaaagtcgacgctaataaccgcctcgacagccaacagaaccccctgtcaacttagaaatatgactgtctaagactaatctggtagtcatgacgccttggcttagcggtatattttcccgacgcccctactagtggaagacctactagtggaagattgcttaacccacgccgagtccataacacacgacttcgactcgaacctcttctttccgcagccatcgaggttctgcgcaacggtaaccatcctaaagggtcccttttctcctgcgctgcggtgcggcgagcctcgccaacacatggtcaagttacaggcagcactatccacctacactgaacccccaaatccacacaggcggtgccctctcacgaacatcgacgataccctctctgaagatgaatatgggccagcacaactaaagaaaggcgggtcccgttggggatttgccctgtaccgatgcacgtagacgacgagtacaattctaactggaagcgcatgctcgaccccattaacgccaaggtcttgcaatgtctagaggctgaagagcgacgtcacatcaggtctgagagcacttcgtcctctgggcccaaaacgaactcgcccgcatgccgctggcctgagtgcctcgccctcaaaactgttcttgctcttgcttcggcaccggccatatgctacgacagttacggccatataactatgcaaaagttccgactatctaattcgatcaaaacgtttgccaatcttttgattcacctatgccttatcctgcccgtgggaatctactctacatcgagaagaataggatgcagtagcagacccaaacttgaggctttattgcaggcaaaaaacttgtctatattgcgattggcctgaagaaaggttagcgcagctttgatgccaataagattattattgatcttcatccgccaacagcaccaggaacaactacacacgaccttacgcccgatatcccctgcatggacgagtcaatgaggcaacctgagagagtcattaatcattaattattatggttattgatacgaatatatcatgttgagcctcgtgtcacgtgccacgtgatctgtatggcatgatctctggcccctggcctgatccctcgaggagttgtacattgaagaagtgacaactatcgtcatcaagatagagaatcaatcgtcatatggcatcctatccttagtaggctacgttcgtgtagttgatgcagcttccttctacccttttccctttgagcattcataacaatatttgatactgtggatgtttggggtggttatataatcaatatccgtagtgaacgatttcattgaaggtcttgatctcctaactacgatctgtataggcaatttataccttttccaaggcttcaaaaaaaaaaggttcttgcttatgcaggagatatccttgccatataaacagtataaggtgttaaacagatatccctgccatataaacagtgtaaagcattaaacagacaggcaaacaaacaaggtgctgaatattgattagtaaggaggaacctcctccagttgacataccccctcagtgtatcaagagtccttcagtttccttcttgggattggatgaggtctttcacgtctactaggttgagcatcctaacaaattcttggtgtttttggattataaggctcttagtaaggccatcagcaatcatcaggttggtaggtatctatttaatatggagttggccttccagaacctcatgacaaagccaggatctatatatattgacataacagagcttagattgttgcttgatatttttggaggtaagcaagttaatggtctgttggttgttacagtatactgctatctgatgttgcagatcaaaacccatggttctgaatacccttttctaccagtgtattgcctttgctgcattagataaagctagatattcagctttagttgttgaagttgtaactgtgtgttgttttctagatttctatttaatcaggctattatatagcttacaaaggtatcctgcagagctttgctggtcaggtcagtcagcaaatactatatcagaggctaacatgacaacttccttgccagtattattgcctgagtatttaattgccagaaaatatgttgtatataggtatataataaccctgtttgcagcctgaatatagtctagtaaaagatttgttaaggcttcagataatcagctaacagtatatataatatctgcttatattagaactgcagggtactatatagagccaatttttgtttaatattctttgatctgagcttctgttgcttggtgtttgtttagagagaggttatataagcttgccaatagtgtttctggccattttataaggctgtttaggtgaaaatatgctgcaagatacttaatatagaagtcctggcagagccagagcttcttgttgggcctatctctgagcactcttacccctaagaaccatcctacttttcctatatactgaagcttgtattgctttgccagttcatctttgaagcacttagctgcctctctggctgctggtattgttaggttgataataataatattatcaatatataccagaacaatcatatacttatttaaaaagaggcattcttcttccagaactggtaaaagccaaactttataagtattat

SEQ ID NO: 1258 - DNA, 4341 bp, Emericella nidulans
caactttttttcaattataccgggccctgtctgtaacacattcacgaacaaattgcttggcactcggttgggcaaggaaactaaggtcttaaccttcataaggtccccttggataactttaagctgtgctcttcggcgtgctttaggcccgactgtaaacgacgagtgatatattagtgtatccatcgccgcggtctgccatcattaaccctaacccagattccatttgttgttaacggaagaccgcacctgcagcaagcgctggcttgaaattctccctccaattcgccagccgccggacagtctccgccagttgttgagtttgagactgcgactgcttaatcctataagggaaagtggacggttttcctaggtgaggtcgacaagccactcctgtatgacctggacgccacgggcctgaagaatatccagaccatgattaaacacagtcgtagtttgctttgggtgactcgcggcggcgcagtgaagtgcgaacgccctgaactatcgctggccactgggtttcttcgaagcataaggcacgagtacgcaggccgcagattcgtcacctttgatctggaccctcacgagtcactgtggtctgataccagtacggccgacattgcaaaggtcatgactacaagcttcggttctgcagctgacaatgcgcagactccgccaccatatgactttgagtatgctgtgcgcgagggcgtcattctggtgccgcggttgttccgcgacagtgcccgtaaccaggccatcaatcctgcatctgtgtgctgggcttcacctgaggctctgccgacggagtcgttctttcagtccaaccgcacccttgcattgaaggtcggggttccaggcctcctagatacaattgcatttgatgatgaccctgcagcacttgctgattgcacgcaactcccacctgaccttgtcgaaatcaagcctcgggcgtacggcgtcaacttccgggatgtgcttgttgctatggggcaacttgaggagcgcgtcatgggggtggactgtgcaggcgtcatcactcgcgtgggatgccaggcagcagcccacgggtatgcacccggcgacaacgtctttgcacttgtccgcagtggctatagcagccgtccgcgggttgaatggaccaatgctatgcatattccacaagggttgagcttcgagcaggcagcttctgtgcccgcaatctttactactgtatacctttgcttctacaaaatcgctcgcctccaacgcggtcaaacggttctaattcacgctggtgctggtggcgttgggcagacagccatccagtttgctcggcacataggagcagaggtctatactactgttggatcggccgagaagcgggagttactgatacagcgttatggtattcccgctgaccatatcttctccagccgtgacgcctcatttgcagacggcattcttgaagccaccaacgggcgtggcgtcgacgttgtgctaaactcactcgctggtccactgcttcaggccagtctgaacattctggctcccttcggtcactttgtcgaagttggtaagcgtgatatcgagcagaacagccaccttgagatgcgcccattctctcgccatatcacattttcctcgtttgatctgctggcgctttcccagcatgacaagcgatctatccactcatcccttattgagatccgacgactcttggaagagggcgctatctctcctgtttatcctgtttccacctatcccttgggcgatataggaaaggtgttccggctgctccaggtcggcaagcacagcggcaaagttgtcctttccatcagccctgacgaacaggtccgcgtcgttccgcaggcacgaactgctaaactccgctccgacgcatcctatctacttgtcggcggagctggcggcatagggcgttccatggcccactggcttgctgctcatggtgccaaaaatatcattgttctttctcggagcgctggtaccagccctgcagttgcagaactcgtggctgaactacagccgctaggttgtcacgtcaaacccatatcttgcgacgcctctgttaaggcagacctagcagcggccctcagtagctctccgccgaactccctccgattcgaggcgtgatacaagcggcaatggtcttgcaagactctgttcttgagagaatgacattcgaagactggcagacctcattgaatcccaaggtcagagcgagctggaatgtgcacactcaacttcgcgacgcggatcttgactttttcgtcttcctctcttctatgtctggtatttatggttatacaacgcaatcaaactactcggccggtaatacttacgaagtttctctcgcccattggcgtgtctcccagggtctccctgccgtgtccatggatctgggtcccgtgaaatcggtcggatacgtcgctggtgtcgctggcgttgctgaccgaatgacaaaactgggtcattttcctgtcaccgaggagcaggttctgcgcgtcctggagactgctgttctctcgccattcgataagcaagtcgccatgggcattaatcaaggcccgggctcccattggcacccggtcggcccatccccgctgggcagagatgccagattccggtctctccagtaccagaagagcactcagcgtcaagctacaaacggatacagcaatgccagcacctcgcttgctagtcggttatccgatgcaaagacacggcagcaggcagagaaactagttgttgaggctattgccagtaagctagcagatatcttcatgatccctgtggcgcatgtagacgctgcaaaacatctttccgagtatggtttggattcactgagtgcggtggaactgcgcaatatgttagccctacaggctgcggcagacgtgtccatctttagtattatgcaaagcgagtctctcgctgctcttgcctctgaggttacgcgcaagagtacgcatgtacctgcatcactatcggtaatgtgatgaacgattaatgattgatgagatcatgattaatgcgaccgtagacctaatcagctaccttcaattagacggttttggaatagatctaactagagcgcactgaatatgacctgatatacattgccactaacgaacccatctatttcttcctgttaagcaacgccggaagatcatccacctgtgcttttccttcgatgatatctggacccagtcagcctccaccaaggttcaggtgagcagaagacggccaacttactgtacacagcacagaacaaggggaattcgtctgtcttgccgtgcttctccaggaacccggacacggtctgagcagtcgaaaccccctgcaacttttgtccattcatctctgtcttctcaatctcagcaacgctcacccctttctccacagcgtgcgttgcggaccttacgttccggccgccatagcagctagctaccaggtccgcaatgcccgcgctctcctctgtaaatgtcttctcattgaccgaggaaggaaaccacgtccgtccaaaccggatcatctctcctacaccctgccggataatcgccgccttcgtattttcaccccactgctttccggcgacaaatccagctgccagggcaacaatgttctttaacgctccacccaacgcaacccctgcaacatccttgataacatgtacgaggaagtacggccgctcgaacatcttctcgaggagttcatcattcacatgcggataatcctgcggcacacgctccaactttatatccgtcgagctcaggtccttctggcgctggccatctacatggggcaggttatcctcaggcgagccgtcactagaggtaagatccataggcggggggtcgtatccaattgtcgtctcgcatagtctttcggccgcaacctcaggcgcaatgttcgcacccgataatgcgccacagtatatgcctagtttctgcatgataagctcggagaagagcgtcaccttcccgtctgaaacatcaacgcccttgatacagctgactccacgggcataaggtaaatggtgtcccttgatttggtcgagtgtcttgccgataaactggtgcgggaggttgaagacgaggatactggcatccttgacggcttctttgatgtctggcgttgcgataaggttgtcaggcagtttgatgcctggcagatacttaacattctcgtgcgtttcgttgataatctgcgtcaatttttgtggcttgtcgccatatttgctgtggtggggagaatcggaagggactagtgatttcttcttcgaatacccacattcgcactggagtttcgaaggtgtcggtatgttaaaggtattctggc

SEQ ID NO: 1259 - DNA, 4517 bp, Emericella nidulans
ttatctttcgtgatgtctaattttcgcttcgcactcgcagccgccagcggtttcttcttcgtaagcgacaggcatagcttgaaggagaagcaatctcaccttgaaaagctcatctacacttgtcatggtcgtgccagctgttcgtaacgagctcacacaacaaccaaataccggccggtgtagtggatttgtcaaaccgtgtttcgagtgaatactagactaagaagtattatatatcactaataaatcgctgggagtacttgctcatcaatcatgcagcaaccgcaagctgtcggggataactacggttgccgcgaacagctcaaaacgcaagatcgtgccaagcttgaccgacagatttctcgaagagcttttgggtcaccacctccgttttgcaactgccattagcacctcagtcaagcacatattcgtgaatcacttcattcataccatcaaaatggctcctatgcactccgagaaaagcttttttagcgccgcctacgagcagattacgtctccggagcacaagacagtcgtgaggagcatcctcgtcttcggcgtacgtttttcaccgaactatctattgctgctttcagacaacttcgtaacgcttctaaaggctggtgtcgccttcctccacagcagcctttctgagctcctcctccctccgtaagtctccagtcgctggtttgttggccgtgccgttactgatggttgaagtgcctaaacgacccatcatcgcgtcgtatagaacctcgagtgctgcgacataaatcttgcatcatccgagggcagtagcggactattttgacgaccttgctttacgctcgaagcggaacaatgtataatatcgtgtttattcttgggcgtgcgctatgtctggcgtttgatagagttacttggaacaacaaatgaaacggctttaatgtcggaacggaacagttctacttcactctaacggttttcctgataagtgaaattcatctttcaaactgcgctctgtagtggtcagagcgtaaggctgaacagaatttggctggacctagatttatcctctacaaatacacaccgaggtctcttcaatattccagtcaatataataatcttttcctaggacgtatttggggtatgtggtactctattgcgcataaacgtcgacgcagtacaaaaatataagggcacccgagtactccgggagaattatacttagccactcgtttctcaggtaactgtgacgtcaaacattctcctatcaataacgagcgtcagcgttcacttgggggctgattttgtactctgttgtactccgtaatgttgctataggggcacgtgatttttaggctattcatgcgctcctgcctttatgcctgaggcagacttcggaagggatatcggcaaatcgaacttaacgggtctcacacttccacctgcccgggttgaacatggtcatccgcccgcgtccggctttggatttccttaccggtggtatccgccgcagccaattggcccagcatgattatcggaataagcggggaagcccgcaattacggaggagcccccgcctccacactgtccatagcatttctggcttctgctgcggtgaggtcgggtcaacaacgctcacctctcctcactacaaagtgcatttagtgactctactagtggcgacaccgccttctctctgaggtcggagtggacgctatctggctagcagaccgacagctgataagctccactggatcttcgattctgcgagtgcggcgcatgtacttggtcaacgagtatcctcataaacgacatgctgaacgccaagcggaagcaatcagaggccgggcttactgatgacggaccagctaggaggaggagtagcaacatcctgggctacaacgctcagacgccgtggcttcatgagagtcacgactccagattctccgctatacgaaggtcaataggaactcggggccacgcggcctctctaccactggctaatatggtatcgaccgttcaagacttgattgatcccgactttgatccactgattgccatcctcgacgaagaaccgcgtttcttgaaaccgttgccgtcgcggatatctgcggaggatctggaatttttgcgctttcggggagcgctggcgatccccgagagcgggctacggattgagctactacgttgctatattaaatgggttcatagcttcctaccagtgttgaacctgcaggagtttctacgatgcgttgcgttgaatgatccagaagggaacataagcctcttacttttccaggctgttatgtttgtggcaacagcttttgtggacttaaagcatttgcaggcagcagggtatacaactagaaaaagcgcacgcaatgcattctatacacgactaagggtacgttgtcttcggtactctactctgactacgctgacagattcagcttctttactcacttgactgcgaagaagatcgactagtcatcgtacagaccctacttctcatgacttactggtccgaccacatgaacaacccgcaaagagacatatgggattggattggtatctgcagcaccaatgcacactcgatagggttaaaccgagacccgtcatcctcagacttagacatacgcaccaagcggttgaggacgcggttgtggtggtgtctattttcgcgcgatcgactcatcgccatggggatgcgccgtccgacacaagtcaacgaaggatctagcaatcttcccatgctgaggctcgatgactttgactttgagccgttccatcccgcagtaattgagcagtttcagtgccggcagctcgaggacgtctctcaccagaaacgacttgctaccatgttcatcgagaaagccaaactctgccagtgtattggccgagtgttgtttgctcagtataccccatcgcaatgtcaattcggcttgacgaacagaacaaccatcaaccttgttccgagacatgcttctgaatccgagctggctcggtgcagccagagactagagtcatggctgtctgcactaccgcgagacgcgcagttcgtaccagcgtcgaagacgatttttaacgacggtgaggatgtattgctccttcacggcgcgatgatacggatgctctaccacgctacagtaagcgctctccaccgtccatgggcctacggatccacgaaagaccagacaaaatcccggcttgaattggcggctgcagcacgaacaaaaatgcaagacgccgcgatcggtatcacgcagattatccaaggcctcaaccagctagatctgacccgctacctccctcagtccggcgtaacagttatcctccctgccgccgtagctcacctagctaattcaatgtcaaacgaccctactctccgcgaaaacagcatctccaactttcagcggtgcatccgggtcctgcagggcttgaaggagatatatcccgccgccgacatggaggtagccaacattgaagccgccgtcaaagcgcagtccaacacaagcgccctgttacgaatcatgcagttcaacggatcactcccatctcggcctggatctccacacagaaccagtttggtttcaaatccagcccgtataccgtcgcctttggacgaaccaaaccactggacgccacctgccgacgaacaagacactgcacatcccatccttcatcaactgggtcacgcttcgccagataataaggataaacggtcctctccgttaaagccaaaccacgaacactcagcccaatctaacccaccgcgtcaagaccaaccaacacccccgaccgacatccctgatcccgtcaccatctccccaactacaccacagcagaaccagaaccagccaccagtcaacccgccaaaatcctccatatttaccgacctccttgacttcgacctcgatacctatacttcaacctttacacctagcaaccccaatcccgccgccggcccagatctagacctcgactggacgagcgagctcctccgctgggcagacgcaaatccagagtactattccgcccctaacacgaataatgaccagagagatatcttttcgttccccgttggaccggggccgggacataacccaactgatctcggccttgggaatgacggtgggagccgtggacatggcaatttgagtagcgagatcacgggggatttagatcgggatttggggtttacgggggatggggaagagttattttagattatgccatcaagatgtatgacgagctgatgacacctgtttctggacagatctaattataagcgtttgcgtgttgcattgatgggcgtgtcgtgcatatctttaccgagatactcagtctctgtttccgttggcggtctggaatatgcaacaagggcgctcaggcacattatatgtatatgttgaccgcgaaataaacattgcaggagtttcatggtatattgcgtacatatcaatgactctgctctatcctaattcgtaaaacctttcatcgtctctatattccgctctatttcaagaagagat

SEQ ID NO: 1260 - DNA, 3319 bp, Emericella nidulans
gaaccccgctagctaatcatgatggatccaccggctgtaccactccttacgatcgaaagatcaatcccctccaccacggcactttctacggtcaattcccagctgagcggcgcaatgcagcgaccttgcccataccggccaacctaaagccactatcaacctgccctaggataggcattagcttggtctccagatgatctagccgcgcacacttcaccaacttcaccgaggcgcgttcgaaagtgtacgtcgaacttgtccttgggaacactactggggaatagctgtggcactggctcatgcatacagtgacgggatttattgctcttatccactccaattgggagagtggaaccagccggccccctgtgctcagtcagggtgtagacgtacgactagattggtaccataataagatcagttcctgctccatcatgccacccggaaatgcgtaaaataagctcacttcgggtccttccggggacgagattcatccatcaggtccggaagaacactccgtgtctgaatgacggggtggatctcaccctacggtagtcggggaggtttcgtcgctctcatcgaatatagcagcttgcaatgctatggaccgcttatcgtcggcattgcggcacgttagacgtcgaatatgcaacaagaatgtcccaaagctgaatagacaaccgcccatactggagaaactctcatctgagctggtgtttgcataacggactatctggacgagcctgatactgtctgcctcgcgccctgcagccatcacctgctcaatgtcatcagcaagagcaacctgcccgcactatttctgtggattcgttccagattgaaagcgttcgtcctcacccgaatagctcgcgacatcccaggcatgttctgctgtcaccgatgtgcaaagctgcagcggctcgcagatgttacacacccagcatcatcccagatagacagacataatctgtgccccgatatatttaaaccgggcaaggataacgtactcggacctctgtggaattgccatttatcggccgcgatgaagaaacattattacagctctaaacatcaagaagggaatacggttgattcgctggcgtatacagaggtaagccgtaacccgctgctgaatccgactgttacaacgttgctatccgtcgagggaagggtctgcccttgacgagactggagacggaccctcaacatcgactctggtcctccaggtccagagttgggcgctattctatgatagcctcgacatggacactgtcatgtcaggggtcaggcatgtacccatttatccgcatgaacagatccgccatgttattgcagatacagcttcggcgcgggcttgcggtctttacttcaacaaatccgaactgatcaagcatatgtgctgctggacgtgcggagtggagttccggctcaatgtgtcattgcggagccgatagagacccaaagacagcagtcgttgtcacgaaatgggcagagttgggtgctggattagacatggatgatccgaagtggaaacgtctcaccactgaagagcatgtccatgggaggagcaccatcactaccgaacctggaacagttttacggcttttccgcgacgcttcacatgatcagggatgggagagtgatccaaccgagcgcaatgaatccctcttggtgatggagaagtaccgacgccacctgcacgaacggggcggtatattttattcgtctgtacctggtcactggagaaggtaggcaaaacagtagaatagacaaaaatgtgccttgagttcgtggatgacatgatacatctctcatctagtaagatggctgcagctgatcttgaaaaattcatgttgcaaccatttgcaggggcaccgtaggggcgctgtctataatcactattagtaatgaatagagactgcagacataatctagatcatataagtagtcagggctaagattatctgcgtgtaccaaaatgattgattttatctgaccttcaagtctgataatgggcagcattttaggattcttcaagcgcagcgaccaaagcggccgtgactaatcatttggtaattgatgtcagctcaactagttgagttagagcaaatactctgatgaacttcctgaggtagggccctggcgaaggtaggacgtctactgcttgacgaggtgtatccggaaccctatccggaacctttacgagatggacaacccgagtacgacgttgcggggttaatcctttctgactctgacaggctgatcatggagtgcttcctcggctacgccctcttttaatgaaaacaaagagccctaaaggactatacaggtaccaacactgccctgctccttctatccacagacccatactcccattatgtatctcgcgaccaatggcaaagacccgtacctctagaataccatgactggctctccccgatcatcgctgagccggagcctctagattggcaacaagcaagctttctaggcgttgtccacttaagggccccggcggacatctgatctcgtcacccagttctcgccttgacgttgcacgcagaaacgaaccgatactatccatccataatgcagaggctttagctcccggtgctacctctttttggacaggagacaaattgggatactggagccctgatatagaggagttatggttgatgaggctccgtgacgtatcgaccatgatccggatgttgacgtatcagatacttgcccatctctgggagctgggcaatgtaagtgtgttcttaatgcgagctaaagtgaggcgtgctgtggagctgttgacgtggtgggtgattagatgctgagggaagatatggacgggatttcctgtagtagtgaggcgaaaagacttataagcggagaacttactgcgaattttcgaataacgttaatgataaaataatgggtaggccggataacttacacagcccaataagtatacactgtacattgtagctcgtcggctagggcatcaaagaaaagctggtccaggggcacggaagcaaccggtggttctcatgattcgacccaacgtacccaatggttttagcatagagtgacaatcccatgagtttggtttcgagagctactgcgggaacagttatgatctctcgggttccactggctgatccatgtatttccagggaagttgcagggtgccagcgcttgagcacatagcggccaggcagcgtcatgttgatgcactttgacaaatgccccaccgttcctcctcctctagttcgtctcaagatcgaggtaagttcatgactgatgatgatgacacgatctgcatcga

SEQ ID NO: 1261 - DNA, 568 bp, Emericella nidulans
gcttagctgagccgagctgagctgcggcggctggcctagctgcttatgtatcctccccaggccgccttcacctccacattcccctcacattcaacttcacattcccttccattcatcgttagcatgtgggtattttatcaagaaaaatgattttcgaaccagatctccgtgttccagtccctaataccgatatcctgacctatatcttcgccaaccctccctatgaccctaacaagccggttcgtctgcccccgcaacttggcgatctcagccgttgtgtctagactcttggcatgggcaacactgcgagtatactgggcacgaggccttaaggcgctgactatatgtacaacaggtctatgtcgatgtgtccaaccctgcccgttcaatatcgctcgcgcaagcgcgcacaataatccgccagctcatcgcgggcctgcgggcctggggcgtgaaggagggggattgtgttgctatccattcattcaacgatgtgcgtctttttttttttttttttttttttttttttttttttttttccagttttgattttttccccttacgaaag

SEQ ID NO: 1262 - DNA, 1548 bp, Emericella nidulans
  unsure (1)..(1548): unsure at all n locations
gaggagagataacgaggatagaaaacagaggtaatataaaagaagaaagaaaatacaagtggaataacaattagagaaaaaatgtgcaatgctagaaagaagaagagaaggaagaaaaaaaaggaagcgaaagaaagaaaagtagaggggtaaagttagatgagaaataaaaggaaggagcaatagataagacagaataaggtgaaagcacaagaaatgaaaagaataggaaggtaggaatagaatgaagaagagtaaagagagatgataaaaaaaaaagaaaaataataaccaccctgactttatatagggagatcagcacaagattcgtgaagtatttcgaacacaatcgtccaggagacgagatctttgggagcagcgtgaaggcaccacagtggcctggaatcagcagtcgcagtcagcctgcgaactcatgagacattctctgagggtgggacaacatcagaaaggatgcatgtcagcccagccaagtcagtctgaaaggatgagtgggagctgcccactcgatcctcagagtaaaccgaggagaccgcctcgtggctcgcaagcagggacctcgggaggtcgacccacgaccagatagagacaggcagggatcagcgagcctctggcctctaccgtcagactttcggccaccccagactccaccagatggaactctacaatcatacctcgaggctcgtgctgggccgtaatctggccaagagtcttatctacattctggggtccaaactgtgttgcttgtcggacccgcgctcatactcacgtccacgttttgctcgatgtggaaagaccagaccgtttgtcagccagtcggcaccgaccagatagcttgtttcaaagcgtatgttgtacaacactcatcatcaggatgggttcgattcaggaccaggatgaatggtgccatctcgtgtctcgagtctcgagtctcgagtccatccgcgaatgctacttggcaatattcgctaccgatgaggagattcccgtgatacgatccttcgtcgccaacaaaataaacgaaataaacgaaataatggcagttcccattatcaaacggaaataccctgatcttggcaggattgggccgtggtccagacgtttgccgcgacacgctgcgacgtgattattactctattaccaaaacccaggacaaagagcatggtgttagctcatgggagttgataaccatatgaagcctccagtctccagctctctccagctctcacctgaacgatcctgcagtgtcgcatccaaatcttccgaggttgattggtccgccaagacgtgatgttacatggcagacagcgccaaggctagtggctttcgagggaaacggtcttatcgagggaatctccgcccaggattcaggattgcaaagaaaccgaagcctctcaagcaggtacctactaagcccgcccaagcccataacgaccttgcagaatcaacctagatgtcngttagtgcaccattggcatccgctggtggttcgatacaagccgtcctctgtctgggcattgataccgagcg

SEQ ID NO: 1263 - DNA, 2371 bp, Emericella nidulans
cctcgatggtctaacggacatgctccccgcttgtcacctaacaggagcaagcgcgggagacctgggttcgttttctcagtcggggagaaaattttttgaccttttttttgccgacgaatgcaagaaatttgactaccatcgcttcctcctcgtgcccacgctccaataacgctatccagtagcctccctagccaagggatgatcgcactacctaacttgtttactacccctagacttcaccaaagtacgtcgaaggcatgtataaccagtacggaacacgcaccagggctcttcattcttcctgacgatttttttgcggcgctcgtacccatgactatatcggtatagaggcatcgtacccggatcctgccgctcgggccctgactggctcgggacgcctaactagagaacaagttcgcacttgtctcactctcacacagccgacgggacccaaagcgcgaaccgtgaccgggaatagacatgaaacccggacaagctcagatcttgtatgggatatagtatgcatcgatttagaagcatggtttaaaatcaacacgcggtggtggttgcaccccactgacggcgaacacatgggtatgggtgcggacatcaattgccacggacgaccccgagattccgactgcgtcccgcgggagggagaagaaacgttccacataaccaacgaagaataggggcagggggccacgggtgcgattgcggggagacgagtaattggatggttgaaccatgaacactgcgataataatgcgagagtcaagcttctgccatcaggaacgcagattaggatcatcaattagatcttcagatcatcccatgggttcacggaaacctggacggaaagtgatagtgtgcaagtgggaagatcggtatttcctgactcagggacgggatacagagtacctatcatgcacagagtacaggatcattttcagaatccgcgaaagacacaatggtttgatgctgtgctcgcacctggtatttttgtcaagaccgtcaccccgctactcagctcattggccgaacacgaaatgaaaaagctcggctcgtcgcacttggaccactcttgtgacgcacgtgggtttcatctcgctggaatgacatggcagcgcagtttggcgacattggaacgctgggttcgtctcaacctcccgtgtaattgtcactgtagagggctagtgtttgccgagtcttgatccaccgttcgcgcgggtcccgttaggcggtgatgagcttggcggcaaaacgaggcaaaagaggggtaaaaagaaggtgataaaagggatgaggcgttggtataaagcgaagatccagacgagacgacaataaagatgaagatgtatcctgacttcaattctgatactatactcggtaggtgacgagagatagagtggtggcacttatcagccaactgggcggcgttgaaccatgacgagtgacgggcccatcgaccgtttcaccagcccccattgctgtatcctcactcgctgggggacgcttggtcgaccgcgattggatcgggtgcgagtttcaggcccaacagctctgtgggttccagggttgagggttggctgcccctggagatcagctcgtccaatttcttgggtgtggagtgccgtgactgggcactgcctctcttggggtcttccatagggctcttcaatctcattcaatctcgcgctccttggcccatttgaccttttgggagatgagactttgggtcccttggacgtggtctccttagacgtggtctccttagacgtggtctccttagacgtggtcccctgtagacgttcacagagcccctgattgtaactgcaggttccaacccgcgatgagctcagtggcgctctagtccatcttaaactgcggcggaaggaagagtaaaggcgatatttggatcatcatcgtcggtcggatctggcaacaaaagtcaatagcgctgccagcccgtcgactttagcggcggggagcagcattatggatcatctctgatatcttaccgagtagtctaccaccaccgtctaccgccagaagtcttgggaatggaatgagtgggtgattggccgaggcgaaactcctgtatgggaactgtttgaccattttctcgtctgggtcccctccaattccatttccatattatgattgtaattccttcatctgacggcgcttaatcttcttctacgctaccgtcgagtccttcgctcattattattacactccgcgtccttcccttctctcctccacttctttctctgctttatccagtctctcgttaattcccctgcttgaagggtgtggcctgcttcacatctcaggtctgtacattcgcagtgtcggctggagtccctgg

SEQ ID NO: 1264 - DNA, 3849 bp, Emericella nidulans
atcatccatgcatccggtcattatattttcatagtcatcacattaccactgcgctgctaaccgatattcatccactgcgtccattcgtcgctcgcaaacccgcccttcagatcagtgttaccgaaaatctcatccaatggaactccagggagatccaggccggcattaaaggcgttatcatctgccataccaaaggactgctcggcgccggtagacatctgctgtattgtggcatcaggcacaaaattttgctgctggtcaattccgtaaccctgccaaacgaagttttggttggggatggagacgagatctggactgttgacagcttcgcccggtgtggatccgtgtgaaacgggcgactgcaaatgcgagcctgacatccggcctgagagtgccgtgcccatactattcggggtcccattctggaacatattcaaaccaccaaagttgttgacacctgcttgatccacagtggttgggatcgcagacatgaacggtgccgtagtggcagatgcgtcgaattggaagtgattattttccaacgttgacattggctgtgcgggataggcgaatgggtcgtccgacgggaacatgatgggcatgaggtcgggaaatccggtagtgttcggcaacgactgtgtatattgtcccgcacgagcctcccgtatcggcaatgtttgagatattatcggtgtaccggaaggtggcgtagcctctggtggagttgagacagcacttgctggggcttcggaaggctgaacccatgatcggcggttagtccgtggtttcgcggatgagcgagctgcatgattatcatccacgctcttgggcgactgggtaccgtccggcttagatggccggctgagtagttggaccgggaaggtgtttgctctctgtatcgagcctggctgtggttcgggcgctggctgatttgagggagctggtcgcttcaagttaacctgagccttggagctctgtcggttcttgagcatctcggggagattcttgaagagacagttgaggctttgcgagcagcggtcggctgcaagactcttcttcgctagcccagctagtgtgtttttgccttccatagcgtctttaagaacgccatcttttgccgtcggcgagtcagggttctccaagacaaagaacagcaaggatagaatggcaaagtacgtggtgtacatggtaaaccagaaggatccattcaaaaggcccttcttatgcattccggtggtaatatggacgatattccgggaaacactgacacaagcggcggcacaggcgtacgaccgtctatcaacaccccgagcttgtgagccgctggaaacatagtggaggaatggtcgatacatgaccatctgcgcatgagcgtagctaatacgcaggagttgtcgtatcctatgaaagtcagtctaatccattaccgcgacagcgagaggccataccgctcaatttgtggagagacttctgtcccaggccgcagcgccgcaggaagctcttccatccagttctgaagatcccgctcgatctccctgattttcgaatggctgacaacatagcgttgatctgactcagaccggtgttgtgctgtcttgagagggtaaatatatttcacgattttgagaacgatcactgagagtcgggtgtcgcattggcgccgaccatggcatgtatcctcccttctggactcggcaggattccattttctgtgataaactccccgtcaatggacagcgggtactcctggtcaatgtcgtcatcgctcagcatctgaggcaggccaagcagcgtgctaacatatacatccatttttcgaaccacccaaaagatgcgacggcgtaactcccgttcgaccggattaaagtttgcagtcactgagcgatgcaggccgagccgcagcgaagagcgcaaagcaattccaacatacgaatagcaggtgctaagctttgccgaagactgcaagaatatgaccatgaaacagatggcttgcaaagacgttagatcacggcaatcggtaatttccagcaaatgccggccggctttaaagtattgaaacctacgcaagtcagcgacagcttgtttgacaacagatagaacatacccttggcctattgcactttcatatcccgacacatccaaggttccagccccgtcgtcggaaaacaaacaaccaacagacataacaatgtacagcagcggcaagaaggaattctcttcattggtgaattgctccgggggggtatcgtagactcgatccagtaaagcatagaacgatggctcgtgcacgaaacgaattaatgcacagccgtcctctaaagcattgtgacacagacgccgtgcgacgtcgcggggcggcagatcgtgggtcggcggcaaagacggctcttgcggcgattcggacgtcgatttggggctctccaggaattgctgcagcgcgggccgtgtacgcaaggggatctcgctagtgcccggctgatatactcctagctgttttcggagccggcgaagaaagatgatgccagacgtgtgcccgtggtaatcccaatggccctgatcgtccaggtcgagagacccggatttatcgaccattgactccaacaaagactcgtcagcgccagtttcatctgtaccaggagcgtccgcggacccaattgcatgggactgttgcgaagacggttgcgaagattgcgaagattgcgccggtggctgtgatggctgctgaagcttttctcgtttaaatgctaacagcatctgctctgttgcatgcacgtcgaattgcggatcgtccagattcaggtccgggagaacgacgcggagcagggcctcggctttgtgcaagcgactctcgagcgcttcgacatactgaggtgcggggttgcggcgacgattcgacggttgatcgtaagtgcattctataatctcgagtcagcgtgaccggtagccagccaaagagtgaaccttaccataactgtagacagtgcaatgggtgcaaggctgctttccatcgcacttgatttttttgcgccgacattcatcgcaggcacgggtcacccgccgcctcttctgcataggaagcggggccttgacctgcttggcgtcaggcgcagcatcctctgcggagaggtcctgggagacattgttggagggagtgcctgaaaattcgccctcgtcttggagataggaggccgagtctggtgaaggatcctcctcgcccgcgttatcggcgaggaaaggcgccgctggagtttccatgactcaatcgaaccgccgcatgcaaattgaccaactgagaaggccggtaaaggccaagattagggattattgaggtgaagcgagtgtacgaagtccaagtgaagtgataggggtggagtgtgaaagttgcgcagcgctatgcctatcgcacctccacgagtggaaacagctttaccgagtcatggaaggcacagtggcagcagacttggataaggctgaaagagaaaattcgccagcttttctcttctgttcttttctttttccttttctgagaaaacacaccgctacagacccagttgagagtgttgatatgaaaaatcgagatagaaaagtgctagaaaagtgcaagagaagagcagggatttggtctgacgcaggtgagtcaggagaatactagcgtagtagtgtagtagtgtacgtagcagtgggcttgagcctttaggattcttccttcaaggaaaaaaggcctcagacgatcggcgacagagcagctagatgcaactagagtcgggcgttttcacgttctcacgttctcaacctgaatggcactgaatagcagatgggattattggggaccatcttggagggcgagag

SEQ ID NO: 1265 - DNA, 4321 bp, Emericella nidulans
cagcgttaaccgtgatgctccgcaggattaagagtggcctgcagactatagcaccaccgaaaaccagtccaccaactacagcggctgccggccggcctactgaagttatgaatggtgagttatgttccgtacttaagtcactggctaattgtatagtgccgccaccatacggtacctggcctggactagaagcaggaaccttgggaaatccgttgttccccgccaacatagcgccagagcctgtcccctccgaagacccgcaatatgcatcgctaaacgttattgggggaatgctcgatacacctgctaacattgactgggtaatctgatgtaaccccatgatattgtcattatatactaattgcaacagcaactctgggaccaacacatccagaatcgactggaccatatgatcgatcgcgatgacttgtggtatgggcaatgaacgggacttgattggatcttactgtgaatacatggcactgtacatcaacttcagtttggtctctttgtcctttattccaccagagtgctcggcaataacttgccagtagggatctggactgtgctgaatagactgtgagcttatacacggggacggaatccttaaattgtgtgcctaggatgcttaagaagcattgagagccgtcttttctcggtgacacatgcttttacgggcttcaatggaaggctatgccagttcaacggaatgtcaaccttttgtgttgttttagccctgatcgatatgtagggacggtaagctgtgagccgccagatatattcccatagcagatgctcttttgatattcgacctccaagagtaattactacgtttatccgatggtttgggaataactttataacttaggaactgtccaactgcgcctaggaagtgtgttccgatttatgtcgaattaacaacgttagggcgttatgcagaatctatgtattagctgactaaacactctagaacacttccagaacatcatcgccgaggttccgagattactctgcgatcagaaagattaaatgataatggaacgataacaataatagtcacaactgaacctcgtcctagcaacatcctcaccatgaaccacctgcttgcaccacggtctattttctacctaaattcaaaagtgcctacgatacggccagaaatcttacgatgtcgcctcttttgctacacctccaggcttcaagggttaccgcaacaaccctcttatagacaaagttataaccctcaatttcagtctcgaattgaaaaacgaacttttttgtcgtcatttatcccttctccgccccaagcttctaacaatggggacggaaatggcaacaacaaagcccgcatcctgacagcctcccgcacacttccctacccgccatcccccttattcaacgtaatatcctccgttgaatcctacgccgagttcctccccttcctcaccgcgtccactgttacggcccgtgaccccgagacacggtatccgacgcaggcgtatctcacagtcggatatgggcctcttagcgagacgtttacgtcgaaggttgactgtaatcgggagagttgggttgttgaggcgcggacgggaaaggtttgttcaggagcagcgggactccagtaataagcagtcttctgggttaggcgcgttaccggagctcgctgggtttcctggtgcggatgaggggatcttcgagtatctgagcacgaggtgggagttggttccggagactgcttctgaggggggagacgcgaggaccacggttaatctggagatccggtttgagtttaagagtcagttgtatgcgagtatgatgagtgcagtggaagggcagatggcggggattatgatcgaggcattcgaaaagaggattagagaagtgcatgggaggtgaggtttgcttccattgcatgcatgtgagctactatagatgtataatattttagaatagatacgcataacgaagcgctgtgaatgactctaatgcagtcttcgacgtaatattgctgtacattagatgaacaatgctaaccaagtatatgatacagtttttaaaacaaacacgcatccgcgcagcacctagaggtggtgcaggttacggccgtcctttgcaactcggtggctactcttcgcgcggacggcgttgtagttgtcaacgaccacatcccagttgatccggtcccaccatcgctccaagtactccgccttgcctgcaataccataatccatcatccacacgtgctcccacgtgttaacgcagagaatgggctggacatccacggcaccgggagcgatgttcttctggttagtcgagtggcgcccatcgcgccggcgtactggttgccgagggcggtgtcgggcgtgtgcgtggccatgtcgacgggctggcggcgcgcgtgggcggccgggtagggggacccagcattgtaggtgcagaaaatgtgcatcataccctcgcgttccaggttcttagcgagccagacgaaacctgggccgaacatggcgtttgccgtcgcgaggaagtcgagcttgagggattcgacggacgagcaggatttgctgatctcgttcgcgaaggtttcgggaatctgggtgggagtaggagactgcagaagtcatgttagaaaagtgtcgctgacgctgccaagtgaagtcaatactgacaaggcagttgaagaagaagtggttgttgtgggccatcgaggcgtagttgaaaaccgaagccatttctggacgacgggagtacttgaccagcaaatctccaggcttcaaatccgcatcaacggtatcttcagaaatatagtcagtcctgtgccctttggcttctatgatttgtccaatggaagcccatttcaacaacagggtctgagccttaccctgtgtcaacaagttcagtttatcaaccatgagcccctgatattgtgtccaggaaaagtcgtatgcctctggagataggaattctggaatgccatgtttttggaagtatgcgttgtgcactaggttgggaacattgtgcactcctcgagtctggaagcgtgggagagcggcggagatgggcttctaacgcgcagcatgttagctacactgagtaggatgaggaggaccataaagggtgacgggctcacttgggagatgcatgaggcagccctcagcgaggcctgcggccggaggagtcgattgagcatggcgatagggtgtgtagacggagagccgcaagaagtccgttcgacagttcaaatcgcagcttttccttactgaaaatcggcagaatttcctggcggattcccgatcgggtatggcgcggctagccagccgggcgccaacgggagccaatcatcgtgcggagatctcttgttcctgtctctatgtcgtgtcgttggactgaagctcagaacttcatctctgcgaattattgtcgtcagtccatcttctacgcgccttgttcaatttgtcccaccagggatactgtggtggacccacgatatatcaccgcatagccccatatatccggcgcttgttctttcgttgtcattagaccagcaactatgagttccatctgtccctattctaggaccacggcgccaacagaggcctggcactgggatatttctgtaacatgatgcaggaggaaatttgggcgtcaaatacccaggtagccccttatgcgcactttgggcaattctagcaatttctttcctttgtgatgcttgatgctccttcacttctctaatacaatcttgctcactattgcagttctttgacaatccattcacttaacgttaagaaccatcccacccttgtcatcttgatattatatcctacttcaacagctatcggtttttgtcgggtcagctagaatggcaaggtcttttacctgccacgtttctctgagaaagtcgattgtgatgcttttgacaatattgagtgcaaacgtatcggcaaaacatcagctactacatcccaaacgtgcaaacagctgtcctgattcctcgcggaaatgtagtgttgtcggtgtgtcggaaaacttctgttgctcctcttcgtcgacgtgcattgccttggatggtggaagctcggtcatctgctgcccagaaggccaggactgttcctatgaacagcccatcacctgcgacgtaacgaaacaaaacgccactcttcatccgaacaatgtcatcaagaccacacggctggatgatgacctgcctacgtgcggaaacgcgtgctgcccgtttggatatacttgtcaaggcagcttctgcgccatggatgataccgcttcatcatccgcttccacctcctcttccacctctacttcaact

SEQ ID NO: 1266 - DNA, 1624 bp, Emericella nidulans
ggggagacaccccgatctgagtaacatacgatcgcctcccgttctagtgtggcacaaatgacaacattcgcagagtatcatcgatacatcttttattttcttatgattgcagtttagcgtcttgcatggcaattgctggtctggcgtctgggcatatattatgttggcggcgtcgtttcgggcattgctcttggaatagaaagcattcttgagttatacttatgtatgataataatacccaccggctaaggttacaataatatattatcttcacgcagcatccggactcttcaactaggaatttgtctgacttatgtaatcgctgttatgcggataattaaaaacattcgatctgagacaacacaacatcaacaatactaatcactctacgtttgaagcaaaggaaccagatatcgacgctgggatatgataaatgcgtcccacccttcgtcttgcaggaagctccggaaataaaaccgtctccaacatattcaatcaacaagcatcgtcagcatccccattcccatggctctcaaccctcaaatcaaaacagttgcaacacctagctcataaaaccggccttcccagctcgggcaccaaaactgttctcatagagagtctggagcggggattaaggctctggcaagaacaggatgaaaaattgtttcagggcaatggagagccagaaaatgttggcctgacgaagttaaacggagatggggatttgcatgaaaagtacaaagagctgagaatcctcagcatcgatatgggaattcgaaatctggcatttgctgttctgaatgtgcgtgggctcaatgatggcttaagatttgggtctaggctgggtctcctaactgagaaattggagaagcccagccgaggaaggagtatggcaaaggctgcccaaggtctcgatggtgagggcgaaggtaatggtgaaggtgataatgatgatgccggtgcagttcaagtcagcttagaggcctggcgacgagtctctctcccgctagaccggggactttcggttgaggagttcagccgctatcttgacactccttattctgcctttccttcaactttggcattaacgtctttacctaatcctgatattaaatcttcggataccaatgaggccgcctcgactgctttgccaaccgaaaaagggggaaagggagataaaacccccttttcccttcctatttacgccactcatgcacacagcattgtatccgctctcctagcccggtataagcccacccacgttctcaattaacgcccacgtttttctttttggccggaggtttgcggtgcaggagtggagtcttcgtgttgggggtattcggggggatgctttgggctcccctgatttttttccggttaaccaacttaggttaaaaccattttacagctttggtagccccgatttttttcttgccccgccaggtaggggttcggcccctcacattttcttttggtggggcccttcccactcagttgtttccaaacaaattaaatagttccatgccttccctctgtatttaatactcctctttttttgacagatttcttttttccgccctttatttttctttatttgagttaccctctctcttgggtttccttt

SEQ ID NO: 1267 - DNA, 1339 bp, Emericella nidulans
aggagaagttcggcgatcagaaagccggtatggccatcgacggccgtgatggcgatggagcgagacattttttaattttcgagtgatgtatctggacgacaggtatgtggttgaccttaagtactggacgtggtctctccctgtacttataatttcgttggtgaatggttatccagagcttacccgtgggaatgccgcgtttgacatcctgcagtggtcatcatgatgcaaccaccagaaatcataatgatgccgatacaacctcccccacatccaacaattggcgaggcctacgaagatctagagtctgtcatctggtaaccagcagttgccggattctacatagcggtcgatctgctaccgggaatcgagattgtcgatcctcgtggcatgtctgacttggagatgttttagggttttgctcaccctctgtgtacttattgtattcctccccctcaccttgattgcgacaacccaggactctttcggtcaggtatattattgacaagagaacgcaagccagtctgaacagcgctgacaatacctcctggtatctgactttcccagcctccttcgcaatctatgaagagtcgggatctatccaggtacagggtcatcttcccacttaaggaccttaccatttgagtgtttctggtctaccaagaaataataaaagttatttaaaaagaattatagtcttttgatgatcataaaatttctcgaaattagatcatcttgcttcgctggccctgctcaatgggtacaatgtaccattgtgtctggttcggtcgcgaaagaattgacagggggatcggaagggtttcatttaggacacagcagtataggtcttttcaagtaggtcaaaatgctaccgcaagccaatttccagcggcataaggaaaccgaattgtcgcagatatctaccgatccagacggagctcgcggctgaacttcgtccagtccacgacattcctaggcctagagaataacacaacaatgtttcctaacttatgagggttgattccgtgaagataagagcacgtattctgatagggggttacggaggtccatataactatataagattgcgggctataatgactgcctttggactttagcagataccgtaggggaagtatagacactccgcacaacgtattcacagaagctggatacagtcaccgatcagattgatttttcagatcaaaacgcttgatacgagcgccagccatttcgaaagaatcgctatcatctgcagtgagctggaaaaccattattggccaaggtaccggggcccctagatccctatagtgagtcgtattatgggaagtctcatgtt

SEQ ID NO: 1268 - DNA, 1625 bp, Emericella nidulans
tcaacgccacttgtgatgtcagtcaataccagagaaggcggttctcaggcattaggcctagcacaggtaacgccataacgttcagtagaagccaatccaggggcttccaaaagcagatgggctgtcctcagtaaggcgctaatgcatctcccattgcttgccgtataattctggccctgcgttgagcagcgcagcttccctgcctacggtacagtggccaaggttacgggtacagcttcgaagtattacctcttgatcccattatcagcatccaccttagtgttgaccaacatcaacaccatgaagatcattgttcttgataggcgttaaggctccgataacatgtgcggtcaacccggcaaccgacatgagcgacgccacagaacgggcggggccggcgtctttggtctgtctcgcttccccaacagtccacaatgtttacattcttcccctttaggagttttgacttgactgaacctcatccgaggacatcacctcggttttaaaactacattatctcaggctgcttgcaggacaagcacgtccatcatggagcagcaaggtgatttgcaggctgcctcaaactacattaataatgtcttactggcccggggcctggttaagagcggccgaccgattgattttgcgaacccggagaacgaggagggcggagtggcaaccacgatggcgaggatcatcaacttggttaacgatttggttctgagaagagacgtaagcttgccgatatcttatacgagtattttgctaattgtttctagcgtgaagcagaacatcgagagaacctagcgacgacgattcggacactgcgagcggaagaatctcacaaggcggtagaaatggtacgtgtgcgaacagtaaatgctagacggcaaagtctaagagtgtaggaaaaactccaaacgaaaaagtctgaactatcgcgatcgctggcgctggcggaagcgcaagaacgagctctcaagaccagcatgtcaagcgcagaggcgacaatccgggggctgaaagatcaggtccagcgtatgaagacgactgtgcaacaagtacgatcccaatgtgccaacgatattcgaaagcgcgatctcgagctacagaagttgaaggcccatcttgcggaccgacaacgaggcaagcgtgatggtctgggcgtgacgacaatcaatattaaccctgctgctagtcaatcgtcgcggaggtacctgtcagggggtgagggtgtgcatgatccaggatacagcttgaagcaggaaacgaacgaattccttacacagttgctacagaatcttagcgacgagaatgattcgcttatctctcttgcgcggaacactgtttttactttgaaggaattacaaggcttatcgtcaacagaagagccggctgttgacaacgggtacttgcaggggtcagctagtactgctcaaaggtcaacctacgggggcgctgccgtcacaagtctgcctgcttcttgcgaagagctatcgggtgaaatggaccaagtactggaacatcttcgaacactgcttacaaacccatcattcgtgccgcttgaagaggttgaagtgcgcgatgaagagatccctatagtgagtcgtattatcggcccggtt

SEQ ID NO: 1269 - DNA, 3071 bp, Emericella nidulans
aggactcaattggcgtcctcatcgtatatcagcgcagcggttcccagttcctgattcccacggggcccgactaatatgtatcccggatccgtatggccgctcttggttactgaaacttgcggcggttggaagggagcggtttggagggtcatgaacggccagttatcggcggcggcttctatggccagcagtaaggcgctagcagcggcaagaaaacggcgggccatcgtgaaccaacactaagtaccaatatatcaaagcagaaatgaacgaatgtaaataatgatatcaaaatgagcgacagagaagtagagtgagcgactgtgtatattaaagtgtagaaagaagtacagaaagaaggcagagaaatgctgaaattaagacagggtccgaagtaccgatcaacagcatcgcttccgtccacggctcagctgctagaaacgaagagcagagaaacggagaagtggacagacaatcaactgtcggggtgggttgaaactcgaagatccccaagctttgactcgcattcaagtagctccaccgccctggcttctagcctttcacaggccgatcgtcagggccttccccagtggacgcgcaattgctcactggaatcacgaaatagctgtccatgttcaagacgatcttcatcttgcccggctatcttgccgggtgcttggatttcaatggctttccatcttgcgaacagtcaatatttatgcatttttttggactgacccgcgtaacacggcaaataatgacggccgttttacttttgtttccaggaaccgacgattgtttcgtgcctgggttagccagcccatagttcaagactggctctgataaagctcaatatcaagctcaatttaataaagcagcaagctcagcttgcgaactcgtggtggtgcattgtgagtgcatgactcgacttctctccgcatagcttctaaatgccaaggcccgggggctttttttaattcatgccaaatatggtctagctcgggatcctcactaatcttcttggagatagattgccgaccgcgtcctttgccttttcaggacatctgataacctgcatatctactgcgagaggcatcgaagcgatgaaaacttgcaatttttgtcgaatcggagctctatgacattcatcaaggaatcaactaaagtcagcatagcaggtttaataggctatggtgccacagtgcccggtcctgatgtcacacttccggaacttgcgaaagactacacggtttacgtccttccgcgtgtccatccccgcaagatggtacacacatggatacacaaattcctctaccaggccaagatcacgctggactacagatgcttttaacgtcgtgtgagtcctggggatcgtgcgtaaacgtggtgtgatagtacgagtgcgtctgcaggattcggcgtggacaaattctccaattgttgaaatactaggctggatagttaagttagcgagacttcgtggctcctgcctagccgatagcatctatgaggtgatattcttgtctgaacacatcatctattggtcgtggtgtcgcgatcactacctatatatcacccagtctcgccctcagcgatatgtgatctgacaaccacgatatcatctccagtttcagccagccttattgtacacttagaagagctttagggaatcccgctcagctacaatgggccggaagctcagtttattcagggccatctacctggcgtctgccagttgcatgggatctttcgcttttgcatttgatactggcgttatcagtatgtatcaatgtctggctgtgggaagttgtggctaacttatgactaggcggtgtcctcactctcgaatcgttccagagggactttcggtatactgaatcgcagaagacaaccgtcaattctaatgccgtctcaattctgcaggctggtgcgtttttcggctgtttcctcaccacgccagttgcatcgcgctttggccgtcgatcaggcttgatcatcagttctctggtcttcaccgttggaacaatcttgcaaatcatcaacgcgcatactctggcgacgttctacacaggtagagtaattgccggcgtcgggatcggcgcggcaactgtgttgattccgatgtactccgctgagatggccccgaaagagatccgcgggcgactcggtgcttgtttccagttattcttcgctttgggtgtaatgatcgcctactgggtcaccttcgccgtttcagagacccagccaccgaagcccaagcaatggcagatagcgctcggtctgcagctactgccatccactctgttgctgatcggaatggtcactgtcaaggaaagtgcccgctggctggcggtcaagggccggaacgaagaagcgtgggagtctctgaaatgggttcgaggtggagaggacacgccggagctgcagcaggaattcgatgaaattctcgcaggcattgcagaagaagcccgcgtcaaagaaaactttacttggcgtgaactccttctgcccgcgaatcggtaccgaatcttcattgccattacgattcagctctgtgcccagttgtccggtaatacttccttggcatactatgcgacccagatattctcggccgtcggcgcggggagctccgccaaactggtgactggcttctttggcgtggtcaaggtcgtaggtgtcagcatcttccaattgtttgtcattgacaagattggacgaagggtgccattcatggctggggctttcgcaatgggttcgttcatgcttattatcgcgtgcgtgcttgcaactcatcccacgagctcggatggggccgactcgggagcaacgccggccggtattgcaatgatcattatggtgtacgccgaagcctttagcttcaatatgtcctggggcgcgcttccatggctatacgtcggcgagattttctcgagtcggctgcgagaagtcggtgtgaccgttggagcggcgtcgcaatggctgtttaactttatgatgtctcaggtgacgccacacgccattagtaatattggctggcggatgttcttgatgtttgccatcttcaactatgc

SEQ ID NO: 1270 - DNA, 2110 bp, Emericella nidulans
ggagtgggacataaagcaagataaagaaaaagaaaggacaggaggtattaaagcacggtgggtactgtggatatgacaatagaagataagatgccagttagcattaagaataaggaataaagtattgagagataaaataaaacaaggcactatattacaaacaggagcaaatttaaaaattagaaaagaaagaaccaggtccaatatatagaaataagacgccgcgaacagaattcatacgtcaataaaatagccaaatatgtgaggatcatccacaatagaaagaacacctgtacattagctcaagattaaaaagtggtcatcgtccaaaatagagggaacaagaaaatccatgcggagtacgttaccggcgccagtatcaaaagtagcctattttattagggtaatgcaatgagaacgtaaagaccaaaagtggccacgacgccagtagaaacttcaagaattggcagaagaggagcaaatgttgttcaatgcatcagtccctccagggaaggtttgaatcataggaggcaagcatatggacaggccaggccagacagtggtcagtgggatccagtgagccatcggtcccaaagtcctcgacaccgtggcgatatacaccgacatcacccaagacggccttttcctctacctgaccctcacaactggaaaccatatcgctgctctcgacatctccgacctcgacaatgtaaaacgtctcgacgacccagatgaagaccagcccactattggcccgcactatatcaaggtcacgccagaccagaagcacctcgtcgtcacggattactttgtgcagaccgacgatattggccttatcaacacccctgctgactttaaggcgctgtacatcgacattaatgatgacggaaccttgagcttcaaccgctcgattgactttagcagggaatttgcgaaccgggcaggtgcaaagccccattctactgttgtttttgactttacagaccctgagaatcctctttacaattgatcatcccaatctggctgagtgaaaggtaacggggccgatgacgctcgtgatgggtttatatagtgtagtcggtgaaggctacgagcttttttcttgcacaaacctaccgggattatcctcgtgtactgggtttaaatatgcagctagccaacatatcgtgaataccaatcaagctattcaggccaatccttgcaaagagtgccacatggggtcgagtttattacttttcttcaggtgttcttagtatgcaacttagtgtgtcttgaagaagggcctagggccgacatggcaacagtcccagatgtgatttccgcctggcgggaccctgttaaacgaccatatgcacgctctggatcccactcaatatcatcatggatatcgcgttgggccgtctcctgcgaaatacgacgctgtcgatatagagtccagctagaccaggagccaaatataacgagggttaatggaaccaccacgacccagtaaatccaaaaaggggtgtggtcgaaggttggaagggagaagagagtctgtggtgctcttggtaagttttaagacattgaggggacaatatacttgcttacggcaatgtaagtcgctggaaagaagatcgctgtcagaacggtgagtgattttagcgctgacccgtcgcgcttcgacgcttcggagatcttcttcgattccatggctacggagacaccgatcatgttgtcgcgttgagatagaaggctgtatatctgcgccatgttaacacatcttttcgatgacccttgtgaatatggggaccctgacagcggtgatctggttatctgcccgcctctcgttatacttcgtatcgaccagtcggaacttgagcgccgtctcgaggttcgcaatccactgtacgtactggtctcttgggctatgtgtgaccacaaatgtctgaaggatagaccgggcaatacacccgtcaccaagggtctgcttgatgaggtcaagatagactccaatcgagttgatccttcgataactcaacgagatatacagcttgaccgtctgccccaaataggacaactcactgtcatgctccggtgcatccagggcctgaacctcgagccacccatg

SEQ ID NO: 1271 - DNA, 4732 bp, Emericella nidulans
ttgctcgttgtgcctcagccccctccgcggccgatattaccggcatttgttaacctccgtgctctcgagcggttctcttattcttcgtttgatgatgacaaccatcagactcgtaaacggcgacgtctaggagctggtactgagattgatgtccagcctgattccttcggagagctcctgcagttgccgatgccacaggcgcagaaagaacaaaggcctccgccatttggaccgtttgctatccttaacggattgaacgagcctccgcccaatgctgccttgcttccgcctattgaggcgggctcgattacgcagctactcaccaaaccatcgcgagaccatatcgacgtagagccagagccagaccaagtggtaacagctgcgagcttaactcccgatgttcagaatggtgaaaggattgagggaaggattgcggatatcttggattctcctattgctgagaagcctgatcttcgtgatgctgtcgtcaacaatgacgaggttgataagacacagccggaaaaggagccaagtcatgcgaaagaatcacaacccactcaggagacggacttgccgccttcgcccaagacaagagggcgttcacggaaaaacctccggaaatggactgatgaagaaaccgttgccttactgcgtggcgttatgaagtgcggtatcgggaattggaaagaagtcctcgcgcaggatgagtcgagcttcaacaggcgcaccgcgtcgaacttgaaagataggtatgagtacactaatcatcataagtcctgaaactaattagccgtgtctagattccgcgtctgctgcccctccgcctatcggtgagattactagctgtcaatcacatctacatattagctaactcctagccagtgcctcggatcccaatgaagccatacagcacctgcgtgaagctctcgccaaaacgctagcacggatcgaaggcgacgcttcggcaactccaagtctcactcacagcggatcgtcatccagcttttcttcgctggacacaagccaaaataccccggaacaccactctcaaagcgattcgatgccggaaactaaccaaacactacccaataagttcgagcctgcaacagggagtctctctgttatatcagagccttacaccccggcaaaagccaggcgtcgttctcggcgtcccttcacggcggcagaggatgaagccttgctaaaaggatacgccgtccacgggttccagtggacactcatccagcaagacaagaagcttaatctcggccatcgaagagcgactgatctgcgtgatcgatttaggaccaagtttccccatgcttaccgtgaagggggcgcgattcgggatagcacgctgcaggctcaaatggcgaaagacacaattgtgaaggacggaaccatcccggcagtgagaaacagacagggccctcaggatagcaaaaccgcctccaccagcgatcgttccggcaagcccattagtctcaatggtgtgggacagtagatcctgttcttccttcgctggcacttctccggtaacacgagaaatttcgacaggtgttccactctcagggctctcctttctgctggaaaagggttccacaaatgaggacagcgtagaccttccaccgctgatttgggatgaccttccttaatgagaactggccacccgatgcgactatggtaaatacaagttgtctatatcatgaactgcaaaataccgtcaccaaggcaactatgaagtcaggttgatttaatatcttagtacgatgaggtaagatagacaggattcgtgttctgagcttccagaacagcaacttttctgacaagctctgctagcacggcggcctttccgatctccatttcgcggttgatgatgtccagctgacgcgagatccagagcctctgcgcagcatctacaccttccccgatccccgccacatacagcgcccaacttatttgcaacgctgatagacgacgcgcgtatttttcgtcagggaaggagtcattcggatagcgccgcccagatcctggtccggttttatagcctagatggtacggcaatgacgcacaaatgtcattcgctagcgcacgaatcccactccgggctgtcgctacaccccgggctatcttggttagctgcgtgtcttcaagtccgagaccgtgagcgtataagggatttgcgaggaggccatacgctcgcagacgcagactgtgagctaggattcgaagcatgcggtactgtgaccagtcatcccccgctgaaagtgtcggataaatatatgcagtcctgctccaaagatctatgctgtcatctggcgatagctgtaccgtgatgtatctagattctgagaggagtgtgctcggccactcagccatttgataatcgagggatattatggcttcgaggaggtcctgggcttttgtggcagcggcgatggcgacggcgcaattagcagggaatgttagccgggcatctctctcaagatgccggagttgcaagtggataatgagaagggtggagttgtagagatttaaaaagtcggttttcttttccgctaataggcctgcgtgaaggagctggaggtcgttaaaggtgaatataaacgggcgcgtcgcttttgatgtcgtcgaaacaggcgaagagctttaccaaaactggtcagttcatggtctttctccgttctatggcagatccctgacactgggaaatgtgtcggacgtacagctctagtcagcagtgcgctgtatatctttctagttgtgtcctcgccaaaactcctacacttttgagacctaacaaaagccattgctccttcaagatgagagttggaagtgagtctgatatgatcctcgctgttcatgtcctgccaataaccatcagcatccaactcagcctagattcggttaaggaacactctacctcgtacattccgagaacaaaaatagtcatgataagctctcttctcctctcctcattcagatgctccatcaatcgacgagtgagctgaagtgctctgccgtagcttgccatcgcctcggtgatggcgccccggtccttttcattgtgcttgtctgagacgagggtcaagaacaacgccgacaatgcagatgggagtggtgacgatgcgattatgggctgccccaagctagcaagaataggcggaatggctgttagcaagccaccgtgcagaccctgcccctgcggaagacgggcgacctgctctataagtgcacacagtttgtcgcgttcctggatgagggtatggccagagattctagcagggggtgctaaggaatccgccagcaacttggtcattgagaagtctcgagacgtctcctgaatctgcccagaacgcttgctggtcttttttctgtcattaagattgcgataaccaccacacacgcggtttcccttaatgcatcgcttgcagatcggtctcgcctcgtcgcactgctcttgccaatcagtcatgcctccactcattagaaggaatccgaaccttgactttgcgtgcacggcatgtgtagcagcctttgcttggtccacctgggtaaaccatccttcaaaccgaacctcgcaagattcgaactctaacttgagaggtattgacttctatcggactgtatagatatttggtaatcctcaaaggctgagtcttttaattgactgctagccccagttgcacttggacttcttttcgataccatacgcggccaactgatgagtgaatggaaactgcaaggtaataaataagtacagcctagagacactaggcgaagcagtccgataacactgaaaactaagacaagcgaaagtcgacttgcacatacgccgcgctgcgtaagaaaaccagttcctgagactgtaaggctgtctgtgcaccgcacagctggcctgattcttgtgactgagaaacaagaccagctacgatcgattattatttgtcgatctcatcgggcttgtcactctcctccgtcggaactatcggcttcccgtttgctctacttatttatttggttttctcatcgaatctttttttacattaattgattcggaattcatatcctatgtccgtctctattgaaaatttctttttttcctatctcaataagttacttattgcttttctcctttactcatccactcttcctttattttacatgaaatgggtttttatctctctattttatactctcctattcccttagttcgtgtgtgttcccttgattgatactatacaccttatttaacttctacattaccatcttccatactctttctactttttcatcctctacttcattggtacctttttctaaaattagtttccttttgccctattctatgttatccgactaggcttttcattgagctcttgcccatctgatttctcctttgtatcttctgcgccctcccattttttctagtcttattatgttgattaacgcctatcctacacttcgtacttattcgtctcttactgatatttcttcaattttatctacttcttagctctactttcatttatctttatttcataatcgtacagtatatagtctcttatattacaacttattccttacgtttcttaacctattctttgactctgtttctaactatgctgtaaccttatctatagaattacattggattcatgtcccccatatatcttctttttatatttctttctcagtcactcatattttcaactttttatactttcagtta

SEQ ID NO: 1272 - DNA, 2999 bp, Emericella nidulans
gactcggcccgccggcagtgaggtccttacttggataggcatgttctttatgctctccgcgtctaagaccatgattatcattctgttcaagtgattcattaagtgattcaaagggcagagaccggtcaatgtcgatgacctaccgcggtcgggctcagggtcctactcttatcactttgatgcctagaggcaagccggtatttcaggatagactcgttaccgtataatcaaatcggatcccctgatcgagactgagacccactagcattcaggtgtgacgatgtcttgcgaatttctaccttattcgtcacggagaggatgcacaattcccgacgagtgagattgggatagaaccttgctcccggtagaaatgttgcggtgcaagaggatccagagaaggtggaggccatttttggtacacatcggctgtcccggtccagctctcctggccgtggaagtactggcgatcaatagggtaaacctgaacgttaaaaataatgacatctattttatatacaactctatcaaagcatgttcatctctactcgtgacgtcccttcgtatacacagtgttctagagttcaacggtaaaccactccatcccaactccacaaacaagcagcttcatcccctcctcgtcatgaacaacgtccaacgatgagatgtccgctacggggctataccggtccagcacattgtccacctggaccccgtccaagaccggacggtcttgcatgtcaatggtcacccgccagaacttgacgcggtggtcgttcccagaggatgcaaagctaagctggatagtcccgctgtttcgggcaatcgactcttcaatagcctttacggcattgacagacgctgtgtgcgcgtccgggattgtgattgttgccgggccggtttctgtgtcggtgtgtagtagtgtaagcgtgatggcgttgtcgtcgcctccggcgagcaacagggtgacagtgtcggatagatgtaccatgtcgattgtctttatgctattagagtggatttggtgtctgctttcgcaggcgattgtctcctccggtattgagagggagctgagcggttgtttcaggcgtagcggccgatcaaggtggtagaattgctctaagacggcggttatgtcccaaagcgtaaagtgtccgtccgtcgacgtggttactagacaaagcgacgatggggcccggaggaaccggacttgggtgagacagttgctcgtgtacgtgccgctggctaggagactgaagcggccgtcttcgttggcacatgataaatggaagaccttgattgtggagttggaatatgtcagacagagcaggaagctcgcttcggcttcagtctgtgaaggttccacctcgagaatatcaaagcatgtcacgcggagttctgacttgggatggctcttgggacactgcccttgtatagccgctgccaggccgaataatgggatggcgcggatcttccacacgaagaagtcttccattgcactgcttgtgaacaggaactttccgtccttggaccacgagatatgctgcggcgaagagtcgtgtgctgttaagactcgttgagtctctagtgctccccatggacctgaccggtttggtgatctcggtgcgagaatgcgcaatgtcgtgtcctctgacccagtgacgaacaaaggacttcccttggcgggttgatacgtgcccagggctttgatctctctcccatgtccgcctgcgcgtattgagcgtgcagcctgggcattgatatgagtagcgttaaaaccgccctgggaccaaagcagtaggctttcgccaggccgcgtgctaggatggaatgcccatcgccgatggccaccgccgcagtggatcttcgcgatttcggcttgcgttgactcgttccagacgacaaagcccatgccgccaaagccgtagaggatgagatcgctgtggttgtcgatgtatgcgccttcaacgttgaaccctaacgtggtaggtgagtgcacggttcgcagagacacagcttctccggaaacgtccagcacgttgacgcggtaattggcatcccggccactcgtcaggaagtactgtgagggtgtactatccgtcggcgacagcgaggtaaacgggattattcttgtcaatccatctttgctatggactctggcgaccttcaacagaggttccagtgagccggtctcctgcaatttgtacacagcgaatgatccatatctagatcctagacctaggtactcattattgtggatcagtgaagcgcacgaaatgccgaagccctgaggaacgtgcaaaagtcacccgttccgcatgaggcccttcagctgaaagatgaacgtggaagacctctgccgtatctagtgtggtgtatgttgctagaattttcaggttgacagacccatcggtacctttatggtgatccaataagtatagaccaaccggccgttggcccgccgtcgcgacagtggttagcgacctcgtttcgtgatcatataaccgaatgatgccaagtttgtttcctatgacagcaacgcctttgtagggtagccccgaaatgatcgaataagagctcaaatcttcttcgacgaacagcgtctcgcaagcaattcttcgatcggcagtatttggggactcggcccacgcgatttgaatctcgccgctcgtagtaaccacgaggaagtggtctggtgcaacaaattcatacgctctcatcccgccgcccttgacgttttccgagcctggtgtgtcgtttatgcgagtggtcctgttgggacatattaactccccagcttcctgcacgagattgaaagtccggacagccccatcgtttccaccggtatagacggttgttttcgaaccggcagtcagcaatccgagggaccaaatgtgcttgccattgtgcggatgaagggagcaagtgtttgttagcttgaatttagtttcgctcgatgacccccaaatgagatcccacaccaggcactgcgcatcctcccc

SEQ ID NO: 1273 - DNA, 1534 bp, Emericella nidulans
  unsure (1)..(1534): unsure at all n locations
aggaggatcctgcgataaacggaggattcttaacctctctttgattcagttgtgataaaatacatgcggcctgagccgtcgcttctaatgcaggaatgagaatatgccaagtggagccataatgcagtgcagtcaacgccgaccttttagggtccagcgcagtaggtatctcaaaagatcaacaaaagcagaacagagccagaagagtaggaaagcgtccggagaagaggttagtcacgcaaccaggccctcctcttctcctcctttttctccctccgcttatccttgaacatctttagctccttcttgctcagcttcttcgcactgcgctcggcccgtaaacttcgtccatcatgcgcattcgccgcggcatccacatcaaaatatgcgttcatctgccgccgcgacttattctcatcattgtgatactccgggttcagcgacgccgcctgccatcggcccgtgaaccgattgaacgatccaatggcctcgtagccagcagtgttcaccagtcccatccctgctccaccgtgaatcccttcttcttgtctttcgtattgctgcgcataaggtgctgtcgggtcatagtcgccatggatggcagggttatacccgcccagcggagcagaggctttctcggccggagctggttcctctgtgcctacggctggaggggctgcggcagtggcgacggctgcatccggtactcgcgggttctcccattgtgagacgcccgtataccggttatagaaataatatgcttgtgcgttggcatcccagacgggctcccagccatcgtcctcgcccggcggagcttcgttggggagcggcgggggaacttcgtccggtaatggtggcgcatctgattctcttgtttcaccttcttcttgttctccctcctcttgttgtggcgtactgtcttcgctcttctgttctgatgtgtgttcctctgcctgtttttctgccttggtcgtcactgtcgggtcattgtctctgcttgggctagtagtatctggtgacggtgatgcagatccggatgcgccctctggggcgtcattcgtgtggctcgtggacattgtgcttacgcggtgctatgtggaataatagtacgagactcggcgttcgatgatgcatatggaagactcgatgggaggaatgttcttccgctgccagcactaacgggggattactaatgacaaattgtgcgcttagtgaacatgaacagcaactatgtactctgcagagtacgagccggtattttcaagcacaagaactcaacccttattgatgcatgcctaaagagtgtatcatatgcacgtaatgatgcgactgtataaagagttgaaaaaaaaaaaagagttgaaaaaaaaaaaaaagacagaagaaaacgtcagcgaccagattcgaactggcgccggcgaacccagagataatcgatcctatcctcaataagcattngaatctaccgcttaacactngccacctgcagtttattaatatttttctataggtttcatcattttgacaattggcc

SEQ ID NO: 1274 - DNA, 2251 bp, Emericella nidulans
cctcatatttaaattgagataggggaaaagtaagggtttattttaaatatataaaaaaaaaataaataataaatacatgccccctagaaaataatcactaacataaccacatagacaaatattgtaagtacaaacagaaagagagcagctaccatttcttgaaacagccagctctttgtaaaacatagggagagacaagggaagaaatataagaggaaattcaaagatttggagtgaagcaggtaggccgatttatagtcaaattcaatgggcgcaaacgaatcatcatgttaaatagacagggagtcaaggttaagcctgaacgggtttggttgcctcaataagagctcacaaataaaacagaagaatatgtgctcccataaaaggtatgcctaggcaagcttgacccacaaagaggagtgcagagcccagcatacatgttgtggcaatagttcccgggatcacctagtactgggtcatagacttcgtgcatatggctcccagctagtctattggactatgagagtaaaccagcgtcgcttcttgggagtgataggccagggtcagtagtttagagacgcattcagcatggtcttcactccaatttcagccggatccatatatggtgcgcctgaactcaattttggctgcacatgtagtttcagcccgcgatattatggaacatcggcgttctggaaagaatccccacctgcaggcccattctacacctttattgtgcttcgcgcgggaatctaagcggccatcttagtttcatttgtatcattttcaggataccttacattttgcgacaactgaccattctgtaacaggcgtgggatataatcgagaacaccgaactattcctccatgtgcatgatagtcaaggccgttacgatcccaaaacacatttagcggaaatgattgcactacttggccccccgccgaaagagttactagcacagtcgcatgctatggcagacatcagttggcctaatcctatcaagaatgagacaggcaagctctgcaggaacgggcgagagtatttcaatgggcctttcttcgatgaaaattgtaaacgaacagatccacaattaccttgctttcccactaatcttattgttgtggcaggtgagtttctttataacgatctaataccggagcggaaacttgaagattctatcatgtacttggagcagaaggaaagacaagccttcttgtcgttcatcacccgtgcgcttgcttggaatccggaagataggcaaacagccggcgagctgatggaacacccgttcctgaatggctagagtaaagagtgcttcggatttgtcttaaatgacctgctttccccgcatttgggagccgcaacagattgagggtcaaggcgcctggttgtcaggaaatgatacgaaccgtattaggggcagatactgttaatccatcatagcgcaggatgagagtggagagctcacccgtcagtactagatcacttgtctcagaccccgcaaaccattacgcgtgagacaattatcacgtgtatatacgcgaagcatactggcgctctaggcacgacgtcctttgagtctgctgcgctaggctggggcgcaaacatggcctccgagtcatcatctgacagtagagagcccggccgaacctgaattgcgacttcgcgaccaacatttattatgtcgctgtatttataccctgctggatttagggtaattttttcttctcgctggacaagtaccaatctaatccagacttttgcacctgatccacctttggcagaacttgagaataaataatgccacttcacctgcccttcgctgcaatatagggctggatgcaaactgattggaatgaccagttgtctttgtacctgaggcctatatacactagcgcctagggagatctgcccttgccgtgttatagttttttatagagaatttttacatatacctgttacagaagcctactagtatatgatctaaagtacttctacttagtaaagcctggtatagtctttagtgattactagatctattagtcagaaatcgtatggtatattttcaaaaatatagcctaaaatagcaagccctcgagggagagaactcagccgtgcaagcccccaaaaaacctgaacttattttgagttttgattgaactagaactcatatgctacgacctcggactatgaacatgagtgagatctaccccatttggactgcttatacagtctatacagttttggccc

SEQ ID NO: 1275 - DNA, 933 bp, Emericella nidulans
cctgtgttcatcctttggatgcaacgacatatgtatggccatatatatgcgttgtgggatattctggaagatcattgatatacttaatatttaatattgtaagactggaggagcttttagctcttgtaagcagaataagcatgtctggttccttttatttagttagcaagcagtttaaaactaacttgtaagcagtggcgcaataactatacctgtatttctaaggcaacatcagcagctggcttaataagatcatcatccaaataggttgaaatgttctcaattgaaatgttcccggagtctggacactccattgttctaactgcttagcaaccaattgctaaatgctttgatatttgtgtaggtcaagtatcaacaaattggaaaacagaaattgaattacaagtgtagacaccagtatttaaagacctcgtgcaggacaaacttgcttaataatgatcttggcactcacgtgcagggggtgtaggccgcatgagctcaccgcttggctcatgcggcctgtgtacaccgctctgtggtgccgctcgctcggtggtggattacgttagtacagtagtattagtaagggctccgattttggctgacaggcggcaactccagaccttcaacagcacgaacccccaccatggcccgcctgatgtcctttcccccagaaatcctcgaccgacttttcttttatgctgattcgacaacgcgcaagaacctgcgatgctccagccacgttctcagcgccattggtcagcgctgggtctttgactgtctgaccgtgagtctgaccgatgcgagctgcggccgactagaccacattatcagcagacccgtgcttgccacgtgcgtgaccaagctttatatgaacacgtgtaatctggtcaactaggttagtattcggattaccgcaaagtcttcgtagag

SEQ ID NO: 1276 - DNA, 3105 bp, Emericella nidulans
aagaaagaggaggtcgaaaatgggcaaattcatctagcgtgtttccggggaacaggcacagcccgaggccggtctagagcaaccaagcagaatgttgatcggattcggcaaaagggtgtcgtaatgaataccagggtgaggcagtcgtgcgcagctagccctgcctcgatcccagatcggtgttgcaccgtggccgtgttggttgagacccaagacgatcccgaactgttcaagatcgaaagattaattggattgaaactcggccagagtctggagggtgagccagattccaatgccgaaaagaaccgtgacgctgtctcatattgaatgggattgcactacgggatcaacggttttcgatcaattgcaaacgccggtgccgaggacgaggatcacaagggcaagcatgctggattagttagaaacagcgccattcatggcttgagaagggttcgagaactcgagccggctagtgccctcaaggggtgactcttcccccggccttccgggtacgccgggtagaaagggtccatttggactcgtactatactagtagacccggccctaagcccctgagaggaaacgtgcgtgaaggtgaaacgacccacccggcccaaaaattcgctgatctcggatgatagatcgaaacgagaacatcatccaaatgccgtgatgccgcggctgctgcgatttaatagttcaaactaagttggctgcaagagtgatggctgcggtgcagtgagcggccgtgactcttccgacaagcaaggccctaatcccaagcagagtcaaggagccgcggctggctgcacttcaggggcctggaaggggtgaggacttcgagtcatgatcgggcaggcagccaagaaaatcatattccctaggtctatcacggactcaacgagtcacaggtcttgtggtgctatttttgacagccatcagggttctggacaagcgtctatggagaaacttcgtatcagatctttccttctcggtcgtcgacctcggcagcggtcctgagccaagtacagagttcgctggagtgactggaggcatttctgggccgggggtgggtgaggccatggatagtgtgggtagtcaaaagatagagcccacatccagcatctgcactgctactgacgagggtaacggatttcggtattctttggcaggatcagcctcggagaagctctttgccgtagttgtttcagtgattgccgaactggctggttgcttcgtagcaagcagtcgcaaccagtctcgtctgagcctgacttgattcttcacgatatctctcgcccgtggaacgtttggaatcgaccagtgcaccaacttacggctattcctcggatgagtgaagtgaaaacaatttaaccataaatcagccctacaacggccgtctactgcatgtacactatacccacccaatcgcagagcttgaggcggcagcagcggcaacaaagcgtgtctctagggttacagggtgagaataatggtgaaagaaagcgcctattcgccgtgacgagctgttatggcagggattgaccagtcgccatattaatagaggctagcaccgccacttagaacactgtaatatagggtacggtctcagctgaagcggccatgacatccgtccactcgccctgcgtagtctacctagacatccctgtgaagcgtgcacggctctgaagacagcagcagagatgcggccgacccagaaagaaccacggctcccaagcccgctgggtcgaccgcatgtgctctttgatggctccttcatcaacgagttcctgcagccgggcccagaacttgacgcgtcagtgctaatgcgcgcgacctacgtcggtggacatgagctagcagagcgaggaaaggatcatccccaggtgggtgagctttttgatttttatcttttattttatttttttttttttttttgggcggactcttgccgggagcttggatgggctattgagaaactgacgagccggcacatgctcctccattacacctgcattccacgcagttcgaatcattcatcgtcgagagataggctgtcggcactagcaccacgtatgaggtgcttgacaccgtccacactatgtctgcaaactatctgcaagttgcggtccgaccagccctctccccggccgtgcccagccggacggcagatgtggtaacggagatcccaccgtggacgccacataaattcaagccgtaaagatcctgcctgtgtgtggttcggcgcctgagacagcgctaacttcactagagtcgctcccgaccatccgatctggtgacagacgagggccgtgagtacgaagcctcgctgccgaatgggcgacactccgatagcaccatcctcgtcaggggctatccaagaacagcagacgtctcgaaaaccggccggctcacctcgacttctcgtcagacatggatgcggccttctttctggccatcttggcttctgtcgatgccgttgcatctcgacggctcgccatgacccctgccacggcggccaacatgatgtcgctccagacggccagtgcatctgttctcattctatgcccaacaagctggtggcttggtccgttgaggtggatggtcccgtggtcggcacagaagatgatggagcgggcccgcacgcttctcgagagcagcaacgttgtggatgtggtggagcagatcatcgacggagaggttgtcaaacggcagtaggattcagtctgagctcctatacctggtagacaagacggtgcacaatgaggttccagtctggcccaggctggcgtcagcctcgtgtgggtgacgcaggccggcagtggaggccagagtcttccagagtcttccagtctcaaaatgttttctcataaagatcaggatttagataagcaatactcgatgctcgtgcagcaccactctcgtttcacttgcatgatcagagttatgtatacacaaccattggtcccgcatggtcatgaccggaatcgtatagagaacactcccttgagcgaaaatcgcaggtgggtgcaaaccactgccatccaacagtagcggtacaagacgagaattctcgtgactgttcttcagtaatgtccacgattg

SEQ ID NO: 1277 - DNA, 1466 bp, Emericella nidulans
ggtgtcatgcatatagatgctggaatgttgctggaccgccgggcacgccaaggggcataactaaggattgctatcgagcccccagacactgtgtacgctgtcggcaaccatatcacctaagatcaccctggtctgctagcgcatatacttgtaccatgttgcataaacaatctcatctgcttgcaactgaaagccgtcagccaacctaactacatgcggaaggatctctgcgatctctagaccatgctcgactatgatcttcccgaccactatgagacttacagcgccatcttcgattgggcatccaccggacctctgccaggacttgataagcagaccgaggtcatcagggcccttgtcgactttgaatccagccttctcaagaccttcaagaagcactttgtcatgctcgttctgcaccgccgtaattctgacctgctgtgctttgaattgctcgctggggatactgtagagaaaaacgtcagagtcgtgcaccgggggcccgttctcctcatagagacccttcaatccgatattcacaatcgcgtctgatgagatgacgcaggtggacgagcgctgcaccatggtgacgtcgtagcctttctcgtagtagtcttgcgtgatatcgtgggctgaattgcaggatcctacgacaaccgccttctgctgacccttgcgtgggtctgcgtctgtcgcgccctcgaactcggaactatggcagatgcggctgcctttgaagctctcgatacctttgaattcaggcaggttcttctcgcctgaatgtccagttgcctggattatatgtcgcggatggagaaccctctttacctcgcccgaatccgttctccgtataacctctacagaccactctttcccgtcagcatgccactttgcctccttgaccgtcgtccgcgtccagacattcagctccagcagcttcacatagcactcgaagaactccgcgagcttatcctttggcgtgaaaacaggccagttgcttgggaatggaaggtacggcatgtgatcgaaccacacgggatcatgcaggacgagctggtggtaccgtcttcgccagttatcacctacccggtcttcctggtcgatgatcagcgcatcaacaccgagcatcctcagccgcgctgcgacggagagtccagcttggcctgcgcccacaatgaggacagctggctctttgttctcgtcaaggttggtttccgccttgcgacggtcttgccagttaagcctaggtctaccactaatctctccgtggactgctccaaaaggccgtcgcgagctgacttgctcttcgtgccctgtcagttcctggaggacggtatagagcgtgtagatataccactctccctcgtcaccctcggccaggcgaaccaccccgcgaccagatccaatcgccgtcgagacggtgatgaagaactgcacgccgattacctcagccgaaggcatcgatg

SEQ ID NO: 1278 - DNA, 1302 bp, Emericella nidulans
  unsure (1)..(1302): unsure at all n locations
gcatcgaaataatcccatctcactatagggagacccaagcttaggatcgcataagaatagtagagccgcctgaccgtctgaccaccctttcttcaatccactaaacccgtcttccgatcaattattattgtggcttcatatccctactaaagagataatgctccgctcgctcctatcaataacgggtctccaacgcgacgatcacatcttcccgaccgtcgatcccaaacatgatggccccaactgcaagaaagactgcccggactgcacactgaacttgccagaccaagcaaaggtcgagacatagctaccgctatacggccgtatcaagcagctccacacgcacgtactggacgcgacggggaggtccgactggaagcagcatgtcgagcaagagcgcggaagcctgatggacgccttcgacggtgtttcatcgcagcatggggcaagtgccagaatagggtctcacctgcgcagtcgctgatcaggggacgctacagcgcatgatggtcaacgcgtctaacctgaagcctccagatgacgatggagcaaggactggcagaggaacgggaccaccatccttcttcttccatctttcacctttgtcgacggagtggatcccagcgacgtccgagaggtcgtcagccacttcatcgacactccgctgtcacagcactcaaaaacaaacacatcacccaatgttcggttaaaatcccgaccctgcgagtatgactatgtcgtgctcctctgctctcacaagcgacgcgatgcacgatgcggcattacagcgcccctaatcaagcgcgagctcgaacgccatctccggccacgtggtttgtaccgcgacgccgatgacgagcgtcctggtggggttgggatcttctttgtctcccatgtcggcgggcacaagttctcggcgaacgtgctggtctaccgcaagaaggagcagcagatgatctggctagcgagagtccggcctgagcactgtgagggcatcgtcaactatacgcttctgcagggaaaagtcgtcacccggattttcagctgcgcggcggcttgaccggtgaaggggttgacgagttggtaactagaagggcatgcttactgtattggatacccagcataatagacatattaggtcacgtcatatnccgtgtcagatttttctctctaaatgagatgatcgggttcatgcccagagagtgctgagatcgaaagatgctcggctgcatagactgtggtgatggcgatgacacatgagctatagccgacgtatccgctcaaatcatcgatccgtcatga

SEQ ID NO: 1279 - DNA, 906 bp, Emericella nidulans
agttgtaacacatgctctgtaaaaagagagtgaagcatgtactgatcattctagtcataagtgctgaaggcggctttctcttcccttcttccctctcatacttgcatttgcagtctcgtacctgaaagacctgttttcctacgtccataacacgtctactctgacatccagtctacttaacacattgcatttttctatccttcaatattttctcctcgtactgggcatacgatatggccgaagcagcaactgagcgccttaacaggctgcaggaggtccggttttctccctttttacttcgaatgtttctctgacttatgtcaattttgaacaccataggcagacctcgggacagctcgcagagaggaaatctccacggcggatcacgattccaatacatggctgacgcggctagatgtcattgaggcctctaggagatcaaacgttcagggaacaattgaacaacaacttgcgcaagccaacagagattgcctagatgcctggaccagtaaaatcgccacctgaattctcaggtcgtttgcattgctaactctggactaagatattcacaagacaatatgtgacactggagatctagaacaccttgataatcttctggacggccagagccaccgtctgcggctcgagaaagagttacgtggaggtaatacacatgaccagcagacctcgaatagaggccagagagctctcaagggtcctacacagaataaatcgtccaaccataatgccaagttacagaaccaagccgttccacatggtaccttggccgcatcggtgtctgtaacaggtggtagcccttgcgcggctcagtcaaagcgacgccttagcaaacgcaaacctagcctctcatcccgtaggggactggatccagcacttgacattcct

SEQ ID NO: 1280 - DNA, 1171 bp, Emericella nidulans
  unsure (1)..(1171): unsure at all n locations
cggaaggctcatgtctttggagagtgacaccgcagtccctgtatctcgatgtttcctggaagtttgggcgaatgtgagacaccaacctgatggatagatgcgtcgctcaatcttcgacgggctctcacaatcgtacggcaatgtctgtgtcgttggccgaatctaacaggtgagcaaggtttctgcctctggaaattcaagaagagagacataccatctttgttaggagtgtgatcgatttcgatgatgggacagcctctgtcgcgatccctaggcggaggaatatacaaagctttcgaggtgtagctgaaacttactgcaggctgactctcttccaagctacccttagttgaagccccggcctggatgcttgtctcgcgcactttctctgaagccttgttctcttgtacgccttgattgccagctggctttgttggctccgcgttactaactgactgagcctcttggtcgaattgcgtggtttttattgcggaaacttccggacgttgacgaagaacagagggggctatagacgacggcagaagtgttagcttccagctcagatgaaggaaaatgagcgggaaatacctatctccttcaaccgcttctcaaaccagtgtaatcggataacgacaatgaggatattgatgaagcccagattcgacacgattgggatgaagtacaagaagagctgttggtaggttttgaggtccttcaggtcaacccttacacaccgtcagcgttccctccttacacccaaatgtacaagccaaggttggcgtacggattcaatccagactctgtggacgagctgactccgaaaaagtacgagtcaatagcgctcacattgccataagggtagaagaccgctagccctaggagaccgagggaaataatatatatgtctgtcgacattagcctaatgcacctagtggagggagatcgcatgcgcgtacagtgcaaaagaatgaaatttatagaaatctttcacatatttcccggcagaagctttagatatcccttagcaagctgcttgtattaaaagaatccctgcagccaggtatgaccccgttgaacaagagctcttataatgtcataatggctcagtaagccatatttatncagagtcatccttggtttcaaatgtgacagaatcaaataggtcgagtta

SEQ ID NO: 1281 - DNA, 1273 bp, Emericella nidulans
aacatgaaacaaaccctcccactgggttgagttagtcgcaaagaagtaataggaatcatatgctagtgtcaaagacttacgtcaaacggtcagtcacccccggtagtaaaagagagaatgcgcaagctcagcgtgtttcgcttgctgtcttaggatacctggaaccgtagcggaacgaaacaatggcccctgcggctgaaataactaacatatatcctaatagatatacagcgtcaattctgtaggctagactacctagtataccagcggagggagacttaccgaagcatgtttttatagcttccaggaacgacgcacgcacccgacgactaagccaggcgggaagtgtgccagcatactcaaagctttccagacagtgcttgacaatctgagaattcatagtcaacatatgccgatgaaactataataggatcattgaaccgaccttgtcgatgtcgtccggaagttcacgatgtaggcttgatcggatattgcgttctatgagacgctgaagtagccatataatcatagattgcgcaagcagatttccgatggcaataaccagatgatatacgccgtacaagatacatcgatctttttatggtattaatatgtagttgatgctcttggcggtcctgtcttaccttgctttactcctttgcggcctgtgtaccgcataatcattgtcatagaggtaccgtttgcgagcccagagctgaagcctgccaaaaccaagcccaccagtttcacccagtctcgtatggtcagctattactgaagacatacagagttgacaatggagaggaataccctggttgatcaatagagcaccaacacttaaaaacgagagcgcccgggaactgataaagacgtgtcggtcgcgctggatagacgagcatagcaaatggcctagaatttctccggccgtgaatatcatacctagcccgccgatggccattatagcgcgcatgttggatacctgcgcatagtacggcaaaaggctcaggatctgtagcggaacagccagatacatcagcatatttgcgtgaacgatcaagttggtgtggtacgtactgacatatctataaaagctgttataggtgccaggccgacgacatatgccataggcttatcccgcaagcttttccacggtagaagaggagtagtagcacatctttcgagccaccaaaaagcgagggaaaaagcgatgaatgaaatcagaggcacacaactcctgcgagatcattgtctagacaaaagaccaaggatataa

SEQ ID NO: 1282 - DNA, 1421 bp, Emericella nidulans
tagagctcatagttagcgtctcgtattgctgattgaccttgatgataaagccactcaccaggtacccaagctcagtagagccacgagcgaagataaaggtgacatcgtggcaggaaccgtcgcggagctcgtttcccgtgactgtcattagggttagcagatgcatcttcaaaagcaatagagagcccttcttgcatactctggcgttgatcgagacggattggattcgctgccacaatagcggcaaggagggaaagggcgaggtggagctggagcttcattttgcttgtatgattgaggggagcgttggatgtgaatatccttgatgaggccggctgttctgctgtgataatgtgcttgttcttcgagggtagacctgcctctctttataacctcatcctaagggtctgtttactacgacacccggcaatgtcaacgctttgatggtgtcggcacttgatggatactacccattgcaagggtctctcagcccaagatcctcggtatcgcgacctctctgccctaggagcgttagcaactcacttaagcaaagcagcaggagttcacccgcgtgaccaaaacggagaagtgagtagaggtcaaccacatgctaatcgtgcgttgtcgcattgactttctgcgccaaccgaggactgccagtctaggtagaatatctcctccagtacccttgaagcatggcgtttcattcttcagccctgcatgacttggcgcaggtctttacgatgtctacataggctgggatgatgaagaaccgaggatgaacctgcaacaactgccgtaccccacattttgcaagccctggggtacatttccccgctgatttgaatgctgtgcatatttcggcagtggttggaagtcagaaggccaagcagtcggggcagactccgtgatggatacgagagcggaacgagagtgcgcgttaaatagtccaagccaagctggcctcgtatcccgacatcagccgaggtggatcataaagaacggactccacgggcttcatctcctggcagcgagaaaggacaaacttttatacagctgtgggtggtagctcttgtgcttttggtgtggccgcagtatatcccacaaagatcgcgatgctgtctgcactaacctccacccttcagttaccaaccccatccttggtcaatctgcaacagatcaacagaaacctgagttaaccgacagaagtcctcattattatacctctagactcagcaccccaccctcagacagcgcgaggaataaacccgccgcgcaacccgcttcgaaatgtagcagttaaccctggccaacgtgtcaaaatgacaccgaacccaaagcccaaagcccaaacaattcccagaaagcgggatgcaagctcaaccctcaaggtaaggttcttgctcctgggatttgaagcg

SEQ ID NO: 1283 - DNA, 1141 bp, Emericella nidulans
attcctatccaacatgagaattcgcggccgcataatacgactcactatagggatccagagataacctaagtggatgctcatgggtaggaagaggaagctgagtgagtactccttgatctgaacggtgactcacggataggactctggcagtcacgagacgcaatgcagccagcgcagcaggtaggagtctggggatgatactgcgagaacgaccgatgagctgacgtatgcggtagcatattattagctgcgcactgcagcaaggctgatacactggagattctaccccgtctgtcagaccctctgggacaggagtgcttaccccatgcgaccgcatgtggttgtcttacgaaggtcgctgaagctgctagcgtgagcgaagattatgatcatgcggccgttgccgttatgctgcatgagctagcgaagactatctagagtgccatggtatgtacgtcatgcttataatctcttcccatgagacttccgagcaacctgctggcttattttcagcttaattacgctcgcattcggtcatgaacctgcttgtgacggtcccgaagctttgggaaaccgtcaagaacctcactagggttaaaagcaaatctcaggaagagattgaggaagacattgagacgaatatagacgttgatgttcccgatgtcgacgacgacgcaacaatggacaaggaactcaagtcgcccaaggaaaagaataagaaagaagctctccaaggcccaacgcattgccgaagcagtaagggcggaagcggaagcccagagagccagaaaactcgaagagacagaagcaaacctcgcaggcttatcgaaacttgttacagaacaaatccggaaacgtgccagtcagagaacgaatgccccgacaaaaaacgccgacgattctgactttggtgacaagacgcccctcacggccaaagaagctgaagaaagggccaaagagaaacgctccctccgcttctacacctcccagattgcacagaagtccaacaagcgaaccgcagctggccgtgatgcgggtggtgacgcggatattccttaccgtgagagacaagcgggatcgtcaggctcgcttgaacgcagaggccgagaagcgtggtaggtcaaaggccaagggcgctgag

SEQ ID NO: 1284 - DNA, 2244 bp, Emericella nidulans
tgttgactccaacagctcgggacaccccgcaacaacccacggccaacgtctcaagaagttctccgaagcttcccaattccgtggatcgtgcgcctccccccaaaccaacagcccgcatgcctcgtccgtcacattccagaatcccattatgtcctcacagagtggatggtcgtcaaaatcgcctgccatgatcaaattatcccgtatgcgcgggaacgggaaaaagtcaagccacgggtggtgcattctacttgtttgcagtcttgtagggcgcagactgaccggtagtttctctactgggaggtatcccggcatggacgtagagaagggcgagatggcttcgtcttccatccattcggggccggcgctcatgccgagggtttgcatgtttgtcatgaacgcgcggaagacattgactttgcagagggttagaaggtggtcggaggatggggagcccaggacatagctttcgactgctttttggctgaagcgctcaaggagcttgtcgatttcgttgccgaggaagcacatgcgcttctcccaggtgtagactaaggggttgctatttgtatgtgatacggtagtcgaggagctatagggagcggaatatgtggatgatggtgatgatgattctgaagaagatgatgatgtccgtgggagtaatgtgacctcgccctttgcgatcatctcttcgatttggtcttggattgtggccttcttctgctgcgcgcgtcgtcgttggcctgcaagtcgacttccgttagactcgtccgtacagcaaaatctccaagaaccgagaaacttgaaagactcacggaaagcacgctggttgatgcggttctgtctcttgcgccgctcctttggatcgcctaggccagcccagtcgtcctcagggtcggcgagggcgtgtttgcgatttcccgaccacttgacaagcgtcgagttggacgattcctgcggtgattccatgatgcgctgtgatttaactcgatgaagctgacagtcagcaattctttgaacctgagaatctcgagcaattgcaaaggcaaagaccgtcgacaagaggtggtctcgacggtggtctcgatgtggccccggctttaaaccagatgagtggggccggagttaagcacagcgccccaaatgctgacagccgcaggtcttggcgtgactcactttcatcatctgttatttaaacgctgcctcctctttggttttgcggagttggtcagataagttttagaacttacgatcggcttccatcgtgtttttgatctggcgattggttgttgtgtgcttagaatgcttagaaattcagcacagagactagagcggagaaggttgaaacagcgtcattgtctggaataaaacctggaaaataaacgaaactgggaacgtgcgacgatacggcgctcttacaagccttccgtgtggctggtggtgtcaccgattgagaagacaagccggtttgttctaccatgttatctctacgtcgagtacttcgtactattgtatgaagcctacaagggcgcttaactcgatgatctgttgatatttgcgcgagaaatatgccttcttgcctgcatacatgctatcgatcgtcgctaaattacccgcccaacgcccgcccatgggcccaacgctttcaagccacggttaaatcagccacaagcgtactctgaaaggccacccaactcgaggcgttcgctgcgtttactgcgtttgctgcgttcgctgaacaggtccaagcccctgagctgccaccgctcttgtcgttgggcgacataccggcttctgcctgtttgctttgatatgccaatgtcgagagacgacgtgggagacgacgtgggaggcgagatgggcggcgagaatgggcggcgggaaatgaggggctgaagctgaagtgccacactcgtgtccagtcccggtacgcacgctgttacggacggtagattggtaacacgtcgtatatcacgtggtccatcgacctgtcaactcaacggcgtcaaactactctgaggacatacaagtggtccagctgcatatctgtttgtctggaggaacggagcaggacccctgccttactctttgaggcggagatcccgcctcacaagataccccggttgcctcttggattggtgtgtctggatgcactggctgtcagatactaaaacgttgagagcggcttggggtgtgctttctgctggcggcgcctgcgcaatgcggattccaccaggcactctt

SEQ ID NO: 1285 - DNA, 2243 bp, Emericella nidulans
tacctcgccagtaacctgggcgtatcccaatctccggttcgctaggatcttcagtagggaagtgcagcctgctcctggtcgcccgagtaccaggagcatctctcccggcttgacacaaccatgactgttgtcaatgattgttctaagcaggggctttgcccggcttcccttgacacgcgcaggaatattgaattggctgccgacattatcatgaaatgctgcgtccgttgcaatgcccttgacaatcaggttgtaccaagtgatgccgagtcgtttatccttgtccgtctgctgctcgaccatcttaagataggctattaactcccaacttcggccttgatggcgggttcttgcttcaaagttatctagaatggctttgggtcttttggcgccgataataaatgttctgcctagtacaggagactggtatgtgagctcctgactaactctgctacccgggggacttaaaacaagcaccaacaagcaataatacataacatactgtctgctatatttgtactaaggcgttttattacactaaaagtagacccgtacagagtaccggagtactccgtgcacaaggccctttctaattgacacttatccctgcttgacacttttatctctcaatttcttcgccgttttctatttacaaacatggtaatactggcttttctagcacagaagtggcctcgcccttttcccaaagacttgaaagttacatttccaatttatttttcgcaaaaacctgagactgttcccaaggtcgccccccctcccccttcccggggtactctaccctactgtcgtactcccaactgtagccacatgctgcgttgcgcacgcatgctgctcctcgtagcactgatcctacaggatggtcgcgtttaacaatttagtagctggataggctgctctcatgtgtggcttttagcgcagacgccgtgttcacccaaggctgtcagcctgaaactattataggccatcatactgaatccctcgagtttggcagttgtcttcctaaacagttggcaggtagctgagcaataataaaatggaaaacatggcaaacgattagggagcacatataattaaaaaaatactggtatagctgatctattccaactcagtccataaaccatagcattaccatcttacagccactacttgtgcgtggcaagaatcattgcaccgacacttaattgtaaccataccaccaaactcctccttaatcacctttctaactcgacccacagaggcagggcccagatgtcgtcgctcagcggcagagtcgtgcgcaggaagccgcagccactcgacgtcggcctgtctctgccagcctaacgtgtcagcggtgcatggcggtgaaatgcctcaggcatggccacaccctcgcatccccgtacatgttcttgatgcacctcatcgccattggaatttgtgcactgcatatcgatactccttcggaaactgattcactataattgtctgggtcacaagctccgaaaggactgacgggtgagaccagtaagttgcagcgtggttatccgcagaacgaaaatgtctagcgtttagtactggtgaaggtgaaggaatcaaacagtatgcagttaaatctggtggtgacgcaaggcttctggcgactgattggtgctgcagacaaacccctgtctattataacaagaattggtttagggcatgcatgtaactcttctggtacaattttagtatttaaagagatagacagcgtatattgtaaggatgaatgttacattcattctccatctttcagggagctaatgctagcgcctggattaggctcatccaggttccacaggttgtgaatcaaagttatcctaaaaactagattgggcgggataaacaccggagtctgacttgcaaattattcgtgcttaaagctctatatttattgcagtttggtgtttacaagcaaaacagattcctgtttgcagaaatgtaccttttggcaatagcaataggtgtaaggcgctcgtaacaacgcttatacgctgtcgtagtgcctggggcagcaactgccgggatgcctcgtcaatggagcaggtaatagttaaaactcacccctcttatgtaacttgcttacccctccatgtgagcagctaacctatctattataccagtaagttggtgctggcctgcgcaacataatcacccctcagagtgagcagctcaccgagcagcagccactgtacttctatctgtgt

SEQ ID NO: 1286 - DNA, 2612 bp, Emericella nidulans
ctcctcctccttcttctccctctctctcttcctcagtctctcttcttcctcctcaatctccttctgcttctgcgcagctttctccatcccggctgcatcgcctccgacatcactctctggctcagtctcctcatcatacggataccgctcaaaaacatcctgcagcactccgcaccgcgcctgtccactcatcaagtacataataagcccggctagcatcttcatcgcagccccaaaatcgcacttcagccacaggtcatattcacaactgcccaaaacctggaacgatcgtggatgaacttcgttatcgggatttgagagctgattccactctacctgctccatgaaacgctccaggttggtcttgctgtaaaatctgccatcttggccctccggcccattaccgctgccgccacctctccttctgaacaggcgattcgtactctgtacttctcggggattgtgtcggccgctccacagcttgctggtcttctggccagggaagatgccgcgcaggatatgtagctttgaaccgtgtaggcctattagaaaggcttcttggtcgggtatcttgtcgcctggtggtgagagacggtgcacgtttattaagagttgcgagaggagtagcttaaattcaccttcaagggttcttttcagtgatacgacgggttcgcttgtctacgtaaccaatcattgcatgttagctctagccccgactcgctatctatgttgctgacaagactcttaccgtcgtaacaggcattacagcccgcggcatcccccggcttggctcgtaatctagcgatactgaacctgcggtgagtggactgtctctgtgcttgacgcggtatcctgtccagtattctggctgacaagaaaccaatctcggtcttggacaaccatcagcaactacttactcagatttttggaatgcagcaccggagaagaataaagacacacctcagaaaaaacatctcccgatgactttccgcctcacgtttgatccccagcatactcaggacctcgtcgagcagcgcatatatcgcctgtccttgcgcctttactgcttcctcgaagtccaccttcgatgaagagctttttgacgaagctgagcaggagccagagccccagccagacctagaatcggtactcgtccgccaaccggtactcacttcctcatgttcatcggcagctgagcttatcctgcaagtcgaacccccaaacaaccctccactgaacatcgggaccttcttcagcgtcttgaataccccgcgataacggatgtcaactttactccacttggcaatgttcacacaccggccatctttggcggttcgaaagatccaaggcgtgcgctttagaatagctgagacatctattagctatattatcttcgcctaactcagtcagacctaaggggtcttcagtataaactgtagtgacgtacgtgaacgatctgccttttctaggtatcgcgcaggtacaatgtctacgtaagcgcagttaaggtaaacctttgctctaagactgtgtacgtcaatttcgagtggtagagtgtcgtagtcgtcgtcgtcagcgttagtgtctgtatcacacgcgggaccaagcttggtttcaatctggttacagtctctgaacccttgcctcactttggggtctctgtctcgtttcttttcttcgagaactgcagagagggggagggatccgggtcgatccatgctagacacctacttcgtcttcggttgcttgctattgctatcgaagaatgaaggaaacacggatgataatgaggatgatactggtgaggatatgagtagtaagaagccattcagaaatgaataaagggtcaaacgaggtttgtgggctggtgttactgcagtgatagagtgctgtgaattgatttgcgcacattatagcgtcacagtgaatggtcactaggtcattttagaagggcaagagggaagattgtacccttgacatcactgtgtataacagtatttatattctttgagcacataaggatcatttggtggttgatgctcaatggcttggtaagatatgagatccttgtgagcataatgctagatagtagtgaacttgttgcattctaccataagtactccccaatgacgacgttcccttgaccaatgtctcatatctacatctcgaagaaactgtttcgctaggactcttcatacatcacagctttgaataaaagcactgggcaggcttaggtagccgggtatgaaaatatatattttcagatattggaatctccaacacacctatttcttagcctattcattccacaataatcgcctgatattagcagaatatacttgcttgaatacactactactagtattatcagcctagaaagttaactgacataatgcaaataaacctcttcctggcgtggagaccaagaggtatctatcttatcacagtggggcgattgtaccccaactcggactccaaccttttaaaagcccagctccccaagacttttccatcatctcgtctctacaaaccacccaagaagcctactaagacgagctggcatatctcaaaatgtccaaaatccacatccgtaccaataacgccggtagggc

SEQ ID NO: 1287 - DNA, 889 bp, Emericella nidulans
accacaggacagccccggggagaggtatgggcgacggcagccgcacccgaccctctcacggggagagctcgaagggttggattatggtcaattttgtgatagtattactattgagtatacattgattgcatattaagactcagatcatccttcgtccatcagtgtacgattgtattccagagagccattaggatttacacaagaacaagatgaaggcttacgatcccatgatcatggtatattgcattgtcggacatcagcaatattgacatccatccccgaaataacctaccccaccagcccgttttcatctgcaccgggtataaagtccatcgcggcgactgattctgttcgccgtcttcgtttatccaccttagaacgaatagagccggactgagtttgctcattcaggcgactcatagaaaataggcttaagccgatgtgtcacatcaacaaccttttcgtagatcttatagtctagatagtatgttagcaactggtcctaatgggaaaatcgctctctggtgagaatataaagtaccacagtcagccggattcccccaatctgttgtggccagaacacggattccaagaccaccatcaatctccgcaaccttccctacgacctcaacaagtttccccatctgcagatgtgagtcgggcttcaagatcaacgtcacatcgccatgtgtcccgcaggtaatcgttgctgtgtcgccgtgtaacgctgtgaccgtgccgaggagtcggactgggggtgcgctgcgtgggccagaggtggaggggttgaaggcgtgtaggtgtgaggggagaacgcggggagtttgtagagacatttcggtcagactttattgtttgatcctaagcttgggtctccctatagtgagtg

SEQ ID NO: 1288 - DNA, 6236 bp, Emericella nidulans
  unsure (1)..(6236): unsure at all n locations
ggcactcagctggtctgttgcgaggacgaactcgcgcatggcgggagaatggccgcctccttggacgtagcctcttatgacgccgacagtcttgacatgtcagtatatgacagagtcgttagaagtagttgaggataacatacaggatcgcctcctccgacgacaaccaagtcacgagcgaatgcctcttcgtagacgtcgtcccatacatagccaccagcaaccgtgaacgcagcgcccttccagtcggatttagtgcaacgactctcgaaagactcgtggtggatgattcccttgcgcaggtatcgcatccagatttgaagagatccgtagcccgtagacctgcattatgtgagaaaagtacctcagtgaagagataaaacacgtaccttccaaggatatcgtggcctgtgtttctcacgacaagccgaacgttattcttacttgcgaatgcaatacctgccgccagatcctctggctccgtcgcattgacggtgtagactggagaagaccctaagcgacagtcgcctgcctgggctccgctgaggacgacggggcagctgtcgtcgaccggatagcagtagccaatgggctccagcatttggaatgtcgtattagaccattgctcgtcgacgtactcgcactcctgcttgctgtataggggaccggggtagcaggagacggccgggggccaggttgcggatgagctttccagacaccgtcgagttcagcccatcccaattgattttcttccagcacctatcatgcggcgcctgcaccgagtcagcacctattccgcgatgaagagagatataccgacgcatttacatgcgtgcgacgaggccgacacttggccgaggccggctaaaacgagcagccccaaacttgacttcatcgctacaactacagggggttatcgaacaaaaaactaagcttgcgaatgagcagcatggcttggatttatcgaacggaggaacggcctcaaagccgaggatacgagtggctaagcacactattcatctccgcgtcggtgcgctagtcaagcaacttgtcaagtagttcattacgcgttgattaatttaattagctggccatggctgtcggaagccagggcctctgctaatgtaacctcgcctatcgagggcaatgtctactgcaggggtgcgtctcatcttcaacaggaccttgacggggttcctgcgccgtctgcaggtgtgcagatggtgctgatgccgaaagcccggcgctgggtttgaaatatgaagtcttgtccctctcaccagccctcggtccatccgagttactgtacggatgaagcatggcctcctccacgaatctgtcggagagagggctcatcgcggtgacctggacaggcgccgggctggggatcctcttcancggctgtcgcctggccatccgcttaacgcgactgaagcgactgctggcagacgactatgctatcctcgccgcgctattctttctcatatcgaatgcgatcctgcaaacgcttcaggcaccgcatctctactacatggtccagaccccgcagggcggcgacatcgctcaccatgcggtcatgtacgttcactacgagttcgtgatcatcgctctcttctggactgtgctctggagcgtcaaggcggcctttctggcgattttctggaagacaaccgaccagctgccggtctatcgccgctggtggtgggccattgcggtattctgtaccctggcctatatcggctgctggttggcctctgcactcaactgccacccgccatcagcctatttcaaactcggtatgtacggtgaagttcacattctctgcgcgtgctgatcccgttaggtcaatgcaacaaacccattgaccagcgcgggtctcttatttccatctcgtacagcaccgccgtggatatcttgagcgacctgatgagtatgtggcccgaacgcagacttgatttaatcgccttctgacttgccagttatgaccttggctctatggatcgtgtggtcaacgaccatttctctacgccagaagctcgcgctgctggtcgttttctcgctaggcggcatcatcatcgctttcgctgtcgtgcgggccatcaatatcctggggcggtcctataccgacgcagtgggcctggctgtctggggtatcgctgagtcctccatctgtatgtttaaaccagcaacaccactggatcccgcgttgctgaccatgtcaagcggtcattgtcggttgcctgccaccgttcaagaccttcctctcccgcaacaactcgacgtacgcctcccgctaccctcctgtctatgcccaacgaacgatcagccagaagcgacccgttttcagaaacgcgagttcggatgaggtgccgctagatcctgattacgagatgacgagatcccgagtccgcgtctcaaatggaaatgctcgatctaacggctcggacgagggcgagattcgagtcacccagggctttgtaagtgtcgcgatgcgccagagatcatcccagctaactcagacaagagtatcctcagagagtgaagggggattgcctgatgagttcgctttaaggggtcaattacgggaaatcaagaagcaactcctgatgcgctacccaaagatcaatcgcgctgacggagggaaaaaggagggaaacagtatactgcaaaaatcaaggctatcgaacttgcccgcctcggtgagtacggactcgcaccgtgaccgctgggatcagacggcaaaagagacaaggatccgaatgcgctgacaattgaggagccataccgaagggactactgctcgcttggagaggggcacaagacggttgcgctggggatgacgtgccagcggtcgcttactctttagtgctcagttagttccaacacggctccaaggctggggcagtgcccgatagatcaccggcatccacaataacaatgcaaaggtccactggtcaccaacgccccttaactgtccagaagccaatgaaaccagtcaagccttctgaagcatggccaatatgttctcttaaccgagagtgtcagcagagcctttctagcgtgctatactgtcccgcgtcaggattgtaaggggatgaaacagcgcttttactggctggatatcgcatctgtcaggtctagtcatctccagagatagtctcgccctctctacccagtgcagtcgtgacatgtggcaggtatgttgtctccgccgaagtacggcactgacttgattaaaaacaactgatgatctcattggctgacgtctattgtttcactagtctgtatcaggaatagccacctcttgaggagccgtgtcacgtgattaggcttatgtgtcggggcatactgccctccggtaccgcctgcccctaaggttcgacctcgattagtcatcatttagtaagctagttatttagataggctgaccttaccggccacccaataagacaacgatccatctcttcccataggtcatgagccctctacgctgaaggaatacgatttgtttgctagatatagatacgcagaatcgattcttgacgctctgagcaacttgctatacaaaattttagacaccccgcacctgtacgagggggggtagcaacagttttggggattaccccagaatcaggatcataaggcacctttcgctaggatgccgccaaaagcctcacgaggcaccaagtcaaacgacgtaccgtttcaaatgacaacaaggcatcgtacgtacgagccggaaacaccagtatctgctgacaaccagatatcgaacgattcgacggacgaagaccaaccggacgaaccaaccacaatggaagatatgcgagcaggattactccgtcaactacgagatgaactacgagaagaactacgtgaggagatggctcagcaattgcgcagcgagatcaggcatgagatacgcgcagagcaacaacatcagtcccctacgcagcaactacaccaggaaatcaatcagaatgcctcctatggttgaaatacagacattcaacaacgagaccttatatattgcgaaaaacaagacattcggaaattggccaaatcaaaatttggtacccaagcatcaatactgcttaatggtcgatcaaactatacagcatggcgcgattctatgcttatggatacctatatgattgaagcaaaggacatccttgatgaaaccaagccacccgatggcagtaatgaaatcgacatcgcccgctgggaaacgaagaatgaaattttgcatacaaggattctccagtcaacggcaaggcacgtacgacaaacaatcagttggaaaggctctacacttgcatccgagctatgggctagaataacatcaacatatggcctatcaatggccgaggagcgccttatgactgtcaaagccctgcttgatatcaacccacaaggcaattacccagcgatggtacgggattttcaaagaatagctgcaaagattaaagaaatgaaactatccctggatgatgttatccatgacatttttatctgttctctaggccaatggcagcagaacttcgtacgtacaaaactagacgagttctattcctgcggccgaggaccaatcaaaaacctagatattgacacctttgcggatcaattggttgctcgatcatcatcttccaacaacaaatatatcccccaggaaccacaagaattcaaactcgagcccagatatcggataatccttacagaaccaaaggactcttcccggacgaagcgcgacggtcaagaccaaaagccggcacgtacgaaaaccctctgtcaagcttgtggcaaaggatatcataagcccgatgattgttggacattgcatcctgaaaaggcgcctaaacgccatggaaaccaagcatctggaacctccaatgataataagaaccaacaaccaacaggacaggagcttgttctacggaaccatccgcaagccaactcgattgcaatcgtaccagccaaagagccggaaaatgatgaggagccccaatggctcttggatactgctgcagccttccatatatctaataaatatcatgttttcatcaatctccgaggccacaaagcatatataaatgacgccggtggtcgtacgcatcagattattggaatcggaaccgcattagtttatggggtagagattccagacgtccggtatgcgccaacaacaacagcagacctactgtcattcagccaattggatgaccaggattttgatgtatccacgcaaggcactgtcaacaagaagcacttctatattacatcacctacaggagcttctcttgatgccttcaaagagcaaaatacatgcctatatcaaatcaaaccagttgcatacgcaatacagccaatcctacacgcaaaggacacccaaaaagaaacaaataacataatacctacagcaactatggaggaatggcaccagcacctatcccatgtccatttacaagccatattaaagatggcataacagaaaatcatcaaaatcaaagggccaaaaaccttggctttctgcgacatctgttaacaggctaaggagaggagaaagagcaccaaggagccagcctcacgcgccacaaagatcctagtgtgaatctatattgatattgcaggagggggagcaatattggactgcaaggataagcaagcccctcccggcatcagaaatattagatatttcttgttgattactgatgatgcaacccaatatcaataggtttatacccttcgaactagagatgaggctattcccaccttccagggatggcttgagcatatcaaaaaccaaggatacagcccaccagctttcgtacgaagtgatcgcgaatttctaaccgaacacgtcaagaagctctgccaaacctatggcctaatttgggagccaaccgctgcagactccccatggcaagatggcgtcagtgagcgcggaatacagacggttttacaatatacaagggcaatgttatatgactccggattaccacgatggctatggccacaggctttacaaacagctgtctattacatgaaccggttacctacaagagttcccttgtacaatgatcgacggcctatggaccgaccagcgatccggaaatccagccatgtgcccattttacgccctattccgcctggaccaatggtgacgccgatattaagcatcttgtcaaatttgggtcacctgcttggatgcacctacatggagcttccaaatatgctgg

SEQ ID NO: 1289 - DNA, 1225 bp, Emericella nidulans
atatgacagctgccccagaaactgtcacttccaagcttacttttttgataaccggctgctcctccggcttagggctctctctaacccgtgtcgcccaagcggccggccacagagtcatcgcaaccagtcgtaacccctcacgaacacccgagctagtcgacgaaatcgaaaacgagggtggaaaatggatgcggctggacgtggacaatccggacagtggtaatgtaatcgacgagctcgaaaggagcggcgagcagatcgacgtcctggtcaacaacgccggttacgctatttacgcacccatcgagaccgcaactgaggaggaggtgagggcacagatggagaccatgtactttgggcccctgcgtctgattcgtgccgttctgccgtatatgcgccggcgaaaatctggtgttattgtcaacatcagcagcggagcttcgctggacgggattcccaccatgggtgtgtatgcaggggcgaaggctggcttggatggtatgcgcaatcaggcacaaataatgcactttttctgtgatctgtagctaatcgaatcttatacgaaagcctcaaccaggatcctggcgaaagaagtcgctcctttcaacgtccgcaccctcaccgttgttcttggaaccttcaacaccaacatgctcagctcggtagtgacgggcaagactccacttccggacgactacagtgcgacaatcaccgaacaagtccaggggctgctggcaagcgggaagatcaggcccaacggcgacaaggacagagcaatgaatgctttgtaccaggttattgtgggcaaggaatttggtaatggtcgcgagactgagaaactccttcctctggggagcgatatggctccgaggttcaagggagttcaggattatcttggacatgctctggaggtgtttggggcggtgacttgtagcgtggatgttgataaagagtagcttcacacgggcgcgtgcaccctgtccaagacagattctcgctatctcgacggtgcgttgattgtatgctactgtgacatgtatgttgtaaatgttatggcgagatcgacccgttgtatatatgagagcgtctgccggtgtacattagccgaatcctcaagacctgcagggtggctgataacatatctggcgctccccgatcataactaccctgaggatatgcttggatcctagtattctatagtgtcacctaaatcgtatgtgttatc

SEQ ID NO: 1290 - DNA, 1649 bp, Emericella nidulans
  unsure (1)..(1649): unsure at all n locations
ataacctcccaaggttgttgtgatttattgtatgttttattccctttagtacttcatttcgctttaagagttcagcattagcgagcatactttgcagttcgtcagtctagtataatcaccatgcagcaggctagcagaatacatgatcaagattttcaaccaataaatattaacagcctaaattgattcgggagggagtactatactacaagaagccctgaaagtaatatctatcacgaaacaaccccttgcctcctagccttccaccccgtaactaccctcttaacctccttcaacagccccagtaccagtgggaccccaatgggccccaatagcggcaaataaactgccaccttatgctcatccggaaagtacatctgaccaaccatactcttctcaaagaagctcctttcggcctccgcctccgcaacacgggcactagccaacgcagcctgaaactgtccattctgtaggctttcgcatgaagacgagagatgggaaagcgttgttgcgacagaggacgcgactgttgcggggatgggaatagacgggagtgactctgttagacgggcgagggagcccattgttgaggaggcggagaggaggactgttgcggcgcgaatgcggatgagggtctgaaggcggaaggggagggagggcggtgttgagggggtgccgagaaggctgaggagctggtgggagaaggtgaggaagggggcgcggagggcgtcacgggggaggtgcggtgggttggactgggctgagccgtcagttgttgagagagggggattgaggataaagacgccgccccattgagggatgatccagctagtagctttgctctcttggacgagcaatggagactgcgagggggcgggcacgtagaggatgaagtttattgttgggccacttccgatgctggggtttaacggccattcagcagcgttgataaaggcgctaaggttttcttccttaagagtccaaactccttgtgtctcgtcgtactcaggaacaggtgtcgtaggcgagaaagttgcgtaaagctggacttgggtgtctacagtgaaattgctgatgggggacaatgcctgaacaataggagagatgtatccctggacggcggattcgatatcccaagaggagggcgcaggccctggagtaaatagagagaacgcaaggtggtacgtctctgcatatttcatcgaccgtcttagccgcttcgtgatactctccgcgagctgtggggaaatctggtgcgccagactgtttggcgtagagacggcgtagttgccaattgcattattcgacaatatgtgtgacatgatcgctttctcctctgaaaataaatgctgcaattccgcggcgataaaagacgcgagaggcgagttgggtgaagaagggggtgggatttggctcggcggatagaagatatcaagcatagttgtgtctgtgcgaagctctgagcgagggcctgttaaatcaccctgcgcctgcagacgaaccgtcagcgccgtatcagcttctggggttgtctgctctgcctaatcttggccagctcaagcgtanatggccgcggtgaactcgttaaatcgctagggatgtgaggggaccggaagagctgctggcttcacgtctgtagagaggagtct

SEQ ID NO: 1291 - DNA, 5332 bp, Emericella nidulans
acacccatccattcttattaatcttcttcggcttcgcaccaatatttaccctagccgcaatacccagtttatgcactccatccctcttctcccaaacgccacttcgcccctccgcaacagcgataagctcattcgccacgcgatgtgccaatttcgcatcacgccgtttattgctcgcgtcgataatccacccaatagctgcgcggcggcgctgcttctctgccaatgcgagcgggatctgcattgtgttaccaccacccgcgatacccttggcgtggtgcagtttgatcaggggcgccacggagtcgacaatcaatgtcaggtatgcgatggggttgagtgggagttgggcgggggctgggccagggaggagggggcggcgagggttgatttggggaggtggagaggagcggaggatgtcgaggattatgttcatgttctatttattctcatttcatatattagcaattcatcagtctagtgcggcatggcatcggagcaaatgttaacggtgaatgtgaatataccttctgagcagtcgccagcttcccatctctcatcaagttcttcgtgaactgctccacgaccggctcataccgggaacggaagttctcagtgcgcggaatggactccggagccgggaatttcaggccaggcatcagcgcctgagtttcctcggtaacttgcgtgatcatgctctcgaggagcgcggtctggtcagcttcagacatggaaggaggagtagagttagtcgaggcgccttttcgttcttcgagctgactgcggccggtagatgtcgagaaggatcgcgagccggatggcttcttcatctggtcctggaagactttgggggcgtgtttttgggcttccttgtcgcgggagaggatctgacacgaaagaccattagcacaatgctaaccatctagcgatataagagtaaagaagtaactcgtgtatgtacctcggaaacaggcgttccctgctctaactccggacttgatggggtcccatcgcaccatttctccttgttcattatcttgtcgacctccgccgcctcttcgctaacgtgcggcattgacactgctttacgctgagcttcttctaagttcttcttgtctgaattccatctccgttgttcaccgaccgacaactgtaggctggaccggttgcatggtcggctgagggcggcgtaacgttgcgcggcgaatgcggtggtcgactggcggaggacagggacggccgtcctggttgtaagcaaattgagcccgggcggcattttggctgtgaattggtataccaatactgtaaaggtggttgaatcaacgttgagtaatgaggtctggactgatgtttccgtcggcgaacgtttttcctccggccctccacacgcttagtcagctagtttttacagtagcaaagtccgccaagacatcgtctcgtcaaggtgaaatcatctaatctgcagtatgaaaggtagaacgttccgtggtcaattatagagtgaccctatagcgtggcactacaatagggcaatgtcaaaactacatggatattcaaaaggtctagttcactttttatttttgcatcaacgcattgataagtcaaagagctatgaaaccgtaaagtaatcgccgtatatatggcagactaactgacccgcagtgcaaagctaagcagcccggcttgcattacgtatcgataataataggaaggaaattgaaagaatgtaagtagatctgaatatatcgagcagccagcagcatagtgtttctggcggttgagcaaagagacctggtatgcctgcggaaagagcagggttcgagaagtgccactatttcaaggcgtggaaaagcgcatcctcattcacgttgtctggatacacgtagaacgccagcgccaaaatcaagtacctataccagtcagcgaaatctttagaataatagaatagtacttacattcccaggcacaagcagccttcaagatagttcgacttgccgtcttggataaggaaggtgacaaccagccccgagatgaaaaatgccacggtttcaaaaatatggaaatgtagtgtcatctccacattcattatccagcccaaaatgacgagaaagggggtgacaaatagagcaatttggaggctgcttccgatggcgacaccaatagccagatccatcttgcccttgtaagcgaccacaacggccgtcacatgttccgcagcatttccgacaataggaatgaggacaagaccgatgaaagtgcggctcattcctgttttctctacgatgctgtcaatgctgccgactaaatagtcggcgcagatggcaaccaggatggtcacaacaatcaaagcagcgctggcggcccacgggttcagcagatgttcctcttcctcctcagcgacttgctcgcctgcagcttcaggatccccagtagtctggttgttaacttcctcaaacagttcggcgtgtgacttgagctgaaagtataggtaaatgacgtagagaacaaggaggatgatagcggtccagtgcgacaaaaagagaatgttctcagtcttgtggctggggtctttggcggatgacaatgaggcatagagagtcgcagggatgatcagtgaggcggacgaaacggtcatcaaagacgacatagtcgaagccactgtagtgttaaacgattgctcgggaaatttgataccgccaaccacgaaacagcaacccaggacgagaaggatgttggacagaatgcttccaagcatcctagcttgaacaacgcggatctgcttgtctttcagagcaataatgctaacctgttgaccggaccgttagttcatcacacaagagcctgtgccggatgaagcgaaaagatgcatacaatcagctcaacggcgtttccaaacgtcgcgttcatgagcccacccaaagcctgacccagagtggccgccaattcctccgtcgcaaaactcagcagcgaagcaagtggaacaattgccaaaaagttcagggtgaatatcacagtactgtcccatttcaacgcacccgcgataatacccagcggcacaaagacaagcaaaacattgacatagtctcgcgataaagtcgcccaggtcaggtgccagacatgagccggccaacccgtccaatgcacctcgcgcttatgctgggccgagttgcggcgagagtcgccgagcaatgcatcttgttcgctagactcccgtcgaaagccattgctatttgtggtgtttgacatttttcttggaggaccccagctgccgtgtcttcggaaactagagtagatacttgttgatgctgtccgatcgcgtaggcgttagctatggcggccttagggggatgttttcgaaaagtaaaaccagctgaggctgatagcattaaaaattgattaaataaacaaaaaagagaggacagaagacggaagatccgcgtcaggtcaaaggagggtgttgatccagaaacactgaaggaaacctgctagcagtgtggatcctggcaagacaaaacaaaagcagagaagatatgaaagtcggctgaggaaagaagggaatcgaagccagatcacaagctcgagaccaaaatggatgctcagtgatgtgggagagcagaagaaagctgtgaggacggaatgctgggagtgagcaacctacacattattgggaagtgacgagcccgagccggaccagactttcgccaaagcgccagtataagtaaagaccgtcgttagtagttcttggacgctaaggtcggaataaattgattgcttggtagcacaaaatttaattgaaatcagggtcttccggtggatgaagagtgtagcggcgccgtggttgggatgcgatgtggctggacgattgactgacgattgacctcattccgatatttgctgctgccattggctgaactctgccaagtcaggacgagctagttttgcacagcctcgttgagttgatgatcgttgaaggtcaaattcgaacaccggcttgaaattgagacgagcgaacactatacccctcacagatgcagcactgccacattgacgttcatcgtcgtatttgtgacctttctaggctgtggattgtccagcccccaaagctaaatggaaaaaatgctcaaaccaagcactgacaacacatgcgataatcgataccagggctcatgagagcggcacacttggctgcttgcgggctagcgtcctcttgatactgtacttagtcccactgactcgcactaactctgacaacagcaactggacagctgtatcccaaaggtgattttcgaaagcctgaccaaaaagatactcacatgatgtttttttttactttactttttacaactactgtcaaaccttgacaactctacagagtaaacgcctcgaggtatatgtgatgaaatcccgcaaaagtgcggacgcgcaagccacagcattccatgacgtcagcttcgcaccgcccgcaatgtccgttattctacctagtttacaaatattccaagattctacaagtatgcttaggtgagacacttgtactagtacaagagctagtaataagacaacaaaaggatcaaggcatatcttagcgaatgtattctatggataatgtaagatcgcagaaatccagggttactggaataaatattaaagaaagaccaaaacactcaagcccactatcatgatacgtaacatggagctagaagagcgaaatcatctcaaggatagtgaaggtgcataaccttggctgacccgaacgaagcctatgcagccgacccaccaccaagtcctacgtccgttagtgttgaaaaattctgagcacaaagacgaaacttacctgcagcgaatgcaaggtaccacgtccgcgatgctccgccgtcaatccagctgtagtcaaagttactctgcgagaagaaccgccaagatgcggctggatcgataagagccaggtttgcgtagaggatacccttccatccgcctgtaactccatcggcaggcgcggctgcattggatgcgaagatggcgttccattcctcgcgcacgaacctctgactgcggatgtatggggacataggcaggaggggaagcatgtggattctagatagatcaattgtcagtgtgcggtatagaggaacggagaaaaggcctacccttgaatgtattcgaggttgctgccgaaataggtggtgtggtcgactttgttctcgaataactgcaaaggatcagattcgctgcgttcaaatcaaaagagtgtgcctgaacttacgatccctgtgaccttgttgccaataaagttggcaggatggttggcattgtcgctctccatgaggaaata

SEQ ID NO: 1292 - DNA, 2982 bp, Emericella nidulans
  unsure (1)..(2982): unsure at all n locations
atgccctgcagatctcaatctcaaaacattctatacaaacgtgctctatcagcaaattccagcatcgcagtcaaggttgactccccatgatgatgatagtgaggtgggcagccagggttgaacccttaggcccgcataaccaactaattgggcatcaatgttcaaccgagctgcgtgccgtactcacctctaacaccccaggtgtaggacttctagttttaggcgaaaataagactggactttccgtctgagctgtctcatgtcgtttgcaacagttcgtctacgcactgtatctataacgaggcaacttataatcctgtctttcttgtgctgatgctattcagttgccgccctctctgctacttgtccgtcgcttacaggctgcacttgttagtgcattctgttagtcagagcaacctagtctaggcgagacgggttggggctttaactgagatagctagttctgctttcgccatttcttcttagttcgatgagaaagagagctcagttaggtatcgtaccatacgttgttctggaatggccgcagcttgatcgggcagagccggagtcataggtgcagacctgaggaattctgcttgctttactgtcgacgtatattgtcatagatgccgtggatgcctagggggtgcagcggtgtttgctagaaagacagctgtaccctgacgcagatgctaaaactggtacaaaggggatatttctaaggcgctgggctgacaaaacagactcttctttaattctggttgcctccatgcctcgtctcgctctcgtcgcctcacttcgtgtagggcgcgttcggaattcggtatagtcatgggggtcagttttgacactgatacctatcgagtcgcctctctcctcgtttctccggacaacagccacctgaagatttgaattgttctcaggggaagcagtgttcttggatcactcttgagttgggtaagcagtggaatatattgatccattctctttgtctgagtatatatgagggccgataaataacagcgcagccatcctttttaatatgtgcgctcttacgtctttgatactaaccaatctaccatatatgtcttgcaaagctcgctggnatgctaattcttgtcgcttactcaaacaggacacgcaggtaaaggaagcgtgcgcttcttttctcggacggacttcctggttgacaggcgtaatgaggaatatctcgcctggtccacggctcttagtgaacggaaacatggattaaagccggcttcaatactcttgcctcgtttaatgccttcccatgtacccgtcaagatacgccctcttacgccgggctgacatggaatgagtcgaggcgtatgtcatcacctactggaggcgcgcaaacgaacctagaacgctcctagaatcagagcaaaatagtaaccggcataagctcttcctgctatgattgcagctgtacattgagacgaaaggatctggctgaccgtgggcgcgacgtctgcttagacattccttccccgaacctatctaacgaatatcggcgccggatgcgtgaaaataacgtggaggtttggtttgatcactacctggttctggccgatttatttccacaatatgtagcattggactcgaccagttgggtcctgccttgctgcgattgatactctcctcaaacttcaaaggacagacaataagttcatcaaaatccagagactagcaccgtcgatggaaggcatatactactcgcgggatgccaattcgatgtctagtatggtctgccaatatgtggcaatttcagctctgacattggagtacaagtgcacgatcaactagccgattggtgctcacctctgtccgacaatggggaatggaaaaagggcgtcaagcagaaggtaaacgacagaaacgtaaactactctttgtgcagtgctctaaagagtcacatctacagctcaaatcctgttctatgaggcggtccagcttgaaaactggcatacattcggatcataatatgagaaaatagctcaacggcgaagttgtcaacacgaatatagcaccacataacttagtcgaaggtatggtaggcaatatattgcatcttgcttcgacaagtggaggagttacaatgtaaggagtggtgtccttcaatgtatgagctccactgtcgaagttagcgtacagacaggctggaaaatctcagtgatacgtgataaggtcattcttgagtacttagacaaccgaaaccgcaagcctttggactctcagatccagtgatatcaacaaaaatactgttggcataaagaggtctgaatattggaatgcagaacgtacggagtatatgcctaggtagactagatatgtgtagcccgcccgtgatgattatgtaatatataaaggatatctcaggtggcctcccggtgcctggggtaggagggtccgcggtcctcgagtctattcaatcgtacagattctctctcttactgtccctccaatcggacctttacgaacaccgcagtattcgccctcgtcgcgcgactgcttacatcgtaatctgtgtgcttgatccgcttgcgaatttatttcggacgcgccaactcctgtcaacactcggtaccactacatgacgtctgtgttgaacccagctacgcgccgtcgaaaagccccggtccctttacaaaagaagcaaatactgtaagacgggagaggtgcaggggtctgggaaaaattcagctgcgatacgctgaaggcggcgcttttgcggcgtgcgcaatttgttgtccgctccaactgtccgcccctggctatcagcgcccagaaaccgaagcgagccacgacccgggtgtatgggctataggccaaaatggcgccaggaggtggtggaaacattaaggtggtggtgagagtgcggccgttcaacagccgaggtgagtaaaggacagcctgctgtgtttacctaccaccaggggcgttaagagactgatgaatgcc

SEQ ID NO: 1293 - DNA, 3073 bp, Emericella nidulans
tctgttctgccagctcccccaaccatgccgtcggcactgggtttactgatcgtgcgcaaggaaggcttccctcgagttccgacactagcttgtcgaaccaaagatacttcagcatgttcgggcgactcaagcgcaccttcagaattgttgtccatatatgcacctaatacttcagattcctgctgttcagagttccaactagatgcggtgagtctggtgtatggcttattcagtatggtcgggctatcgggcaactcttcgggtatcggcgagacggaggatctgcggttcatacctgaacgcataggagcagtaggagcgagactggctgcattgttctgggaagggagcggcggtggaaagtcggggatagaggggatagagcccagggatgacgctgcagacttcctaaacgggtcttctttggtagaaggcacaggctctcgcagtgcggggtggatgtgttgttggttaacaaacggctgagagaatgatggggcgcgattacgattgttgagatgcaaagggctaggaacagcgtctggaacgcttctctccgaatacacagaaggtgatggcggatcttgtcgaggtgggcgtggaggtggaggtgctctgggcgccataagtcttcctggtgaatcacccaagtttgggccccggtcccttgaatcaacgacgtttacccccggaccatcatcacccagcagcggccaagcagtctgctgggacatacgcgggcccggtggtagggcggcgttttcctggggagctcgaatcctgggacgtttaccaacttctagcatttccctggcgcggcggacagatcccttcctttccgcgggcctaggctcggaccaaccgtgctttgaagttgaatccattgttgtagagcggcgacttgattttgacgaaaagatgtcgaccctataggcgtgtatacttcctgtcggcgatgcaccttgaaagtttggtccggggtatcaagcagacgcttagaaatgatagtaaatgaatggggaaataaatggttgggccgaaagtcaagcctgccaacaaaaattggtggaggtgctgaaaagttgaatgatagtattgaaaatacttgaaagctagaagtcctggcttgaaagaacgtgtgtgatgcgataatagaaacggcactcaatgcctgtatctgagggttatcttgggtcaacgcgactgcgcagttcatcaaagccatatagtggtaggaagcttttgcgtaccacaagggtgtttttttaagaaaaggaatgtcagaacctcatcacagtcaacagtccccgcgtctcaagtccagtaggctgtcgaagcaagaatgcctggaggagttgttagccccagatggccaggataggtcaagcttcttactcacagcttcatccagcagaagcagattcaggagaagagagcctctggctcctgcctgaagaacagaaagagagaatgagaatagcgacgacgaggttccggaacgagggagtctctggacgaaggtacctcacgccgggtgggtaatgaaaggaaggaagggttctcccactaccaaagaccctcacacggccaaaccaagcctcagaggttgatactggccgatgccatcattcggtacaggatataacatggatcaaaagttcgcagtctaaccgggactgtcatgactagaaacagtcagtggggaccatcccgacgcaggaactagcgcaagagctgtcacgagggatcactaacctagataaaccctgtcgccagagagctgccagtcctcagtcaagcgggtacatgaaatcctcgcagtgtgcacagaagagtgatgtatgcagattgcatgaaatccagcatcttcaagctcatggcgacacgctggattctctcatcccaagccggagccttccatgcctctgtcttacataaacacaacttgtttcatcgttgcagcccgatgtcatggaaggtgtaagcgaggtcggaagattggccagacgttgtgacccaagaactagagcgattcaaagtgcggaagatagacgagagcgattgccagcgctgaggctattggttgggtggagctggctaagacgacggcacgtctcagatttgatcggaggagccactattatagagtactccgtgctgttgaaggtcgcaacacccacttaaaaccaggggcactgttgactcgccccgaggcagagtgggacgggatcagtctattcgtcagccatgatggtgttgagagcctgaagtgggtgatacaaagcagccagcccgttctacatcgtattcgtctgtcagaaccccaatcggaaagtttgagatcaagcctgagggcttgacaaaagatttttgagaatcgctactccatttcaaggctggtcgtttcgtgatcaagcaggactcaagaggctggaggctgggggctggttagacagactagcttcgtttcctcactgactccgtcctttaatctaccgaatatattattttgagacaccccggttgcgggcatctttccgtaaatagtcctcaatatccattggagaaaaattgcatgatgctgacatcttgaaaataaggaagattcactgttgaaattgttgaagtcgatgtttgttctgctttgaccattgagaccacttgtaaatgaggaaagaacttcacgcgactgtcaaagtttcaggccttgacaaagttgagtaccgacctaaacttatgatgaagcatcgatattacgaagtaggtactgtagtgtgctccccctagacttacaggtggtgtattccatgttccgtaccccgtgcggcgcctgatcgtctcctaagtaaagctcatcatccagaggctgtacatgataccagcgacagctgcttacaaggtgtggtcattcaggatggtcgagaagctcctgttattctcgtcccattctcctccgcagctcagtaatctccttctctgcagcctgcatctcgaccacgatacctgctagttcaggcagactgccttcaactgcttcagtgaaagacttctgaggactcgaagttaggaggaa

SEQ ID NO: 1294 - DNA, 1827 bp, Emericella nidulans
aatactagaaggggagatagtataaaaagtaatatataaagtttactaagaatcttatctaggttatatagctttatttttatagtagtaaagctgctctaaatattctttttattaaaaatattttaatatatacaggaataggcctctaaaaagtcaaacttattaatataatatttgccaaggcatgatcttaatttaataagacctctatatatatactttagcagaccaaaatagctaatatttagtagttatagtagataagataaactagcagatatataaagagatattatattattatttttacagagcttgttaaattaaaatattagatagcttctatagctgtctaagataagtaattaatattagctaattatataaggagtactagtaggaataaagtaattttaaagctagcaaaggcctatcttgtctattatttatttattattacttaacttaatcctctaattacctggtaagctatattctatatactatttttttataaagacccttcctttaaaaataatagtagagaaaactgaccatcctatagtattaatatatttaattatagttacctatttatagtttcttagctaaattagataaggattacttagtatcttactcctagcaagtactttagcagttactataagccctatagtaaagctagtcttattaaaattatagatatttactagtaaaatctccttcttgctgcagatctctcttagattataaaactactttttaataatcctaggattcttatatttagcttgctgataattatagcaccttgcaaagcaagattttagttctagataatactatttaaagttagtaacctagtttctactaactagttctagggggggtattagatttagtttggaggattatattagctattttctctatatatacaagccttgggggacagctatgcttattcctagatactatttattatactaagtaatcctcctaagttttagatagccttgagttgtagttacaggcttcttgcctgaatttatagctattaagttaatctcagagtatactttgtaggatattaaaaactgccactgcttgacactgagacataattttgctattttttaatatatttattacaagttagagtctgccttcttgcttaactcattcttaacatgatcagagctgatttcgtggcatggtagatgatcaaagtaagaggtttggaatacagggagattttgggtggggtggatggatgactgtaggtggacagctgacttgataattatgttattagtaatttattatagaatatactatataaaggttcccagggaaccttaagttcttttctatctagactgctaagaagtttaatctaataatctaccttttctttatatagtaataactagttagccttactataattaaagatatataagaatttaaaataatatagggggtagccttatttagggattagtatagtttttattttacagtatttttttaatattttttagatttatagtaaatatttatatataacaccgttcctcttacgatcttatctaggcgatgatagcagtagcatatataataaattattactaagagtaatttcttacgtattttaatataatagcgattaataaattgcaggtaagatctgctaggatttatattaacttattaatacgatatttatcacacacttagcattatatctatactaccccctcgctatagggtaatataaggctatatagctggcgagtagtagcgattaatattaataga

SEQ ID NO: 1295 - DNA, 1065 bp, Emericella nidulans
cttaggataccgtccccctcttcggcttggacaatctattagcatgcctcatatttttttctttccgattgtgtggccggcctatgtgggttagagctttgagactagcaaggtctgcgatgaagctgctcggaatcccgatgcaatatggctgttctagtttatgaaattccgaagaatagctgtgagatgagcatgacgtcggtgactcggtgtctaatcttagcggcatccagtgctctgctccaaaacttcatccccccgtaactctcatctcgatatcccagatcctaacagatattcaacccagcccgaataagatgccattcgtctcaatcaataaccatcaactacattacgccgactcccatccaaacggagctcccgccaacggccttaccttcttttttatccatggcctaggctcatcgcaaaactattactttccgctcctcccgcacttgacccctcagcatcgctgcatcactgccgatacctatggctccggtcgctctacatacacaggccagtctgtctctatcgcatccatagccgatgatgtgatcggggtactagatgcgctgaacattccacaagctgttgtggtcggtcactctatgggtgggctagttgtcacgcttctgggatctgaacatgcagatcgcgtgaagggtattgtagcgattgggccaactcacccttccgagactctaacatcggtgatgcgaaagcgcagtgcaaccgcggccgagggcaagtcatctacaatcgagctgagaataattgctaatgttaccaggtggcatggagtctctagcgaacagcattccctaccaagctactggctcggcagcttccccgctcgctagctccttcatccgggaactcgtccttggacagaatccgaaaggttatgcggctctatgtcaggccatcgccaacgctcctactattgactactcggctatcaatataaccgttctattaattgcggggggacgaagataagtcggctagtctggaaggggtgtcagtatatttttgatcgcgtgtcaagtgcgaaca

SEQ ID NO: 1296 - DNA, 2011 bp, Emericella nidulans
ccatgattagcagtgtgtcgagattgtcgactagggtcgctccccatccgccaaagttgtttcgagatccggccgtgatgggccgtacctcgtccgccttccaggcgtgggttgtgtaggaggtccatgcgcgctgaaaggcacctttgactgctgcctggcgggatttagtgattgaggattgaagtgggaaggaagagcgttggatgcgcggaagtgttgcaggagagttggttgacagcgggatgaagtcggatacagggtatctgactgggatttcaccccagttgaaccctcccgtgctggttcggttatatggaggctgagggggtgttgatggacatatgctttgctgcctagcaaagccgttggcagggccgtttgtagccctattggcggcgcgtggtgtgtctgtattcctatgaaggaggaagaagaggaccaagaagatggctgtgatgctgatgagggaggaccaccgtctcggcatcttcctccgtctgcctttatgcagcagacatcgatgctatccttgatctaaagagggcgcaaaggttgggctcatggaaagattttaagttctgtaaaagaccctggccctgccacggcccatataagctgaaagtgggttcatgcagtgagacactgcctaaagtgcgtcactaacatcgaataattgtggcgttgggctgggctggttgctgtgattggtgtgctggggcgtaatggatggcctaaccagggtttgctccactgccgagctcctgtttcagtggaattagctaacagccggatctacgcggaatgcctagccgatgacttattgtgcctatttcaggggagatagtacaatacaggcacgtctcatttaataaactagcctcgacactgaatggcccttgggcgtgtccaccgtacctcgccgccaggggacccaagctatgccatggagtacagacaggcaagcgtctacttgaaccagtatccattcaacccttccaccgtcctgacaccgacattatgatgccgattttcctcccagacctggcctccttcgccgtactggttactgagatgacctaaaaagaactcaaggttctccgtacactgcgggaactgccccttgaagaaatcaaacagttcctgcacggaagccttctttggtgcatgcgtgaccttttcagagaataaatccaggtatcgctgcgtatgcgcgaggtcttcttgcgcgtccaactcccacccggtctccatgtgaccggggatcagcttggtcggttgcagtgcggcgattagacggagggtcttgttccatgcctccaacagcgctggggtttcgacttcttcgaccctgtggctgttagctttgcagaaaagaaagagaatagaaaggaaacgaatatagagaggggggcgtagagaggatgaatgtaccaaacatgagtgctccgtccgtagacggcgtccccggtgattatcgtcttctcgctcggtagccagaacagcgtatggtcaacactgtcgccctgcagcgggcctagcaatacaacgggactagcggggtctccgttcagaacgaagaagctgaaatcgaacgcctcaggccgtcgcggtgcgacatggacattctccgctccgaacactgacggccagtacttcactttatcctcgtactccctgtttatcccggccaggacatacggggcagcgtagaactttgcttccgggaaggcctcaaagatcgagtttgcggagaagaagtggtcagggtggtgatgcgtgacaaagacggccttcagcggtttagagctggttttcttaatccaggatgttacggcttctccatcaggcttgagaaatggaggatcgatgaggactgcttcctcagtgccgacgataagcgtcgtgatgctagagaggcctttggtagacgaggagaggtggtacgttgtgaggggcatgctggctcgacttgtagtttgagaatacggatgtagacctaaaaatggat

SEQ ID NO: 1297 - DNA, 1343 bp, Emericella nidulans
cattctaggcccagaagttattttgcttttgaatggcattgcgacgatctcctggttgagatcatgactcgtgaagagattagtgcacggcaaaactgccgaacatagtcaagcggggcccggccatcgagattctgactcgggagatgcatcatccagatcctcgtgaaccatcaatcgagctccaggctgggcagtggggggcgggctccgccctccactgctctgctgcacgagatgccatggctctgaaagacttctgctcgcctgcccctagacctgggcctctcttcccatatccatggcaggctcgctagtccttgctccgtggcatgaaacagatgcccacgatcgtcgcggtcctcttgaacggactccctgctgatcagagagcacctccgtataaggtcgtccgtcctaccctctggtttcccagctactctggttctcttcccgcccggtcaagatgtacgagacgctgcccctggttgggcacagtctggcaatcttcgtagtggcggcggtgatggtcggtttctccatcgtcgccgtcttcctgcgctgttttgtccgggtctacctcgtacgcgcattcggctgggacgacgcattgatgttgacggcgctggtatgttggtatgcagctaaaggcacggctggctgaccgaggtaggcgctatttatcgcactgtgcgctctgtgcatgctcgcacctgctgcgggcgtgggccataaggtctccgacttcatgagtctggatcagctgcagagggcgttgaaggtatgtacctctcatttttctctctgcccacgaactctcgacgatagtggccgagatagtcggctaaacgctctttgtgttgtcgtatagttatggtggctgggccagatgctctatctgtgggcatccgccgttgcgaagatcgccatcgccctggccctgctccgactcgccgttcgccgtctgcatcgattcatcctctggacaatctgcgccgtcgtcgttgtcatagggctggtgttctggctcgtcctgttgtttgactgctggccagtcgagtatttctgggaacagacagatatccgcaagcagggcaaatgcatatccacagaaatcctgctcataattgcatactgctatagctcgctgacgatcgtctgtgacattatgctcggcattctgccagcgtgtctgatctggagtctgcagatgagccggcggacaaagcttgcattggtgggagttcttagcttgggcgcaatgtacgttgaatgtgtggcagtctttcttctgtaggctaacgtgaacaagcgcgagtgtcgccgtcgtcatcagattgccc

SEQ ID NO: 1298 - DNA, 1281 bp, Emericella nidulans
acggatatgcatatcgacgcgtccagggcggatcaacgcgggatcaagatcctggggtgcattggtcgtcatgatgagaatgcgaccttcttgcgaggacacgccatcaatggcgtttaacagagccgagagcgagatcggtgtaggcggggatgtagggactggagcgcctggtctcgcccgcttcttcataacgtcaaaagatgccgttgtatctgctgtgactggttcctcatttgccctctttagggtcatgccggctgcgtcgatgtcctctaggagcactacacactgcgtcgggacctcagagaacagacgtaggaaatgcgactcggaaatgtttggatccaggagactaagaacatagatatcgagtccaaaaacgccggcaagtgcagaagacagactcgtcttccccgttcctggcggtcctgaaaacagataacccctgacggtaagggataccatggtttgcgtaccactggcgagtatcttcacgtaaatactcgcgcatatcgtccagtactgccttcttcttgcaactgtccaagatcacggtcgaaatcgctcgggaaggtctggtagtgatcctgttccaccggacaagatcccgcacattagacatcgcgcggtagacgctaatctgcgacttggcgagtttcttgctgtacgcattcgcctcctctatcagagcgcggagcggatcaagagagaggctcagtgtctgcagcttgaggtgtatgcgttcctcggctccatcctgcaaagtggtgattgtccgactcggcgccgagtggctgaatagcacccatctccctctgaaggtgaatatacgggaaccgttaaacggcttgagttcgaaagtgcttttcccgagtacttgcggcgggctggcgtcggcggggttcattgggcctgcgatggctgagatcaggccctgacgttttccagggcgatgatgattatcggtgactgcaagaacgcagcagaagttgcgatctttgaagatatgatcgttcatccattggattacatcgttgtaaagagggtcatgttcgttaatgtacactgtcgctatgcatgtgtcggcgtatcggttgaccaggttccagacggagcgaagccatgtcgccagaccggcgagtgcgatgccgatgttgattataaagaaggtttctagaccaaaaacattgtgtatatgctccattgtgtgtgttatgaagagctcaatttttttttttttttattttggtgtggcggacgaactcctgtgagggatga

SEQ ID NO: 1299 - DNA, 7647 bp, Emericella nidulans
tgacttacggcttgacgacataaaattcgaggatactgattgttacaaggctgtttttcagcaggagttcctcccattggttagcgaattcttagacgactgtattgcactgtactccgtaactagcggacatctgctgatgaggaagactagacgctctcggggtaaatttgggagaagtgtactgttattctggaataaaatgtggacatctaaccatgtatgtatctggattgtggctgtggacttaaagcatcatgcatcaccctcagtaggatggcagttcttctacggtgttatcccgtcacaactccattcccgcatgccattcagatcaagtccctcaaagtcgtatcttgcatcagggtatagatatattctcagtttactctgtgggaatgaacacagtcacctcttcctccgacgataatccacgtgttcgtaccaaatccatgcaaccacctttcgaccccctgacaagtagaccattccaatcaattcaggtagggaacatgaagctaaaccaccaaatcgtgttcccatcccgaactcggagccgcaatgacgatgaccacaaccctcccccttgatggtgaaatactacgccgatcgagcttccacccccggaacacatatgactctgccaactgcagaggcctccatgttggttctgtctatctggctcactggattactcatggcatagtactctcactcacgtagtgaagacctacgttacagacaatctatagctccgctactccgaaacggcacacaacatataagcttctttctcgccttgggaattgacccacctaaagacagacatctacttcctcatccaccccgttcttcagactatatgtacaccatgcctgcgacctcaaaagccagcaacgcggccccgtctttccctctcgctggtgccagtcaagacgggtggtccaacgaggagagagcaacagcgacctgcttctgcggtgcggtccagctgagtttcgtaagcgcagaacccatccctctcatgaatatatatatacacgcaattctcatcgtcaccaatcacaaaacattaatatctgtgtctacccagccaaccacacgccctggcctaattaacaccttcgtctgccactgcaccgactgccgcaaaatcaccgcctcaatgttcgccactaacttcaccatctccgacaagtatctcacccacgagcgcggacagaaccgcctcacaagctattcccaatcaaagaccattgcaacagggaaaaccatgacaaattatttctgttcgacgtgcgggtccctcatgtaccggcgcagctcgcgtttcccaggactgagtatcctgcgtaccggcactgtggatgattttagtctgcatgaggggaggctgaagccgagggttgaacagtttgttaaggatcgcgtttgctgggtacatgctgtggatggggtgacgcaggttgaggctgggattggcactgcgactgtgggggctgcttctttgtaggtaggtgaagatttgtctggaaagtctatggaatctatggagtagttataaggcattcaacttgtatcataggtggttatcgcccttctgaactgaatcaagtagagacgtagcataaggtcgtttaaatgtattatgctggatgcctttaaggtgcatcatcgaatcgagcgtggggggatgctgcagtgatagatgctacatactctacaagaccattaagattaccattagtgcgaccccggggcaccaagcagtcaataagctggcatcaaaactgaaacctatttctggtggccgacaacgcagaacccgtcaatcatcacagtatgcatatcaggagtggcggaatttgtgcatagtaatatatggccttcatctagcccaagttgtaccgtgtatatccattcaacggctcctcgtcataaaatgggtaggtatggcaaccttctctttgtcctagaaccctgccggatactccagccatttactgttaaccagactcacatatgcagccctcctaaaatgcgtttggaaagggtcattagccgccgaaacacttgggaacaggtacagagcctcctcttcaactattatgcgaggtttataacgagatattcgactcttcgaggccgtgacaacccactgcttatgacgataccgaatggctgatgttgtcgcgctgttaaaggtttgacctgcagaacaacagctgcttataacttaagcaaataagcctgttatactgcttcagtgtgtcatgacgcagaaattcgggggtgggagggattctgtctggaggatcatgtaaggacagcctgaggggcatcagtcctcataaaatcccataagacatctaccttgcgccaaagcaatagtccaaatttgtctccggccagagcttgtctatagaattccaaaaatcaatatcgcccaccaggtccagcaattctaattccgatcggcccctgctcccattttcgtcttcagtaaggggagcccaaaagccgctggaggaatgcccttggtccctaggcagaccggacagatcctcccaaagagtctcttcagaataattctcatactcattctgatcccgattcaaatcctgtccgtgctccaaattttcaactttacgaagaagacatcgtattatcttcatcgcattcgccgcgacaggcatcctcgcgccgaaattctcaaacactgcgactgctagggccaatgcgctctttatatcgcaggcaaccgatgagaatggggataccattatcgccccaattaatgtcattgctgcattccattggaaatagaaggcttcgtgccatccatctagaatggaagtttcctggagcacttgatgggttatttttgtcaaggagacggcgtgtgcgacgcatcgcagtgttagctcttcaattagacttcctggacacgggcagtacttgaatgagatcagtggtcggtataaatggatgcagaggtggtggtaggagagttcgaggagcactcgctgtcgctgcagccacgggggagcgaattgctcaagggtgaagagcgcggagcctggatctgtcgaaaaaggcatgctgtttccctgacggagtagtcttagtgcgtttggcacattattgcaccaggtctggaggcttggggcaaactgggctaagacgcctgcgccctcatgcagtgcacgggggtcatcccagatggtctggccatcctgtagatggaaatccttgtcatatacagcgttgtgggcagctcgaatggtcatgtagagctttgtctgttggagattaaagctaatcgatgtagtatccttgtcaatggggttaaagggtgagccactcccacccattgtcgcagcctcgaaggtatcgcttgcaagggcgggcatggcatgggtattattgaggttgaatggacggccgagcttcatccctgttttgctatccatcacgtatacagcccaccacaggcgccgccgcaactcctgttctggccctggcatgctggacggagggtccacgtgaagaccgagggtgtaagctgtgcgcacagcgttactcacagcaatgtccaacatattatggaaagatctgccgcagagatatactgcacagagcaggtggcattgtagcgtggataaagaagggctttcgagttcgtaggtaagcaaggtctgtccacgccagtagtaccatcgtccggctacgagggcgcttttgtcgtctacaagaaaactctgggattccagcggtaaggtagagatgtggtactgcatgcacattgcaacgatgatatccacaagaggggagtctctgcgctctctgcccccggcaatccatagactctgataatgtctcttgaactgtgcctcgtctagtatcgggaagagcgagacgtggtaagtctgccagaaatagctgatgaaataatcttcttgtataggcgtcaagtagactgatttgggcggatgttccgaggccgatgggcaaagccgacgggccatgctctccttgggatctgcagatggtctatcaagaagcttattgtcactcgcagatatgggtatcagctgatccaccgaatgttcttgatgtagtgtgagactcaaaaacgcactcaggcgctgggcgtaagagtacaatgacgatggtcccagccaaatcggtcgactgctagtagaacgagcagggctaaactgtacaccaccccaatacccaagctgtttcggatactcatgattggtttggactctggcagtgctcgatatcgacgacgttggcgttgtcagctccgcctgatgagataaatctccggagcggctctcaagctctgcctccagctgtatgactttccgtcttaacgctgcaatctcttgatgagcctgggagagagtgaaagaggttgatgcatcgctattgctgcaatcattaccgctcatggtacagtttgaacatggaattctattgtcacatttgatgtggcggatgcggcagccaccacacgccctggccacttgcgctcgcttgcgtcgacgctgcggccattgctggctgccggggcggttcagccctgcgaaaacagagttggactccattgcacatagcagtcatatcttggattcctttattaagaaatggatgtagagaaggtctcatcaaagtcggagagctggcggggcaggcgtattaataatccattgctagtgttttcttgctagtgcttacccttgatagtgaaatttgggagcctcaggaaaagtactatggaacctccagaagagctctcaagagctatgaacccttccctagaagattcgataatagctgaactgtcagggttagctgcttttatagaaagacttcgtcgtgaccttgttgctgcgttggaattatataaccccacaggtatatttaggaccataggatacccccggtctgggggacactcaaggttcagtcctgtattgcttaactatttgtcctctattattggctttatatgatcttagtatcctatctggtggaaaggctgacctaccctgacaaggtatttcattgacagagcataagacgtcttagctacacgggcagtcagcatcaggagaatcacagtacaggataaagcttgggctggcccgggacctagcttatcctaggcactagtgcttatggtgtagcgagaagataccgtggcgacagcttagacaaaggcatggaataagacaccaaaaaagaagatacagggctagatatagaggattatagggtatatctgggaggttgtacacataatagggacaacaagtaaaatgagggctgtaagaagtcctaatgatcaaagctggaagggcagacgaatctagggctagcttctcgtgtgaagacctatctccagagcctgggaagggcttctaaatagcttcgttctgcttggtctaggattctgttatattctcctatctttcctttggagtatgacaacagctgtcgctaaacatgggttaccgtagcaattccttccaacaagctggtacagtggcagtactagcgtcaatactagcccggtgacgggtttggttcacacctccccaattggttgggcattggccgggtagctaattttgtccaggctgttaatatctgatgggccatgtccgccgtgacaaagacttatctctcgccaattatatagaaaatacagcctcaagtcttattcacaggaaatagacaatggctaacgagttgtagacctgggtcttgatagcgcgatagattggaaatcatagatggtaagtcggcgagttgcgggtagagagcaaataggataaaggatgatcaccagaatatcgatgcaggtatgaacgaggaacttgagggcagacttacgcgtaggctgcttacgctgatctgcatgcattgcagcctttaggtaggtctgcagaacccagcaggtaatcatggtcgtggctgggttaaattgaaaagaaataagcgaggtaataggggccagaagggcacgacgtcgaaccaaaatttctgggcaagcaagatcaaaaggttagaaaagggtgtctcagtacaccgtaccagaaattaccagcattttccagtaagaggttatctaggggttcgccctcgatctatggaatagcctccggattctccttaaaccacctaacccccctctcaataccttcctgcatgccgaccctaggctgataccccagcacccttcgcgctttctcgcaattcagcgttctctccaacgtactaaatcgaatgccctcgcgcgttgaattcgccacctttgaccccccactaagcagccaaaccaaccattcactcacgaacccaatcaacaacccgacccacttcggaatgaccacaatatctttttcctgaatgggaaaacctaactgtttcgagatctctcgctggaaatcccaaaacagccacggctcaccgttcgtgatgttgaacacttccccttcaacacgacggtccgcagggagaggcggattggcatgagcgtcaatcaacgcatgcgccgcaaggagatgcgcatctgcaaggttgccgacgtacacgaaatcgtacgcgttcttgccatatcccatctggaaccgggagcggccggcacgtgcaacagcaaccatttttcccatggaattcgtgtcccgttcgccgaaggcaagacacgggcgaagcgcgcaggtgagaaagccgtgctggcggttggcggcttggatggcttcttctgcgtctgctttggcgaggcaatagaggcgtttctgcaccgggggtcgcaggatcggcatgtcctccgtgccattgaccaggtcggtgtggttgtcattgatgacgcccgacgtagacgtatttataagggctttgacggtgccgatcgacgcggcgctgttcaggaggtggtgggttcctgtgacaataacgtcgtggtaggcggattcgggggcctccgagaactcgggggatgcggtatggaagattgtcacggggcgagcaagctccataatgcgtgagacgtctgcaagcgaagagagatcgccctggtggtaggtgacagagtcggaggcgtgaatgttgcgggtggtgttgatgtcaatacagtggatggtgcagttggggtcttcggccaggagtttagcaataatgtgataggcgatgaagccattaccaccagttatgaggacagggctgagactagatggagacatagtgttttgttggattagctgatttttgatgaggccagacacgcgttttgagaaataaagaagacaaggaagctggaccaagttaagcggggagctaattgtttttatatctttaggtaacccaagcaaacaccctaagcggcttggcgggtgacctagaggctaagatggtattgactgaccacaccgtcagaactattctcccaatttcccacggccccaggttagggcaaccgacagcctaccctacttacagtattctacctaaacagaatttgtactgagcagttccagctcctgcgagtctccccgcccattaatcccccaatgcccagtggttgcacccttcagcctctccagattgtgaagccttgcattttcatttcta

SEQ ID NO: 1300 - DNA, 5687 bp, Emericella nidulans
ccgccacacgatgatcagtaccggcacaaagaagagctcctccaggtagtgcttcgcctgtcaggacaaaaagttgacgacaaacaggtcacgagagtgaaatcgtctcaagagggtgaagtacagagtcatttctttgtccatgatcagccgagaatcacaaccaggggtgtcacaaagattgctaaaaccagttaatatcatactgagaatcattgtgcggatgggcttaccgatttgaatactactaccgacagatacgccgatggagagatccatcttatttttcgtagcgacagtcacagcagttacgtgctctgcagcattaccaacgatgggtagtataatcagaccaatgaaggcttcactgacgtgagagctttcaaccatcgccgggatggcgtcgacaaggaattcagcacaaactgccacaagtcctgtggaaagaagcaacatgacaaccgcggcagtgcgagacattcccggctcttcatgttcctgaggctgctgtttactggtggggcttcctgcaggcggcatgcgtgcagccactctggcgaactggacagcattgccaactggaggtgggcgttgtacacgttggggaggacgttggctgagcgaaggcagagagtgcgtacgacgcaagccgttgaagttgccccaagggtcatttgacgtggtagggggtggagtggcaaatacagtgttcgacaatagagacgggagactcgggcggaaaggggaccacttgcgcggaatatcggcactctcaccttgtccaacagataaagcggaaacacgggggttggcggctggctgagccaattctggagcagtggactgctttgcttcctccttggcagcctttctctttttcttacgttcacgctttgttcctctgcggcctttctcggcgaggtgcatgctaggcgtttggccgaaatccctcgattgagggccctcagatcgactggcgattgtgatggcgtccacgtttaggccatcatcgccaaaatgccttgatccaggtcagttcttttcctggccttgctccctcgcggcaatatatgacgcagtctgctcggctcgttcctcactcgaggcactagtagcactcgattgtcgcggcggtaaagacgagacatcgataacggacgacttttgcgtcagttccggggagtttgtgccccgcgaactggtgctagcctttcgatatcttctgtatttcatggcacgcttaatacgctttgccgttgtccaggaggtcgtcgtatcgtctgactcatccgaagatgaactgcttgacgagtctgatgacgaatccatgagatcggccaacacacctgggtgagattcttcatcaatgatctgctgaggaatactggcgtaaagataagcatgcgatttcagctggaagacgatgtagaggacgtaaacgaggagcaggacgacactggtacctcgggaaactttgagggtcttgtccatagcaacatccgagtctttaaatgaggcatgaaaagcagtcggtagcagcaaactggtgacggccaaactgagcagacaagcgctcatctgggtcacagtgctgttgtagatttgttcctggaaacggagacctccaaggagaaatgccattccaagaatcaatagaagattagccaggatagagcctagcaaagatgcctgaacgatgcgaatttcattcttaacgagggcaataatgaagatgatcagttcgactgcgttgccaaaggtgacattgagcaaggctccaatagcgtcgcccattcggctggcgacacactcagtagcgtgactcagaagtccagccagaggaataatagccaccgcattcatggcgaaaatcaccgatggattgagtccagcagcctcagcggcaatgccgaccggcacaaagaccaggagcacgttgacccagctgtggcagattgccgtcttcgtgtggcgaaagaaccggatgctgccatttttcatacgagggacgagtcccttcttctgagagttgtcatcggtcggtgagcccgtaaccgggtcaccagctggtttattcacttgatcattttgggtacgtatatcgggatcatcggggcgttcggtagattctagggaggcgccctgggactgggagttgggggagatagatgcgtgactttcgcccacgaacggatacggtctagagtgaaaacaggtcagctgggttgagaacttgtagaagtgcgatttggtcctccgcgcccctgggtctgccacgcccctggtctgccaaggaggctgcccagaaagcaaagagctgacaaggcgaacgccagagacgggcgttaccccgggggggggaagacaagagaagagcacgcttacgcataaattcaagaccaagagtgatggtcgaaggcggatggacagtgagggaaagccaagacggcaggaacagatggatgagagagaagaaacggacggggagaaggagagatagaagagagcgaagcttaaggcacagcgagggagaggcttggccgcctgatacgtatgccaagcccggcgatcacgcctcacccctggtctggaatgctgacagctggatatgacaattgtgtaagaatatggtggatatgctctggcactatgaagaatttgtttaactgcgctttgctagtggacacagatatgggatagatcgcaggaggatactgattcagttaagagggatttatagcggtccggtgtttgttctttgtcttattatctcctctccttataacccttgcacccaagaagaaaggtacctcaaccttacgcgtcctgctacatccatggatatgctcctgctcacaattattgtcctacactgacccctccgcttcacgcttacatcaattctcttttcgtcatctgctacattttccagcaaggagacattctcgcgactgacttgcaatctggaatcttccttccaaacatgtcaatagtctgacagttgactggccactttctggtaaggccaccaatcatggaagtagcaccgccacacggggctgagcagtgcagcggtgattggttggattctcggagcttatcgccgagattccggtgtttccccgaacggtaacttcccgagtgctctttctgcatctcgtcatccccgctcatttctgctgaaggcaagggatgatgcaacgaagggggagtcgatgatcttctcctgacctttcagactcgtcaacgatgtcgagcactgtcttcacaactgtcaaaacttggccctgggccaaaatccccgttgagtgggcctcgctcatcacccggactgcgatccaccttttctccatgcgcctcaccggctgccgacccagctgcctagcccaatttattcgcctaggcgtctctgtccatggattgccactgctggagacacgctgagtcaactttgtgccgaatgcagtcaaaatcaatactgaagtcagcgttgaagggatattgtgttgcctagacgcagccctaggatgacgtccgtcattacacaagacgtagcgttgcaataaccatgctcgtccttgcagagagtgccatttacgcattctaaagacatcaaatggcgtcggaaggctgttattgcgttggacacaacatgctactgtacgggaaagacttcatccgccgtggttaaccgtctcgctaggccacaagcataagggcctgaggagttgaagcgatacaatatcgtattccgattttacagggacaactcaatggcagtctttattagttatggatagggcaatgtttcaacattccaagtacatttctcttatggccgagttcgcttttgggtgctgacgttgcttagtagggggaacgagatcttgagccgatagcaatgatgcgagtctacagtagctgcgatgcccaagaacaaacagtagaatgattataagaaatacatggttgatgcgggatcccgatcccatcaatgccggctcccgtcccgggggcgatccacgtcaagattgcggaagctgctcacggaactctgtccggggtagattatatcaactcatggccgctgtaccacagatcccaacacactctcatgcccgggtagggcagccgcaatgtttccagtatctcaatggctccggtacacatccctttcaaagtacacaaagcagccaaataagtactgactttctaggaatttcagcccatcaaaatggctccggacgcttcaccttgacgcccgcacatgcctcttatgctcaaagaagccctccccccacaattgtcattgcgatctaccagagcagcgccatctctaatattacactgacgattggctacctgtccgccctgatttctgtcctttcgcaggctttactgcctcgagcaaagttcacgaagattgtcttctttgacgtactatcaacctgcatcgccgcctctctatgctgccttgctgtattttgtgccgtcaaagcacaagaacaccatgcaccaccagtccccccgcaagacgcgtacagctccgacgcttgtgctgtttctgcagtatggctgattgtcatgatctgggctgcgaacgccatccgcgcgtggaaaccagcggagctgcaggacccgatggttgcattctcagttttctcgtctgtgactctgacccggacggggacgtttgtgagcctgtccgacggactggagttcatctcgagactgctgaaggggttcatgctgggatttgccattgccacaggggtatcgcttttggtttatcccgtcaccagtcggggagatgtgtttcaggatgtacgagaatatgcggcgcagattcacattgtgctaaaagctcagggtgaatttgtcggagacggctttcgctttgcgctggccaggcgctatctagctccggtagggatggcacgcctgcaatgagcgattcgcctcaggcattgagaaagaaactacaagcggcggttacaggcctccatgcaatccaagcgaagctgcagtctgacctcttctactcgaaagatgagattgcatggggcaagctatccgcgagtgacttcacccagtcgcgggtctcttcaaaaaccttctttctaccccttcaggaatgggcatgctttccagacatactagacatggtctcgagccaagaagcacaggcaaccctcgatatcgcgttgaaccatctcggagaggtgtcttctcggtctgggactgaacatgtcgcagcatttctgcatagccgtcttgaagactgctctgagctggtcaatgctgggctgcagtatgcgttattgaagttggaaatcatgaaaccgatacaacttgataggcatagggatgaggaggcagggcagcccttgaacccgttgagcccgcactttcctgcacaatttgagaagcggaagttagaatatcattcgagacgaagacagcttccccaggcctttgtttcgctcgaggcgctttcctacgagaagtcagcggacggagtatcagatgacgaatcagctgctaccgatgttgacgtcgaacagtcctttttcctcgtgctgtatatattgcaactccaggataagctgctcaaggcaacccaagacttcgtggaattcgcaaattcgaaggtcatggatggtacgatggctcgaaagcggataata

SEQ ID NO: 1301 - DNA, 1681 bp, Emericella nidulans
ctacttcgcggcagaaggaccgactcgctgagctggaagaaaaggtcaatcagatactgcgaggcgctgcgtatgacaccctgcagtgacaccaagtgatgatgctgacatcttgatactacaggcagcacgagcaacctactattgaagaggcacccgacttcgcgagcaccacgcatggagatgtcgggtatatgcaagacaatgcgtatccctccatcttcgggctcgacggcgcgagcccgcaggcttcatcgctggccgttgcaaaggcaatcgacctgtaccttgagtgctgccaccgccagccggtctggtgtctgaacataaaagagctgggcaatatcgaatctcaccctgaagaactcatctgtagtatcctggcactgacaagccgcttcacccgagatgccgcgcagggccagcgctacgcggacagcgcaaagagcctgattatgctgcggattgcgaatgggacggtggagttggctacaatagagagcctctgtctgcttgcgtactctgcttttatcggtaagtctcttatagcagctctattctgaaaataaaaaggaagaaagaaaaagagaaaaagagaaggaaagaaaactggagaagaagaaaaaaaggaaaaggaaacaaggttgacaggacagacagatggcaacctccaactcggccgcttccacctgggcatgggcttccagctctgccgggccgccatgctcgacactgaggccgcgtacatgaaccagcaggaccggcacgcggacgagaagaagcgtctcttctggagtctgcaactcctcgaacaatcatacggccggcaaaccggcctcctcagcatccccacgtccaaatggcggccgccctacttatcctcctgcgaccctcgagcatccgacaacgacagtatgccacgaccgcccccgatcccccgagacaccgttggctgcgcatccccggatgacaccgggatctggagtatgagcatccacttcggctgggtgtggagtaaagtgcgcgcgtacgtatcgcactgctcgagcaaccgtgtgacggagccttggcggcacgaatccatgtacgcggtggtgctgtcggacctcaacgagatcgaaaacagcaccccgttgtgtcatcgctacgaccacgtgcagttctatcgacggaccgcggaggagcttgcagtgaataagagctactgggttccttgggtcaagctgcagttcatgtaccacgccatcttgacggtcctcaaccatccgttcttgtatataatggcctcacagcataacccgaacctcgcgattccgaacagtttctggcgtcgatcatctgagctggtcctcctccatgctacgtggatcgtgaggctcattgacatggtctctgagaagaatgtccgactcacagacccgttctttgcgcatgtggcgggcatcgcggcaacggtgcagctttactctgtctgcgccgatgacccgagactaaagtacaagtctcgagcggacttcgccaaatgtagtgactttttgcgcggatttacaggcttttcaagggcttgtgaggtgttggtatgttacccttactagtctgctcttgattctgagaagtaggagattcatctgggagaaggagctgctaacgatacgtacagagccaaaaactcgacgcacta

SEQ ID NO: 1302 - DNA, 11632 bp, Emericella nidulans
cggataatggtgatgatggtaggtctggggtacagccggggtattattgctgtcgtgagcccagggagcaggccgggagacgatggggtagatgggtagagagcggtcggccgccggaggatgggccgtggagggaggaggaagggagttcttggcgtccatcgcacaggcgcagcaattcacagatctcgcgaccgatcttcatgggcactcattatttgcctggtttcctggatgggcaagctggcagcctggcagggacaaggcgagcggagaacaggggagcgagatgaaggagcagcagaaggaaaagctgaatggtcagcgcactgcccctatcaggaaaagcccatgttcttgcgacacgcggggggcaatggcagtaagacacgctcggctgggcgttgaactgaggaatgtgaccactgataaagggaaaacgcgacaagggaaaagtcttctgacgctgcgagggcagatcgtagtagcgagggtgatggtattggtagtagtggtagaggtggtggtggtctagatagtgcggagggacttccaggccttcacctcagactcagagtcggcatcgctggatcctgcttttcacctcgcttttctcgctcccattttctcctctttttcagacttcttcaggtcccggtgcagccaatcaagccgcccagcagcgatggtctggatctcggatgctgcggctgccggtgtccgggtggagtccggctccctggataaacaatagccacgcctggctggcaacggtgagtggtctactggctcggtcggatatatcttccttccatatggcgctccttgcgtgggttggacctgtcacggtcatatttactcacgattctggtcaatagaaagttctgtattcgctattactacaatgtgcgcccgcgctgcgagccgtatgcaactaatcacagatgggaattcacagaatgggaacagcaccaggacaatagggataaaactagagataacaatgcattagagataccgggtcgcggacgcgaccgccatcttacgaggtggaggtggtgtaatggtttcacgagtatcccggtcgtgggaacacggagatcgtttccagctgctccagcccgcccatggtgccttgttgcccgttggtcgtctgccacccctggccctgttgcacaagtgtgctttgtcggaacggatttgtgcttcctgtgggtgtaggccgaagaggtgcggcagaaggatgcaggctttgtgactgttgcggtgggacagacgaacttcgagcgaaagggttcgtgcccgtccgctggggttggagagctgctggctgctggggctgttgagacggctgactctggggaaacgacgggttcgctgttgatagccgtttcgcgaacgggtttgtgctctggcggttcagtggggatggcggcacagctgaccccgtcggcgtgctcattaacatggactgcctaaaaggattggtcgtctgcggttggagagtggcgggtgactgttgctgctgggggaatgcaacgacattgttctgcgggatctgggggagctgcgactggaacccttgagcccggggttgcggtgtgtagccaccctatcccgcacccgtcggggttgcttgtagggggagccggacttgttgctggccaaactggttggtggtttgcggggcaaacgggcctccaaatggcgcctgctggttcaatcccgtgggttgaggctgctggaatcctgtctgttgtgggtagaaagcaggctcttgtccagggaagccgccggtctgctggaattgcatgccctgttgctgcggctgctgctggaactgagctggctgggccggctcaatcgagtcaaagaagtctataaggtttgatggggctgcctttgtctgagggctaggctccgtcttgggtcgaggaggcgtaggatttgagttggaagcgggcttatcacccgtggtcgaggctgctgcgaaagcactgctacttacactttttcctttccgagcaagatactctctgcggcgctggttgaaatccggatcgttcaggtcgtcctcgaggagacgtgtgagatcggtggaagcgtgctttaacttgggaatctctagccttgtggccgactcgaaatgtcgagcaactcccaaaaacttgacaacttcatcagtttgcgcggtgaaggtcttgtaaatctccagcgcgcgctcactatcagggcgcgacatttcaaaatagtgttctagtcgcggttggtaatggctttgtaatgtgtggtatatccaacttacctagaacgtttattgtgccctcgttcatgacggagtataaagtcaaaaggtccagagtaagaagacggaatgccgtcaggctgatttcgttctcgacttcatcggttaagagctgatactagttagccacatacatcgagagtcagttctatggtgcttacatcgcatcgcaggagctccttgatctgcttctgtacaatttctgtctctcgtagtaggcccttgtcgactgtaagaccgcttcatgcggccctggccgctccgtacataatcggtcttggtctgctcaaatgcttttgcgcgagcaaggaggtactgggcgtatcgtcgaatattgcggccttgcggttggactgtcgcggagcagtcagcacggtatcatcaaagacctccagacaatcccaccctctgatagcccgtggacagcgattttcctcggattctccgccatatactgcagcgttgcgtccagctggccctccctgatcatgaagtggatcgcgatgagagccttgaaagcgattgtccatgtcgaatcgcgaacccgaaggtgcagtgtccggaatatctctgccactccagcttcgcccgtatgcgtagccaccaggatgtgctcgatgtatttggatttgggggccgcaagctacgaaagcgacaggctgaaatcagcatcctgcagacgcaagcgaagcgcaagccgaaatctctactgaccttgaccttggtagccccttttaccgatttctcgaagttttgggccattttccaggctgtctagggcgtctggatgattgcgacggaatttagggaaggatcgtagcgcaaagttgaggatgtcctgacacgacaccccagcggaaccaattgtgacagctttctgaggaatatagactcgacagtgactaccgtagatagtgaattatttcgtttacgccagccccaattgaaatcatgatcgtttaggccatgtcgagaaacgtggatcaggagtggaaacagctggcagaaacggttcgaggtgtaacggtccagccggggaaaccgagataaaaatgcagcgttttgtaaaactgccagaacaactggacaggggggattgggcgaggttcacaggcagagtggtcgtggggggtgaaagcgaggagcatcacgacgacggcctcccagttcggcgccgcctttctcgggtttagctgcccgagctccacatcctctcaggcactctactctgtacctgtacaagcaacgagcgaatgccatactgcactgttggtactgggacactgtgcattcgaataatcagtttcgttaagaattggttgtcgtgaatcgtatacttgcggtggcgtacacttttctctcagtaccgtgaactcaagtcgccgccgtgaaatatatataatacacctaacacattatgaataacctcatcatcccaataacgctaccgcttcgaccattcatcaagctgctatgaacagaccttagagattagcaagtacatgcttgctatgaggtttataagtccacgaataacttgtgcaagaactgggctattgatgagtgagtgtctcaaatatgcgacgagcttaaggaaaacacgcccgtggaaataatagagccgcctcagttcttgggaacggcatattcgcagacctacgacacttgtgttattgtctggagtttgttatccttcttgcctcattcctcgtctctcttcgcccacaagacgtctctactgcgttcgtccttgccgtacgtctcactgctcgtctacaaaagtgagcatagagagatctctcgtccagcacaagctttcttgacgagacgaacttgcccatggagctgaatgctctcaacctcctcaccaagccgccgagggtgagatggtccactgagatgagaaccttcctttgctgcctgattaagtatttcaacaaagatcgtgatgcattccaggccatcttcaactcgcgttttaagaaggagcttaacgaatgtgggtttaatgagaaactgccagtcaagtggtcgacgctcgattcacagtggattgacatgaagaagaagggggatcccatctggggagatgtgcatcagtccgcatttgacgccgaggcatggctgtcatatattgaaaaaattgaagcaactgcaatctcaatcaacaagcatattgacagaaaggccgaagacacagtcgattcattgacttttacctaccagctcccaaagcctcggcaccaagcaatgagtgagcgacacaatttatgatagcttataaccaactgccatagaatgttaacaggcagctgttccagaaggagatttcaccccacgggtcccgtgattccctggaaataccagtaagagaacgacaatttctttcagcttgtaactaactgtttcagagcagtcgaaggcagctattccgaggagagactgtgtccggtgagtcttctggagccgccgggtcgcagcaagatggtgctcagaggtttacagaccagctgggagaaagacccctttgcactgctggggacaaactttgtttttggtgttatgccgaaaaccctagcagcgtgagcattagtgggcctgctacttgcgtttttaacgctatccagaaagcaaccaacggtttgaatgcggcgcagctccctcccctgctatatcggtggtggaacgttcgatcacaaggactcaatctggagaatgtatttgttgctggaatgtttgccagtcttttcaagggctattttgctccagacacgcttgcagaagacgtgtttaatcgcctctttgaaagccacatccggcgtcataaggatttcccgtctcctttcatttcgactttcatgtccctccttgcaccagttcacagggggctgagggaaaaggggggtgccaccatagctattttcgacacgagaaaactgaggtcgaaggtttactctgccagagagtttgtccgcgaacaaaatctcaagataggaaggatgtataatggtgcgggcgagtatgcagtatggggccggatcaacaatgacgctattatctgcagtttcactatcgataccctatcccgcattgcagatgagcatccagatattaatcgattcttgcaacttgatctgatcactacacataggcacaacagaaagggcttgcacaaagccatgacaaaaaacgccatgtccttggacatggaggctggtgctacagtggggaagctgctgtccctcttggatgtcccacaggagttctgccgagaaatcagcagaggcatggcgtactcgtggagaatcaagaccagatacatgtcctggcagggtttctttcaaggtgttgagcttggttacaggggtgaacctgtcatgcctacgctgctcaccccagatgctacacccgactcagtagagccaatcccatttggtggatttgactcagatcccggtatgaatatcgtggaatcatctgacgattggggtgataagtctgacgccaccctcgatcttcagtccgatgaggacgaacaggacgaatcttccatggatgagactccaccgccttcatttaggcacagaaggaagacagtccctcctcgtatggatctcgactcttcgttggcgcaggatccgaattcaaaccccgcgaatgtcgtcaataatggtttcgacagagaaatggacgatgtcatggagtctgagtttactgttgaggaagctgtcgaccaaaagcaaatggcaattgatgaattcgccgtggacaaggctcgtgttatgtctgtgctgcgtggaaattttttagtctagtattgctgaatctgattgtgaatgaggacttcaccattgacgggtgtcaacgtgcgattaaccacggccgctgtttcggtttaccctgttgtgtcgtggcttgatttggtaaagatcaaggtaatgagtttgggtggcagtctgagtgttattctacgaatggtcaggttgcggttcgtcagtatgtcttgcttcttatacgactggactgagagccacgggggacctgcagcacctcaaagatccatctactctttcctttttgaatgcaataaacggccatttgcagctgttgacagaaatcgcatttccaaacgattaagcccgatccgtttccctagattgctgtactataggtaaaagaagaacagatcaaatttttttcattggatatatccttcgcaaggggtaccgggacatgaaatcgtgaaacaatcccaacccctaacttccgttcgaacccattcgcgccgcttccctagattgcatttactctcgaggacaccgcctcatcgcatcgcagcatcatcgacgtcgactcgcttagaacttggagaaagccttgacggccttgccggtgcggggcaggacacggaggacgttgaagcggacctgatgatcagaaagtcagaattcgttcgttcgcatataagatggaatatattggattgagaagtatgaatgttagggtcctgcaggtatcacgtacagtcttgctgagggggcggcactggccgacggtgacccagtcaccttcctcaacacggaaagcgggagagacgtgggcagcaaggttcttgtgacgcttctcgtaacggttgtacttgggaacgtagtggaggtattcacggcggatgatgatggtacggtgcatcttggtggagacgacacggccggtcaggatacggccacggatagagaccataccggtgaaggggcacttcttgtctagagtttgcaagtcagcattaatccttctgcggccgaaaaaaaagcgtagagcgtatagagtagatggatcttctccccgaaagtctgagatatgagaattgaggattgagaatcaggaatcgtatcgctagcccggatattgtaagtccagacaccgtcatccaattcatccgcttcccaacatattgaatgtaagtgtagattttgcgttcgccatccgcgcattctcaattccagacctcgagggaaaaaccaccgccagtcgccaaaccgcaattttcgaaccggagaaaaaaaagttcaagtcgtgcataccaatgtagctgccctcaatggcggtcttgggggtacggaaacccagaccaacatccttgtaccatcgtcgagtctggccgaccttcttgctcttcgccttggtcttggggttgaggaagatgtgcggctgcttctggaacgcacgctccgactggacggtcaactcggtggccatttttgcgagaatacagtccgacaaggaaacaaggtcgagctgagtgggagattcgtcgcgaagggttgtcggattgtacggtgtcgacgtcgacttttgaggaagacaaaattcaggatcgcggatattgagtgtgggagttgtgcggtggctgcactagtcctcttccggaacctatgcggatcggctagggctgttatgtaagcttgctttgtttacttcttaaatcacatgactgcccgccggggtgacgcgcttgttggactgaagatcaaggcgtcaatactcaatccatcactaaggcacagacaaattgtatgctgctgggcaccggcggcggacgtactacaataaaatcgtctgtgagcgtcagccgcccctatggcgtccagaggtgactctgcggagtcgacccgtgtgcgctctcgccgctctatcgcccatgtaccccgatcgaggttgactgctggaggagacaaagataatgcaacgacagaaatcagcacttcccagccacttgctaatcgccgatcggcaacgggaaaggagaaaaagtctcgtagcaaaagtctgggacctggaggtttggacgcgcttcagacttcgaacggaaaccgacgaaaggtattgacgccccgcacgccgcggtctcacttgttcccataaactgaccgtttactgttgtatagtctgctgcagtgtttccactaaagtcaatcctcaaacccacagcacctgtatcccccatacggaacattcctacatttgaagaaacgcgcagaaaaacaccggcccgcggaggaaaggaacaagcgtctagcaccggcttagcgcaaggaggaaacttaattgatttggacacacacgcgcagaaatctgcagttggaacggacggtcaaactaatccattcgataatttcaatgcggacaccatccgcgatgagatggctgctgcaagggaacaggaggagaaggaaaggcgcgagagagaaagaaaagcggcattggagcacagagaggctcggcgcaagtcaatgggtatgtttattgattctcagctatatcgctgctcagagctgactggtcttcaagccaaccgtcgtgtatcctttgctcctgaggcgacactgcatacctggaacgtggtggagattcctgaagactcgacatcctcttccgcttccaattctactcgacgtgtctctgctctgacgaatactccgaaccagcccatgcatacatcaaaacaaagcgatcgttcaagctcgcctgatattgatgctgagtcggacatcgccttctcgccggttcaataccctgatttggagcgactcaggaatcagcaacctattggtagctatgatggagctagttcatcccaggaaatgctctcaagcccttttagtggaagcgaaaatagcgaggatactggtttgcactccatcgctagggatgatggaaatgacgaggaggaggaggacgacgatgatgatgagagttctacagcctccggattcgacggggaaagcacagcaatgagtatggatgacatgtccatccactctggagtgacaacccaaacagatgggtcagaatcgacttccggcaccaatcgcctgaacgaagccttacggcaagctgctcgggaggcgggaactagaagcttcgaggacgagaacgatgaggaagtatctatggagatcgctgaccaggagattactggcgcctttcagccttggatcaagaaggggcagagacagagcttcgattgggaagatatcagcgcgcggcatgatcaggaaaatgttgacccctccaagtccatgaactccgcaacttcggagatggctagcgacaatggtgacgaggatcttagcatggaagtgaccaatgctattgggcggattattcccaacaaccgccagagcctcggccgccgcaggtcgatcgccgaagaaacgaactacgaagagcagacaatggaactcactaatgtagtgggaggtatcgcgcaatccgtttctcctgcaaagtcagcagatgccaacagcgagattgacaacgacgaggaaatgacaatggaatttacgtcggtcgtgggaggagttttgaatagagccggatctcagaaggtcgacgaggataatgatacaccggatcacggagataattccacgtacgacaacccagatgatatggacgatggtgccgatatggagattacgggagcggtgggtgaaatacttccacgtgtccaggaggaagcggagttcggggatggagaccagaccacagggatggatttcactgccgctatgggcaagatattgacgcctgaacgcgcgagcccagataaggtacactcgcagcctgccagctctcctttccaagagtctgtcagagcatccccagctaagtccccggcagccttccatgttgctgctgtcgcctctgaaagtggtagccctagcttggccagtgtcaggtcaaggcctacaaggcagagtctgagccgcgcaacccccacgacaccaacatcgataacaccccaagaaccacctgcccagaattcttcgaagaccctaaaacagtcggctcgagcaggccaaccctctactccagaacatccgtcaccttttaaggacgaaggtattcgcaatgcatcaccgaagaaaatatttcaacctgagattcaggcttcccacagtcaacagaaatctccaggtcgccgaagcctttttggctcgaatgcggcgggagagtctgctcctttgtttgtcctgcgacctccaggacccaggcgctcctcgggcattgggatcgacagggaaggacttggttctccgaaagttgcggctatgcttgacaaacggcgttccattggggaggaggcgggagactttgttccaaggccgcaaggggtgcggtttgaagaccctatcaaactccaagaagaggttgaccgagaacgggaggaagaggagagccgcgaggatggtcatatccagcctccagatcccactgccagcttgaaagacatgatttcaagtcttacaccaaagaagaataagctgcgcggccgcaagagccttcatgttggtgctgctcggggtattcttggcaagcgcccagcagagttagacctggaggacgaagacgaaggtgagaatacgcccaagcgattgcggcgtcgcgaggacagccctgtgaagaatgtgaggcttccgcctccgccgagcaaggaagaaaccgttggtcgtgctcggtccccagctcgtaagtcgatggcattatctccttcaaaggtcagcacaacaccgacacaggagccgagggtccttgctctggaaaactccgctcaagatgcatcgaaagctgcttcaccagacgttgaggttccaactgaaggtggtgctgacgacaatcatgaacctgaatttgaaccaatccatttgcaagacttcttgaatatgaccaacatccacttcatggaacttacgaccactaagagacgacatacgacggcaccggatagcatcagcaaaagggcagctagattgtccttggagggtgatggcaagtccagtgcttctaactttgacgactgcgtggccgccgggttctgtaccgtgccaatgttagagttgtatcagcacgtaagtggccacaataaagaatattttctttcctgacgctctgtagtcctgccgagagttgaaatcatatatctccgaaggtcgccaaatcattcgatccatcgagaccgaaacctacgccgacaacccacccctgttccgggaatatatggcagcagcgcctgacatccgtttgttaatggacaaccagttccggaacgtcaaaactcacaccagactgctgagcaaagctacatggtacgagtggcgtatgaagcttcttgagggtcttaaggagggcctagatcgtcatgtagaggagatgaaaggggacgacaatctcttgtcgaaacacgaggcaattcttgaaggatgctatgcctgcgctctccgctaagcattcgtcgctaaaggaagaagccgcccagttcagccg

SEQ ID NO: 1303 - DNA, 4482 bp, Emericella nidulans
acaactttgaaataacgctatttgcgtctaacaagaccactgcaagtgacgggtaggatgtcagttcctttacagtatttgccagcagtgcagagctgaagacaccgccctgtggttcgctctgaagcgccgcagcaatgcggaagcataaaagacccgccgtctctgctgataatggaggtccccctttcaccacctgtcctaggctattgaaaggcatgtctgagtttgaaatctcccatgacatatgtgctaactaccccaaagcgcagcctcaagctgcgcttagtgcggcaacctccgacgagggttcgccgccacaaactccagatatttctagactatcatcgccttcttcgagccacatactaacaggcaaagccggtcctggcggccgcatttctcgccgggcacgtaaagccgcgaatgcaagcgcgactgcctcatctggtgacgagcaggttcgaaaaggaaagacaccaaaaagtgggaagaagctacgggtatgggacgccgatggactcgcagatgaggacgatggaagagtccttgactactccgcgcctgctgaggcagatgatgctgtcgcaccgacagtggaagccgtggcgcaagagtcttggggtcgccgaactggcaaaggccagttcgtcctgaaagacttgggcgatgaagtccattctatccttgagaatgccgacaacaagaaggccacctctagcgcgccgtcagggcttgtcggttccggattcagcgccatcggtggtctgctgcgtaatatcgttggcggcaaaatactgactgaggctgatttggagaaaccattgaaggcgatggaagaccatcttttgaagaagaatgtggcgcgggaagcggctgtccggctgtgcgagggagtcaagcaggaattggttggaaagaagacgggcaactttcagagtgtggatgctgcactaaagtcggcgatggaatcttccctgcgcaaaatccttacgcccacctcgtcccttgacctccttcatgagattgacaccgttaccaaagcgaacaagcagggcacgtcacgtccgtacgtgatatcaattgtgggtgtcaacggcgttggcaaatcaacaaacctgggcaaaatctgttacttcttgttacagaataactaccgcattctgattgctgcatgcgatactttccgatcaggagccgttgagcagcttcgcgttcatgctcgaaatttgaaagagctcagtgctcgtgagaatgttggcgcagtggagctttacgagaagggctacggcaaggacgctgcaaatgtggccaagacgcggtggaatatggtgcagctaacctttcgaacgttgtcttgattgacaccgctggccgtcgtcacaatgatcagcgcctcatgtactcgttggagaaattcgccaagttcgctcagccgaacaagatttacatggctggagaagccctcgttggtaccgacagtgtgatgcaggcacgcaacttcaatcaggcctttggaacgggtagaaacctcgacggattcattatcagcaagtgcgatacagttggcgacatggttggaactcttgttagcatggtgcatgcgacgggcattccaattgttttcctaggcgttggtcagcattatggtgatttgagagggctcagtgtgccttgggccgtaaatctcttgatgaagtgatctttcgtgatttaccgatagctttcggaaaccactattttgtcattgctcatgctcttgattagtccctatctaagaaatgcaacagagcgaccgatgccgtttattgttgagaaggaacattgtatcaagattcagaagtggtattatgtaggtaaaatagcaagatatatattgcggaccgagcccgtttaatggaagtgctacgtgtcgttgcatgcgattgcagcaaggaaaacaaaaacaatcatttcgttcaccggtcttctccaagttcccctatatcacctccctatcgctcgaaacttactcacttcttcatctgctcagagaaagtagtcagttactcctaacgtacgtcacttctagttcacctgaagattctcccggggcccactctcgagacgttggagcgcaaccacctacgagctttctcaaaccacgcccttgacaagtcttgaatttgtttctgacgattttggatagctcaccgttcctactacttggagaccactctacttgagtcagtatggcgctgccccctatcgcaaaggccactttacaggccgcactgatcagcgccagttcgaatgtgctagcgcagggtatcacttcgtatcgagagggcgtgcgtactactccttgtccccgatttcttaaggtcttctctttgcaaaagatgcagaatatcgtacgtatctagatgcgaaggcgagactgacattccgcgacttagacaccctttgagctcgactcccaggtactcttccaatttaccactagcgccctcattctatcaccgctggcatttctctggcttgagggccttgagcaaagatttcccggaacccagcagacgcaaccacccaaagggaaagagaaaacagaagagaaagggaagagtaaggacaagcccgagccaaaacccaatgttaagaacatcgtggcgaaaatagtcgtagatcagcttattggtggcgcttggaatactgttgcttttattgtgacaatgggtatcttgcgcggacaaaattatgaagtcatcaaggaagagataatgaatgtatgtgactgtccaccccagaccgcgttctttcccatctgtccactccgctcgggggccttccgtagcggttggaagtgaagtgacgatacaggagtccgactcatcagctggatgctagtcctggcgcactctgtataacgcaagcaacatatctgaccaccgtcacagaatttctggccttatatgctcgcagggctcaagttctggccgctcgtctcgattctgaacttcaccgttgtccccgcgagccagcgcctcctagttgggaatttattcggtgtcgtatggggcgtttatgtcagtctcatggctgcgtgagcatgagcatgggcatgagccagcgcctgtcccgcggcacaatgcagtggaatcggagggtttcctatcaacagaagctgtcatcttcattccattctccagtcatgtcatttcctgtgtcacgggtgcagccgtgcatggccaaggatggagtctggggccaaaacgacgtcctgtcagaaaggaaaccgagagttgcgtcgggatactccgtgttcggaccaagagtgggttcgttggattggggaattggggccagagtactaggaaaggcataatcggcgtatactacttgatagacacgaatcacgatccactggactgaagggtcatgtactggtctgggccagtatccaatgcctggaatgacccttgaggccgtctggcatttgcatctccaatcatctccattcttctttaaagaaagccacgctttgcttagcaaactcagaaactcatcggttatttccatcattgttggattgggggttgggaagagcgttggtaagaccgcattactagggtgatagttgaaacaacaccaagcccgatcgtggccaagcagtaaaccaagcagtaaatgcttactctatccgagctagtacaacgtagcccattctaactctcaagtgaacctcaatgataacgcgaagtctttagtatagagaacagaatgcagcacctctaactagagagtcgtatactgaagaaggctgttcaacacagccccacgggtggcccactaccactactttaagagttaacactagcgggctattttgggagcggaatttacactaactgaactaagacagcattcttaatggtaacgaatcataatgggaatacgagctgcaagcatggatttgggggtttggcctgtggtggctgaaggctaaggctgtacggcaccctgtgagcactgatcagtgagggcggagtgagcggtgcagcgggtgccgatcgatggctaaaaatggctaaaaatggctgaagaaaagaacagaactgagacgagagtttgggtttcgctgaagagaactctggttgagatgctgattagagtgaatgtagaacaggatatggggttattgtttattatcaaagttatataatgaaatcttggagccaggacgggttacgtatagtcgtattagtcttggaaaacacagagtactccgtagagtcagcacagaaaccgaccccaacgattgattaccgtcacagggatcttcatggtaattgcataagtggcctcgggccatccacgaccggcctagtcagaagacacgagagacacgagggtccatcagagcttatctttaatacgggaacaatactcttattctgcatcttcctcgtctcactcacaaaacggtttcgcgtcaccccttca

SEQ ID NO: 1304 - DNA, 3216 bp, Emericella nidulans
ttatcatagaggactgcctcactacattacacgaatcgatacctgtgcttgtcgagaccatcgttgtactatcggacctagatgagcaacagatgccaaacaatgcatactcatccctaaaacatctagctaccacttatccaacggtgctagattcgctgaagaactctctgcatacctggcttactgcattcccgaggacgatgcaaagtaatgacgaaacggctaagcaatgggctataaagcagataacaactgcttttcagatactgtctgagcttcagtcagaatctgaccttcttacctgcgatctaacagccggattatgcgacagtgttgctgtaatcgctgaccgcgcgaccagtgcacttcagccattgaactcggatctggcaagcaatcaaacatttgagattctaggcgccggaaaagaaagtgttaccttctcacccgtgctgttggaccacaaaagtcagcggcagactctcaaggaccttcgggggatgatttcccggcttaacttttctaattctgctaatagtattacgcggctaatcattaagcgtattcaccaggagcagggaaactcaataatcgcaccactatggctggccacgacgttcctgaaggataccacgcagtttatgagcagtttagacgactttatcactctggacgacatcgagccttcgcgtccgttctctacaagggctagtatgattgatgagctctattatatctccttgccgatcatcaatgaaacaatgggaaatgaggatagcgattggcgagtgtcagcgcttgccttagaggcagttgcgctccaagctcaggaactgcgcgaagctttccgcactgaacttatggatgcattatatcctgttctggaacgtctagcgtccaacaaccaagccctacaaaggcatgcaatgacgtgcctcaatgtccttacacaagcctgcggttacccagatactagcaccatgattgtcgagaacgtcgactatctcgtcaactccgtggctatcaaactgaacactttcgatgtatcgccatatcctccacaagtcttgctaatgatggtaaaattatgcggagcgcgacttgttccttaccttgatgaccttgtggactcgatctttgggatcttagacctttaccacggatacccaaagcttgttgaactgatgtttaaagcactatctgcaattgttgaagaaagcacgaagactccctcaatcctagcgattgagaatggtaccgggaatgcaccagatcatctgaaacgaaaatatcaagaactaaacattcatactcttgcggaagatttcgctcgccgaaaagccaaacgcactgaagatgccgggttggcaggagataatggacttctaaatcatccaatccggccttgggctgaagaacgcgaagataaagccccaaaggacatccctgacagcgactctctgtcggatatcctgggcaaagatgaaacggaggagccattaccaccacctcgtgaaccagaagatgcagaaaaacccctaagcaaaacgcactcgcttctcctccatatagtcaaatccctgcccttgcatttgtcctcaccatcaccatatctccgtcgatccttgctctccatcctcatcgacgttctccccgtcctcgcagcagacgaaaacagtttcctcccgctcatcaacgacctctggcccgctgtcatatcgaaaatcagtttcccttcttccatcggcagcacctcatcgtcctcatcaacagccctactaaatctagggaacgatacacctgacgagagcgctggcgctcgcaacaaccagcggggtcaccagaaacaggcgggtcttaacgacgaattcgatttcaaggaggagacctttgtaactaccaccgcctgcaaagctgtcgaaacaatgttcaaatcagccggagattttatggcgtcccgcgtcgaggctgcattcccacgctgggagcgcatatacaatcgcgcctgggaaaaagtttgtcaggatacggacaagattatcgaacggcaacagagacagtatctccttgaagactcaaatccggacgagtcttcaacagtactatctaccacacaaccacaaaagcgctttatccaatctctctccctagcaaaagccggctcatcatccggctcgcgagcgtttacaccgcaccatatcctctggcgagcgctcatctcgctctttctaaccatgctttcccacgtgcgtctgcctctagcagtcggcgatcgaatctgcctcattctcggtgaatggatagctcgatacgcagggacggggtactactcttctcgtgcggcgtttctattaaaggataacgatagtaactgcgctggcgcggaggaagaaataaactcgattgagaccgccattagggctatggagacttggaactccgatttaacttggtttatatttcagcagcaagatgtcaggtttcgagacagcatggggccgaggaatggtgcaagggtgtgtgagcagtcattgcaaaacaacgattcaggtgctgcactgttgagttcggtggctttcaatggaggtcggcttcgattcgcggagatgaatttttaggaatatattgttgaaagtgttttaagggtccttgcaaatgtacgtatagaagtgcttcagtttccagccttactagtcgtctcgaatgtttatcagcatgatgatggtcaattaaataatcctacatgtacgttctcaaagatcgatataggccaaattcaggcataacagcggataggtagtaagagcagtgattgcaattcaaaactaaactaggaccacaagggtcttctggtttcatctagttgaatcagacaagaaaggttggcaatctgggagcattcacaaaaagagggacgcagggtcggaaatagaagacgataaagtatttaaagccagaatttccctgaaaatatactgttgccacagacgacggatttactcgtcatcctcgctctcttcctcactttcggcgctctcaagccactggagaaagggctccgcagccttgcgaaccttcctgctggtctgaatgtccacatacttcttgctagccttggagcaccaggccttaagagtttcctccgagaccaggtcgttctggtaatagccgagcaggacagccggaacttgggagataaagtcggggtgcttc

SEQ ID NO: 1305 - DNA, 3072 bp, Emericella nidulans
agtgtgaatgccgcgctgagctcgaccttcgactctcgtcccctagcccagccgagttttcttatcgcaaccatggatgtccgcgaccagctaccatccgtcaatccaatccctgactgcgcggtatgtctccggcatttcggttccctatggctcgtgctaatagggcttgcagcgctcctgccttaccgcagcagcagcagaggcatcgtgcagtctgacggaggctatatgtgtctgctatgaccagaccgtagccaaagcgatggggacgtgtgttgcgcaagcgtgctcggtttcagatatcttctgtaaattgctcgccccaagacctcgatccagcaatccctagcagacacactgactgccggcaaagccgtcaagcggtactcagacacgatctgtggtgctaaacccagggcgcagacccaggcacttgtcgtagtgagcaccatgttcctggcgatcatgattgtctgcgttctcatgagaactgttgcccgggttcttaaccgcaactacggcctcgacgacctcgccattagcctcagcgtggtaggtgatcgcagctctaccattgaaaagccaagttacagaggctaagagagaaagggtatcgccgttgcaatcgccgccattgtttaccccagtacgtgcttggcttcccatcgctgcaaacccgtgcttaccaggctgccgccagtaatctagggttaggaaccgacatttggtatcttgagcgcccaaaaatagaccatttactctatgtgattagccgctgcccttcttctgattcttctattcttgacttcgttcttctgtgccgctgacctgagacggatcatagctcttcgctgtgaccacatatctgtatatcccatgcctggcggtgatcaagaactcaatgctgctgctctatctgcggatatttcccaaccggaatctgcgcattgcaaccttcatcatgctcgccatcgtcagcatgtggggtgtcgcatataccctggtcataatctggatatgcagcccgcgaagcttcgcctggctaggctgggacggcgagcataccggtacttgcgtgaattcgatggttgtccaggtctcccatgctatactcaacatcgtatttgatgtcattgtgcttggcatgcctcttcctgtcttgctaagactggacatgtccaaaacgaagaaggctggtgtctgtgtgatgtttcttactggatttatgtcagtctcccacccccttagtcttgtcgttttcctaaccattccagcgtgactgccctgagtattgttcgagtggtcacaacgtacaacttcctaaaatcccggaaccagacgagtaagtaaccagccgcggctggcttaaagctgctctaactgactggccaattccaggagatttcattcctttttgcatctggaacattcttgagattgatcttggcatcatttgctcgtgcttacccggaatgcgtgctcttctcaagattatcattccgggctgtggaagcacaaatgaagcctcagactacgactacagttcaccgcaggaggtcccgggaaactcaaggaatctgcacaacaaatcattccatctcagtgtagacgggagtggacgggtacggtcaagtacaaggagggagagaaatgcattcgtgccccttcccgatttgcctccagtccggagcagactgattagtcacttgcctgaaaactggatggctgaaaggagtcgcagctcataggtagtcatgctggccgtgtactacgcaataccgacggtttgttggggataataatgcctttatgaagatttgattttgctgggagagccagacctgcacggtagccatacctcatgatttagacgtgtctactatgtaaacgatttctcatatgcgctgttactggggttatcatctttccgttcgacgcctagaataacactcaaaaccctggttcatacgtactccacaacggcagctctctgtatatgagtactgcgtgcgcaaagccttaacgggctgacgagtttacagcgcaaagagttcctttccttccctttccttttcttttctcttccttctctctttccctccctctgttacttttgttttttatgggctccgccacacttcctcaatgtagtatcacatcactagggatcctagaggctaccgtcaaaaaaaagatgaccctatccttgagcaaggagaaggacgggaaataatggtcataagaactgcagagcttgcagtggctgattacctagacttctgccgtggcacagccggttacgatacgctcattcttggtcctagcgagtccgctgtcttgcacacttgaaggaggctgttttcaaaagcttggtgaatcccggttctaactcgaggcagcatacttcacccatcgtggctcgcagtggccaagccctgcgccataatgcaatttgggaagagcatggcggcatatgttcaattgggctacattaatggcatatggtcataactaacgtcaggtgtaggtccaatattgcaaagggtttgcgcgaaactggcccgcggtgggtggattattgtcatattagggcacatatcgccagactcttttttatcagatatcgtacgggagcagaaaacgggaaactcttgaggaaatccaagtctacaaaggtatgtacagcctgccggctttatccgtggaagtatgagtcagacgcctccgatgatgcatctgacacgagacttgccataagccatgataccccactacttcggagattagagctctacttctgaaaatacaactgatatatttttggaaataaatgctcaaatctccaagcaccgttctgtccatatctgattgttagtttctcatgcagaatttgtgtgggatatacagctgacagggccagcattgctctacgcgctatttacacgggccagggatgctaccaaaaacggactgcatgagcgtcgaggctgaaagaggggttggtgaagctgaacgctcagctcgactgcgcaataatccgcctgcgtctggattgctgactttgtttga

SEQ ID NO: 1306 - DNA, 1137 bp, Emericella nidulans
tcctcccaagtggtaccctagcgagccccacacgtgatggcatgtacttcattaggcgcaatacggagatattgccgcctctggagcgtagttcgtagaccgaagtccacagtacagatagccaattccgccaccccgcatgaagcctcatatatcggaattgaagaacctgatttcgcgggctagaaccaatagaacccctggtgttggtggaattgaggtcatcacggatacagccgaggtctaaactaatctgcgaaaacctcctcgtaaagttgcatcccccgcacttctaaggatttcgttataagatgtgattagctgtagccgattgtctcattgagagcaccgggcagtgtgatccgtgtctatttagaatgcaagcgcctcgacagctactttctcctgccaagcaccttcgtcccatccctgttaaggtaaactatgcgacccggcgccagcctgcataaaaagatccctcgtaagcagagttagcccgttatatcaggtttgaaaggtatttgactactgacagcacctggatgaatggtatgccaaatgatcagagttatggctcgcagaagaagagcgaacggtatatctttgaagatccccagccctacgcaaatccgttcttgaatccggtaggaatcgacatacaattaggattagactctttgtgagccagagtaagtggactgatcgtccaccccgcccttgatcttcagtgtagggctcagcgatacgatattgcggggtatcccgtgtggggaacagcatcttatggtctgtgatgtgtgatcggctgcccaataatggcgcagcgccgaggccttcaggggtattgtcctggtcgaccatgtatggtatcgaccaccaacagtcatggtggcgcgctaggattgtgaagaatgcaagccacagtgctcattttgcggggaaatggactcggtgacgattatagaagcattgggccatctgcatggcgcaatattgcctcacttcgtcctaccaacacatgctcttcagcctcgctggttacatcgaggtcctggaatgtgattccgaggttgcactgttcataaggcagagatacattgtccaggatgataaatagcggacatggtcctcagttct

SEQ ID NO: 1307 - DNA, 3348 bp, Emericella nidulans
aatgttgctgaaggggtggaggaaatcatatgtgaattcctgcaatctgtggatctgccaggtcttcccccagcaagattatgattgaaggttggtatgctgatcatgttgctgcggaaataacgggctacagagggtctttgcaatagtacgcggatgcagattatggagttatgctgctatacaatccgcgcgtgtatcttgacaggtgacttcagaggctcagtgcatctcatcccccggattaccctgtattcaaagcctggcgatctgtattatatactgtcacaaacacagtttccagtccatccatgctttgcaatcaccataaataagtctcagggtcagtctttgcagcaggtaggtgtggatttgcgggtccctgctttctcccatggtcagttatatatagcaatatcgcgggttacagatatgcggcgacttagtgtcttgctgccgccaggtatttggaccactaataatattgtttaccccgaggtcttgcaggatattgcaagcttggataacatgccagattaggataatagtaaggttacagacaatgcagcctaattatgaccagaatatatagtatttacaggtatgcatatacatgtctgattcttttgtggtctgaatttactttgctttcatagtatccagtcccggtgaaaactatttacaggtgattatgacctgccaagagtcagaatctccttatccagtaaggagagctcagactcatcttcatctcctcctccctctccttcctcctcttcctctccaccaaacccctggaaaccagcatcatcggcgtactcggcggctaccaggagcagcgtctgggcgagagcttcctaggcagcagcggcggcagatgcctgtcgggccgccacggccagcatggtgtgtaagcactgggcgcggcgcgggaccctatctgcatgttcacgggtgtcatgactggcaaaatgaacccccttgcgggcagaggtggccggggctttgcctttgcggcggcgggcattctcttcctcctctttatcctcctcctcctccgcctcctcatcttcctcttcttcctctccagcaacaagcgcagcaagggcggcagcacgcttgcgggcgtgcttgggggtagtagttgcaggatttttgactattacctgtcagcagttattctttcggtccggatgatagaccatttactgtgaaagtcacactgcttgcccttactgccaaagtagcagttagcacaagccccctggaatcgcccagctaccactatacaaccttcaaacagtccactttccttaatgtggcagtgggtgcatggcttgggcgcatgagaaccaaccatctaccccagaagggcctcagaattgctgttacggacgtaactgaaggttttgccgtccctaatgtgcttttgccgaatctgaggctcgcagacagccggcatggcgagcagggctgcctgggcagcggatggtttaggatatttggcggcccagtgccactcggcgaccagcactgcaggcgggatttcggccgtggatgaagaagaggatgtggtggaggacattgtggttggatggatgtataatgaaaactggctatctacaacttacgggccgtcaaatgctttatatagaccccttgcagcccattgttgtagtttacagcgctttgtgtttgtattctggatatccagacaataatgtattatcttaggtcctttgacggtccgtcgattctttttctggcaggttatcgattcccattgacgttcagagtacaatcaatgtgttggtccaaaatcaattgacggtccgtcagacctccgtagcagctctatcattggtcgaaaatttatttacggatcgggataccgtttctccggtccgccgaaggctaccaaagtcccgcagggcctgccgggagccccccccgggagggtgccccgcagggcaagctgagtcacccggagcgtctcggccatcgaagcgctcccggagcgaagcgcaggtcagccagcgtaggtaggccagcgtagggtcaggaagcttgtgtgtatatatcgataactccactaaatttgtcccaagttcaacttctcaatcacggttttatcattgctttattcatgtaaatagggatctagtggatgagaacggtcaaattcgcggaatctcgatagatttcagtacgggttcgtcagacagtgggattcaggagggaggagagaatatattctattaatcctgagacgaaaagatgtaccgaaaataaagccgggctgctggagcggccgaaagctataagagatctatgtattaagtatatatgcatcgttctatgcactggtcccggtaagctcagttcacgaagccttgtcggccgcgggaccagcgctgccgttcgcttcggcttcccgctgagatatgctaggactagcaccagtcttaaggtagtgctcatactcgccgatccgctttccgcccttaatccatcgctcgcggtactccttctgctttagctcggtaagtttgtttagagcaggccaatatgccgcgtggtcgtacttgaactcgacgtcaccgcccacggacttcatgagctgggatggtgggacgtggttggttagattctcgttgaacttgagtttctcgcgggtaacggggtcgaggaaaggggtgatgattttaaagaagcccattatgataaatggcactagtcttgttagctaccaatctcccaatgttaagaagtgggaggactcactgttaataaccagcgcccgccccaacctctccggatagtggttctgcaaaaagtgcactgtatccttcgcctgtccaatgctagcattttgtccggacttggtctggctataatccacgattaacgcgagcgtttcctggtccgccggcataagttcaatcgcacgctcaagcatgaataccagatgctgcacttggcgatcgctcttctccgtattctggttcgacggcagcaaatacaggcacggccggccgtgaatatcatatccgagcaggacctgttttcctgtctcgttctcaatggagatataatccgctgtcaatttctcaatgccgtactcccggcgccaggtaagtgtgcgctgcagccgagccacagcttcgggggcgttccatttcgtggcgcgcaagtaacggaggagacattcacgtgtaaggaacatgcgctcatcggctgttatcggtgcagttggggcattcttcgcggctgtggttgggacagttgttcatccagaaacgatttagcacgctcttaatactggcttgctgttctggtgcaatttgg

SEQ ID NO: 1308 - DNA, 2716 bp, Emericella nidulans
tgaagaaggtggccattgtcgaggaatttagaagtcgtacgcattgccagagtacccagtaattaaagcaagcaaggaggcgtcagatccccctttcattgaacgcgcaatcatgtttgatgacaagcacaggctttaagctttgcacttgacctaactcctcccaaaaacatactctgccgatgaagcagacatgtttccgcacaactgctcatttaacggaagtcgatggcacgagcggcacgagctggagccttcctctgctagagacatttgcctcgtttcgtaaatcaaggattagaagtgcctaaagtctagcaacaaaaccgaaatgacgacttcagatcccaccgtcaccggagagaccacctatgacgttgtgattgtcggcggaggcccagtcggtctgcttctagcgtaccagctcaaaaagttcggcatttcagtgtgtgtgctcgaacagcacaagaaggagacgcaggatgcatatgggcgagctatcgccctgtttccgcgtactttggagcagctagatcagctcggggccgttgagccgatgctacagctggggtttgcttgtaggaatagcgtcacatataagaacggggagagaatgtgagttgttccttcattctatcactggcgatggacgggaaagaagcggagctgatatgatggatttagcatcccaggccgggtctggacgttcatggagaacatcaaagatacgacgttcgactttacactcgtcttgcgacagatgtatacggaggaaatcctcagggagaaactgaaatccgttggagtgagttattaccaaggaatggagtgcgttgggttcgattgcgatccaaataaggcgcccgatggattcccaatgacatctacatatcaaaatgctgtgacaggggagacgttttatctgaagaggtaggagcattctggcctgcgactatgttattaaattggtttgaaccggtcataagaaaaagcacatcgctaagccatgacagcaaatacctcatcggcgcagacggagggcgcagtttcgtccgccgacatgcagggataccctttgagggtgacatttccgaggatagatggatccgaattgatggaatcgtcgagacggacatgcctattactcgcgcttatgggtgagttgctgcgctgaggcgtgcctatctgcctaaccgtacctcgatcacgactgacacccagccctgcgtcctacgtacagcgcaattgaaagcgaaacacacggtaacgtcctctgggcacctctcgaccacggcgctataaggatcgggtatgcatacagcgcggagattgcagcaaagtatccgaacggcgtgacgcaggaagtcgcagtacaagaagcaatcgaagccatgaaacctttcaaagtctcgttcagagaagtccactggtggactctgtatacaatcgggcagcgcatcgcgaagaccttcgcgacggccaataaccacgttttcctctgcggggacgcagcacacacgcacagtagcggtgccgcgcagggcctcaacacggggatccacgacgccgtgaatctgggctggaagctggcgctgcatatccgggggctcacaaagccagaggtgctggagacgtacacggccgagcggctgacgactgtgcagagactgattgactacgacaaggacattgcgacgctcatgtcttccaagtggccggcgtggtatacgggcgaccccaatgcagacccgcatcttgttctggggcagatcttcgacgaagctgctgcgttcaatacgggactaggaatatcgtacccggcaaatgtgctgaatgatctcggatcggtctcttatactaacaacagcagccagtgtgttctcgcgcctggaagtcgacccccagacgtcgacctgaagatgcccgccacgaaccagctcgtccgtctacagaaaataacacccaacaacgcgcaattctgggtcatcatcttcgcaggaaataacagcccgagtattcaggagacgttgggggcattgcagcggtacctgcgggacaccgcgccagagctcatatcgcataagagcatcagatggttgacgatcaccacggccgttgggtgctcgccttacgaagctctgggaatggatcccctcggtgatgcgtactttgatgcagccaaacccctggcccatggtaggctcggtgtggatatggaggagggggcggcggttattctacggccggatgggttggttggtgctacgggtaagatggaagggcgctggatacgggagtatttctcgagagtcctatatttatagatgatcagcgaagctgggagactgccagatagaatcgcgtacaaaggatgctttgctgtccattcaccagcctctgcgtacggcgaaggacatacgcaatatccttggttggcgattctctgattatatctaacgcattaaaaaaaagactttcagcggtggcgtttcatcatctttacgaatcattaggatgaaaatgcgcataaaggaagtcgatttctgaagccttgccagctaaagttctttggcgggtgcggtttcctgaagaatatgtaggtggttgcaaggctgcggttgcttcttcacggatcacgggccagtgtgcccgacaggatcatggcgataattatttatgcccgacttctttactggcggacgttactcgttattag

SEQ ID NO: 1309 - DNA, 5305 bp, Emericella nidulans
gcatcgtcgatcatgtctcgggagcgataatcaatcagtcaatcaactgcggaggccaagatgcgggtgcagcacgagacctcattatccaggccgaggcggtcctgaattttggacagagacatgcaggcaagtctcccgtcactgaaatcacaggagtctgagaaagtttgttctatcgccgccaagcaattgcgatggacagggcgtgcttggcatcccttgtatgacgggaacgagtgttggacaatgtatagggaatctgtaaggttacgtagtaattgactactctgagtcgttgtacagatacagtgactacagtgaccgtattcattctatgtcttggctctgctgggtactctgtctatcccaccgtataccccgctgcggccgatccaatagctcttcggcgacactgagagatacagagagacagaaatccagttagagtcaaggagttcaatatcaggcgtcgagtcttagacactcagactcagttattgctacacggccaagacccctgctatgcattcctatcggcatcgaggtcttcggtgagaatgacgaattgtttgttttgctacctagatagataacacatctcttggcgaagaatgcacggagtcttccatacacgggctcggcctagaactgcgatgcctagatatggaaccccaaaaaccaaccaagacaccgaaatctaaaaatgcatccaggcgcaatgcactgccactgccgctggcactgccgttggcattcacctgaagatcgaccaaaaacctggagtagtaaccgcttcatcctaaccccacggtgtcaccccatagatagattcgactttgccgtgtcgaccaaaggcagcaacgttactccataggtctacggatcattgtcgatgactatttccgggggatcgacgcgattcgcatgactcccttccaaatcatcgccttggcattctattcagggtttctttgcggagtatggagtactgttgagtgaaactatgcaaggcgctgcgcatattttgggatcgaccagtcttggctatggcggctgccgtttagagaaggcagtgtcttatctctcggccgggttgatttacataactatgtgtgctaagcgaacccagtgcttgataggcttggaatggtatggatggcgcaattctccagcaatgcgaggatccctgtttacctaggatctgcttgtgctgagtgctcgtggagtaagagcgaaaatacgacgagcgagcgttggcggctcattgatgcctgaggtctcggctctggaagtctatcgtacggccaataggtatgccctaagtaggatggtgcttaccaaaatgttgatacatatatcaagtcagcttgggttagaatgccaggtgatctcgcccaagatactcgacagcctaggccaggatagtctatcagctgtatactaagcatgaaatctagttggcaatacttggtatttgattcgaactctgtgctagattatatatgttgacgagtgcacttatagggaagcattagagacagggttctcccgacttgcaaggtcattgataagacggggactcggatatcatgttgctctagacgagagctcatgcattattaccgtggtgaaggaacgactcttgttattgaacgattctatcactatccgcgtcgaaatcactgatatactggtgtcccagcaataagctcaattgggccgggcttgggtattagtcgtcatatctaaggccctggatggccaacatggcttgcgggcgttatatagacatcgtataaacttcgttaacattatagtatgcttcgaacaatcacctcagcacagcgttaatctgatagacaggacaagataggatctagggctttctggcctcgtacaaccttaacttcacgcccatccccggcgttcccacaatctccgatttatggaactgcctctcccaatctccaacatactcgatccgctcatacctctgcaggatcctcacaatggataccccatctctgcaagcgcaaaattctgcccgatacagatccgcggcccaccattgaacgggacgtagtgccatggcttcggagaccatacctcccaccgctctggtgagaatatagccgggtccgcaaacttctcagaaacaggaggatagaggtctgcgcggcgttgcatggcgtatgtggagtaggccactgcgtcacctttcaggattgttatcgggagatcgccgtttactccgccgcctatagggagggttgtgtctgttagggcgaagcggatgttgtagggcacggctggatagaggcggaggacttcgttgatggtgtgccggaggtagggcatatttttgaggtcgtcgtatgtaggagcgcgagtggggccgaccttgtcgaggatctcggcgcggagcttcgagtaggcttctggataatgggagagttcgtaaaaagcccaggaaagggttgcagcggtggtatcacggccggcgagaagaattgatacaacttggtcgcggatagtcttgggactgcgggtgtagttggctagggcatggaggaaggtgaatgatttatcggagctcttgagatcgtccgcttgaaagcccagtgtgtcatgaacgaatggccaaacaaagtcattgatcactttcagtccttggttgtacctcccgcgtgggtatagatactgggcaggactgcattcgttagttagcccatatttcctcattgtggcacgtacccgagcattgtaagcagagtctgtatgcgctggacgtctgcaaaagccagggcaaagtcggcttgtgggttctcgaggctgttgatgcctttcctagcaggaactcggtgatagcatcgagggtcattcggtagaacaggtccacgacgtctgttggctcgccacaaggactgtataaactcagcatcgtttgggttttgcgttcaaagatatcaaggtcgctgatccggtccttgataaacatgggccggatgagattgcgactgccttgccattctttcccatcagtagtgaagatactatctccaagaaagggaatccacagcttatgaaacagctcgcctttgccaaagtctgcgaactttcccgtgagaacagctttgaggtgttcaggttcgcgtgtctggatcacgcgaaatgaaccaaagatattgctctccacgcaatttggtgatgctggatcgccgtgctcaaggctctttttaaaaaactcgtataagcggtgctcgttctgcgctttgaccacagcgaagaagaagcgagtcacttaacgccttagccagagcatttcacgatggtacgcctatccagatacctgaaatgatgtccctagggatcatgggcgcatggatcccgccctttagatagaaacgccggtcatagaggaagagcctgatcggcctggtaagtatatagattagaatgaggccgctaaatgcgagcaccgggctcagaaagagaaggagatatatcttgggatccatctggctcatctagagtgttggtcacattgtttgctatctccccctgacggactgaatatttatatgccaaccgagttggtgagaggtataacaccggagtcgctatacctgagtcaacgtgtaaggctgtcacaacttcttgacgtggttggtccacagcgccaatacgctttggctgcggagaaccttgcaagccgccgcgatcctcggctagctcatcttagtgatagcctgatgcgaagcgcgtgaaagcgactagatggtctctcaaccgtaccgttttgagtactctgtgggtagcagctaaaatgtgatgttataacctacggagcatggaacgagcagcccgggctcccgcttctcaatagcgaatttggccctccagcccgtgcagtgacctggcagaagcactgcagggtcaaatttcagtaggtctttaatgctcctttcaatctgatttgcgtcgctcgtagccagatgaaagcccccaatcacagcatgcagagggatggaaccccccgcaagttcaagtgcatgttgagtgcagttgacgactccagcgtggctgcagccagtcagcatgacgattcccttgtctgctatgattagcattgcatgtgaaactttgtcaaatgaacaatcgcagacctttgacattgcacatgatgaatcgctcatcagctatggcctcgtccgatgtccattcattatcctctttgtcgaaccgcattccatgctttaggcccgcctcgtatggtgtccgccttggtatctcgccggagatgaggaagaagtcgtccagcacagtatgcgcgctatcgtgtttctggaccgtcgcaccggcagcttcaagttcttcaaaggacgggtccgcctgcaaggagatgatgttctcgccaatcgagaacccccgataatctggccggtttggatgaaggtcagcaatcaggtctttagaaagacccttggcctctttggcctcggtaatcattcgaaccgctcgaaggagaccgcctgtaatgttcagtttagactctccatatcctataagggcctggctgacctgaatggtcccggtgccaatgagacagctgcaccagctcgatcgaagatagatcaggcttcatccgtcgaacgttcctttcccaagcctcctcttctgggcctgcatcgaaaagaatagaatgctgctgatcgccttttgtcgcggtctgcgagatcgtaagcggtatgttgtacatatcggatcagacgctgcgtacaagtatgatcgacaagccatgtgctgagcagcatatatcctccatttggagttccctgtgcgcgtctcctctgtccttcaggtgatggggcgagttcatgccaaatggcccatcagacctgaaacctgaacggtgtcaggggaaatggtcgacaggggatccaggtcattgtcaatgaggacatgtgcctccagggagtcaacttcaacgagatccagttgtgtcatcttaatcgtaggagagaatgtggtgagaagaggatgttgaagtcaaaggcgagaaagagtgggggtcgaaaaagagtctcgcatcatcgttaaatcaaccagctcaacatcgattgtcgatcacgggacaatatatctttctatcttctgtactctaatactgttctaggaactcaagacgtatttgtatagagaagaccctcaatggccgtgaattgtaaacgagtgtgcggggatatataattcgcctgtcgatcccccataaagacaaactcccattttttctccttttaca

SEQ ID NO: 1310 - DNA, 3123 bp, Emericella nidulans
aggaggacttgaccggagcttccaagcccttgccgagagctcatcgcatcctgcagattcgcggcgctcgcaacgacactgaagagttagcagagtcaacctggaagaagcagcgtcatacgtaatatagcccagaatatccgcagctgaagtattgttgataatcggcagcgacaaggaaatcagcgagaaagaatcgttcgtggcgagcggtcccagaagtaacggctggttcgtggttatcggcacaccatcaaaagcgtataacttgttcgtggtcgcatcttctgtcagattcggatagagtgagggtggatatcccaatccttcatccccaagcatcaccgctgtgccattcggatgatcatagggaagcctgatttcaggaacctcgtcgctggtcacgttgagtaatcgccttgcttttgattctccgttctcgacatttctcgcatagatgctggcttggtagaggctgagatacccgcgactacctagggctgattgcacgtcggtgatcgacgaggcgaaattttcctcggttgtattaccagcataatagcgctgtaaggcggattgtatgagaatgcgagtgatgattgtcttggacgtcgtgtcgagtagatccaaattgctggtgatctgactagacttgatgctagcgacgagttgaaggctttgagacctgcgctggttagccaaagcacagattgcggaagatggagagcattgcatacttgacgtcgacgacgaagttgtagttgttaatccactgcctaggttagcaaatgccgttctctccaagtctgatcgagcgcgcttactgttgcgatggctagagccgccagaccagcaagggccgtcaagaggaccagcagccccaactgcacggcaataggaacgcgcattggaaaccgattgccgcccgttcatatccagcgaggatccgatgaatttgatgaaaggggtggaatgagagagaatggacggcgagaaggttgagcagcagggcctggccgggaccgagattgccgacgccaaccccaggaaacctgaaagccaggaaaacctgaatttatcgaacatctgccaaccttgcgcaatggcgattacccgcaggatctagatcggtccactgatattgcccggctcatcaaggccgaaacaaggcgctgattcgtgggtggattccgtgacaggctttgacagcggtctagacagcggccgttagaagagacgtgggccttcagaggaagagaacgtggtcgagccaagcgcaagcacgtgatagacaccgaattgtggactatctaggcctccagttgatatgaagtaccctggtacaactcttctgctctctcgttaacatggctatatcaagaatacctcaccttttctagtcagataacgccttcactgtccagtggtaccacctccaacttacagctacggcttcgatgaacccttgacagaccatcttgattcttcacaactgtaaagtccctcctaacttcttccttagccatcatcaccgtttacctccacactgaaaccagcattcagattagtccataggcaccatcctaggtggtgagcggtgtcctggggtgtgatagtaggagttggaccgcatagatggagccaaaagaaaggttggagtgcgctacgagcaatgttgagcagggactcattggcccgtggttcataggtcttattgataggatttgcagttcaaaactttatgagatacctgatgagagagcatgcttcactcaagattgattccaccagaaaactctcgacagatatcgcatgatcagccatgctgtgtatcattacgtcatacatcacaagcatcagacattagatatttatccacgatcataactcaagtgaggccgaagaaaggatcacaatcttcaaggaacaaagccaaatcccattaccgtccaataggcccgacgggcaatgtcagaagactcagcaagaacttgacgaccgtggttcccagcgcggctagggcctttggatcctgcagccccgtaagctgtgtcttgcgcctacagcccttcttgacaggtacaccactcagccgctctgtcaaccacatgaatgcatcgggcgctcccgtgattgtcatcagtgcgtgctccgccagcaaatctcggacatactcgacgttagccccgttgctgcagtaagtgtcatacaaggcatcggtgtctttcaccgggctgatctgatcgttaacgcctttgtagataaggattgggattttgggcgtgttgtgtcccatcgcgttgggctcagtgagggagttcgcaagaggggactcgaagacgttggggtcgttgacataggtgtagatgtccttgccgagatattcgatgaggttaccagtcaagcaaagctcctgagtcttgttgaattcggcccatttgtcggggagaatggcatcgcgaatgagttgctgggcggccggatattcgtttgcaaggccctggataccggctgggatgagtccagtgaagatgcctttgttcgaggctctgatgacaggtgggatttgaggaactgtcccgccgagtgcggcgccggcgatcttcagctcaggcgcatacgagggctgcagctcagctgcgaacccgcttgctaagctacccccagagtagccccagagagcgacagtggcctgggatgaaataccagtgatgtcggtagaggcaagcgcggcgcggacgttgtcgagcacggcttgaccggagagggtgttcgccaaaaacgcagagcggggcccgaggtggtcagggacgatgacaacgaaccctttgttcagggctgagctcatgaagaggtactcaagctgcggcatgacgagggcgagagcctcgcctgcgtcggagaactgctggatcgcgaacgatggagagcagttgggatccgccgcatcctgggcgacctggtatgagagaaccttggtgtagtcggcattgtggggaatcaggatcgtcgtcacggtagcgatgggctcgccaaaggaatcggtcgtccggtaaaggatctggtacgaggcatcaaggttcacttcagccaggccaaacgccgcaatgggataggggggag

SEQ ID NO: 1311 - DNA, 3065 bp, Emericella nidulans
tactaggacgcaactctcggtctggataatccaaatactagtataaacctgtgcttatctacatggaagagagtattagtaccaacgcctgggaatctcgcttttttgaatcgctttcgcaccatctcaggccatactgaactgctggcgtcttctcccttagcagacttgtctaattagctaatcctgcgcacgtacaagacattctttgcctccgagaatagaaaataccatataaagaaagcagagttgagtatctgacaccctctccaggtctgacggcctgccaacccaccaacatcttccaagccactcaacatagccatctagctgccccattaggcaccgtcctgtacaatagaagccaaatccaagcccttccactcaatgaggctcatagcaccccctcaggtcaaatcaagtccctccaggacctgtgcgattaaacgcttcccccatgagtaggctcccagcaatcctggcagtgaaagactcctcgtccctcgccaaaagtaaaaacaccgttgaggtggattcaaaccgaattggagacgaatgcacgatgatgccttctgcgcaaggcatatcagcccgcaatgctggtgccgagtgtatgctaataaacgtcccaaaacaaagacagcggtcgatagagaagataattactctgccgcagggaattcccagcttagcagaagtacgaagcacaacacaaacccattatgagcccacgggcgggcatgacagggctgtgagctatctgctgcgtctggagtagacatcgacactcttgagaaaacagaagtatttgacagatgccactacctgtcctcgcttgccttttgagtatgttaggccgacaagattatggtgaagaagagggctgttccgtagtcggccagatacaaccttctatcggcaaccgacggacaagtgtgacgcgattgagcgaacaatctttattagcataatcgagcaagatatattgaaatggcaagagtcgctatagcatcctagagagggaatcgaagttgtcaagtccatcatgtcgagatctgatccggatgtcaactattagaatctatgggagctaaaccccgtagctgttgtggcaacttctggccgagaaaatatactgggctactcttggtgatcaggagcccaagacatccgcatttgacaggatagaagagcagattggcgtggagcgcgagagtctgagctctatactgatgtaggcgtgatgctatgcagaatttatgcactttatgcaccttggcgggactccgacggtcggcatcgtcaggcttttcccaacaaaacaaccatcttcagggagccaccaggatgtcggccatcaagatgcccatctcaacatttcccgcagagctcatataccatatattatcgcaaatatttccgccagaagggtggggcaagtactggcctctgacgcgctctgttcatgatgtcaagcacttcctgaacctgaggcttgtctgcagtacgtatgggcgacccactagagagggctaaactgacgaggcattagaggagtttgacatgattgttctcgattactttttgacaaaggagattcttgcagaggactttgaccaggcatgtcttcagcggctggacccgccaacgccagcggcaatccggatgggccgtcgactgctagcccggcagattgagcgagataaggcccgggacactggaaatccacttgtacgtgagatcatcgcggttgtggacgctgctgtcagccatctacaagacggccaaccgagccgagacgacgttgagcagctgcgcgagacgtatacgcagggcctggtgactgccgttattgggttctccgggctatcgaaaacggtcttggaaggtatggtgaaggggaccaacacgcggagatcgcaagccgctttgcgacgccccggccaaagatatctcaacctggcgttgacaaccgccgcaacactaggtcgtatcgaggacatgaagttactcatggaaaaaggtgcagatcctctgtttgatgaacggggtgaatggattggcacgccgctgtatggagcagcaattgggggccatatagacgcaatcaacctcctggtcaatcaggcaggtgacgatctgaatagggatagcagatattcagggcacacgcccctgcactatgccgcactgaatgggcatgagcaattggtgcagtggcttttaaagcacaatgtccaacctgacgagcggaattattctgaccagacgccactattctgcgcggcaagtagtggctacgccgggattgtgaaggagctgttagacttcgatcgcgagcaatccgaggaatttatggcgaagccaccgcagaccgaaggcgacatggcgtatcacaatgggtacgtcgactggatacgcactaatatagagggcattaacttgattgacgttgatgcggaggattctcgtgaaaggacacccttgatcatggccgtgcagaggggatatctgaagactgtcgaagagctcatggaaagggaggatctgaacataaaccgtcgcaatgccgaagaatatgatatgagtcctttggcgactgcagcctcgaaaggctatgaagaaatattccgccttatcctttctcacccctcggttgaaaagagtaccagagatagtagtggccatgggattcttaagcacgctgccgcgggcggaaatatcaacatcgtgcgagaagtactcaaatggccaaatgtagatgtcaatttgcgtggcgccgacgactctacccctctcatgtgggctgccttgtatggccacgagtcgattgttagaatactgatcgatgaaggtgcggcagtggatcttttcacgagccagctacacctgcaattgatgcgactgctagggtccgatcccactgatgtggcccccagcattgagcttctgaatgccatgacgggaagtacacagcgtgtgctggttggctcatcagcgcttgatgccgcagtacatggtgagccatgagggcaccgtagaggtgttgatggaacaccctgatg

SEQ ID NO: 1312 - DNA, 2806 bp, Emericella nidulans
ggtgaacacctcataggaagccagatggcgccaaacattgcgccgtaaagacgctattcgggagtcacaggacgaccggaagctggaatggacttgtacttgcggatctggatgaagttggttgcaaacccgatcgttgtgccgatgcaaagagagatgtagggcaaaccggcaacaccttcgctccagccacgcttctctgtgaaagtgataggaatgacggagagaaagagaaaagtcacaaaccacgcaaagccgatccacatgccgaaggcgaagactgcgggcttggtgatgagcatgtgtacggctttgacagaagagttgtgcagggcgtgcttgagggttggcgcttcgagctcggatttcgacttgtaccggttgtcgccggtttggttgcgcaaaagctttgcgcgtttctgcatgatggcgccgccgcgggtttcttggaggcagagggcgacgacgaggatgaggggaatgttggcaagaccctgaataccttcgatccagcgccagccgatagtctcgtcaataaatccggcgtagatgggggcaccgacggtgccgagaatggcgacgtaggagaaggtcgccatggggatagcgcggttatcaggggtgtacatgtcgctgaaggtaccaccgacgaggatcgtgccgacagacccaaagagaccgagcaagccacggcagacgatgatggttgcaatgttcttgccgagggcaagaccgatgaacatgatggagaagcagatgaaggcgctgacgtagatgactcgtcgtccgaccagttcacagaacggggcaaggaaaagcggcgcaagcgcgcagacaaagttgaatgtgaacaggcccagttggcccagctctgtcgagacgtcgagatcagatgtcatactgttgattccggagctgtaggctgtcgtagcgagaccgacgaagagcgtcatgagacaaaggagcagtgagatgaaggctttcttggccaatggccagttgaagggattctcagggtctccatcgaggaatgtgagcaccataacatcttcgttcgtcttctcgagatggcccgcttcaactgctgtcgcggggaagtcaaagtcgacttcctcgggtgttccacgaccagaggtatgcacggccagtttttctgcttcgtcgcgatatttgccccctacgatccatgattttgtcttctcatcctgggtagtctccttgccctggttgatgtctttgagggccgactcagttggtttcgtcatcttcccggggtataatctggtatggggatagaatggggagatttggggcatccatatggggtgccggggatcttatttatgcagccaacgtcttgtaagtggactacggatgtacgcacagcgaccggctgctgctgagagatattttctgaccgtggcaagaaacgcgaggcctgacgacagcaaagtgaagctgaactatgtcacagtggaaactgtataagccttccgagcctggaatcggatagtgggcgctccggactcggcatgccgaagacccacggtcccgcaagtctttttgattggacagctttcacggaaacttcggagtgtcgtcactgagccgagccctagtcggccgagcagggtcccgatgcgtcccttgattggccaagatatcataatcggtccgcacggcaaaacatcggtaggaactgctcagggctaagcagaggtcgacccacagctacgaccttggcccgcgagtcagcccctcgtggatctatgacgatggcaagatacgggcaatcaggcatcttcgcggatggtcgtagagcatttttaattgtccccggccactcctgtagatcaggccatacgaatgaaggcacgctggccacttcatagcagtacctgacaacgaggtaagaaggctcacttgacagcatgaaggcaagaagatttcgctcagattcgcattttacataagctacatatggaggagatgaaaagtggatcagacgatctctcgtttggttgccctttcaagttcagggtttatcttgttaataatccaattacccaatttaaagcccaagagactgcaaaaatgagagacacgcctctatgtacatgtcagcaactgtagtagcacagtcactgaaggacttgggggcgatttatgttctgcgctaggttagtttcctccagatgcgatcgaccatcggcaagcaaaggtaggtctgaggaagaaaagatccttgcccaaatcttaacgactagataacacaagaaacattgcagcctggaaccaggttaccgtacgccatgactccaaaaccctattaccgcaatgccccagactccgtacagtacggtgtagcccggtcaattcatagagtaaagatcgacagccgccgcctgggaacccggggcatggggatggatgggatccccggatgatccaacggtgagaaatgttgaggtcgtgcggagagtacgaaggtagtattgatccaaggtacaaagatgcgttcaccagtcgtgccaactcgaggtaattatcttgtaaggatacgctggacaaaagcgagaacctcccatttttctttctgcgtctgggcaatcttgtttcagaaacaaaaggactccagcctcggcagtgtcatgtacaggaaaggactgatgcagtattgctgcctgcaggtgccggagcgagtgatcattgtcttcccaaaccagtgccgctcgacgaaggcgctaaaaacatcagcgaactcagtctcggccccatcgccatgccgtccgggtcaactactctg

SEQ ID NO: 1313 - DNA, 2064 bp, Emericella nidulans
acggccgataatacgactcactatagggatcagctctattacagacatttatttcagctgtcgcattcctccccgccgacatcatgcttccctttttcgaagaccacgtattccccgaaaccaatcttatatggcgaatcctgaccatgccaatgcaaacgggtatgccgttggcgcgtataacgggctagaagccgactcttcggtcaaatgcaatcgctaataccagtcagctacaatagtgacggcatcatggcggtcatgaaatccgcggagcggcagcgctgtgccgcaataatccagctctttccttggacgatgcacttccaaggaccggaatctatccgctacgtagtcaataccgctcatgcagctgctgttccggcggccgtgcatttagcctactgcattaaggcccaggatgcagagctcgcactgacgcttccgtttgactcaattatggtagatgcctcaacagcagacgaggagtccaatatccgcttctgcaagagcattgtacagcgcgcccaagctctgaatatcaaccatcgaagcggagatgggtcgcattgagggaggtgaggacggtctgcctactgttgatatggagggtgtcataaccagggcggaggatgcggagcctttcgtccaccagtcaggggtacacttcctggctccggcactttgaaatattcacggagagtatctgcccgggggtgcggagaaggcatggaatcccccggtatgtctttctcagctgcctgtccttcgaaccatatcgctgacatccagtacccgtctagactgagcgccattggtgacttagtgtcttccaaaataccactagtccttcacggaacgcattcagtgccagatgacctcttcaaaaacgatcgcttgcagagttcacaaaatcaatctaaaccgtacagttagtgacgagtatacccggtttattgctgataaggccgcgactctggagctgaccgtccttcaggaggagggcgtgaagatatatactaggtccattgagtggatgatggaggttatgggctctgctggtcgttactgaggcaatctgtactccaattaattctgttgagagtagacactgcaagtatccgactatccgttagagctaagcttgcctataggttttttttttttttttcttttaacatggtacaatctcaatcggttgagtcgaattccctgaggacacaaggaagactggtattcgggcatatgcagttggggttcccattcaaaaaggctccgaaattagggctgttttcttcgtgaagatgaacaggcgttccactcaactaatatatcttagttacaacatgcggccggagagcagctacataaactgaccgtgcgctatcgcttttgattccatctccaatattctcgggcgttggcgttgtgattgttaggagtgctttttactttggtatgaacagtattcagcatccccgctgtcattagccttgtttcttttacgacgtgacaaaccctctacatgcagcttccacttcacccaatgaatggttcgttttatacatggccgagcactcgacaaagacttgtcgagagaggatgtttggcgaggaagggtgcaggttgagcttgaaagtcttgagacagaacctcctttatatttggtgaaggtttcatcctctacctaccaaccatgcattcctaatttcaaggagctgttcaagttataaacctgcttattccattctgttttctgcaatagtactcgatctatcctcagagcccttcaaaggtttcacttcaagcccaactaagtttcgttggtgatgcgaaccatctacatcaccgccttaattgcatttctagccctggaggcctttggtgtacgtataatattacattcctctgaaagatctgctgactcccttcttgattaaagtatcccacagataccgacgccgtcaccgaaccggcctttcccggctacgaggatggcactacgaccttccaagttgtgccctacccgacgcggacaagatcaccttagcggcacatgcagga

SEQ ID NO: 1314 - DNA, 1073 bp, Emericella nidulans
ttcgcggccgcaattaaccctcactaaagggatctaataaccagaaattagctacaatttatccaataagaagtaaacaggattagaagcacctacccagaaccaaaacatcatttccatgaacccatacgtgaagacaaccctattcttcagattctccaagccagaaagctcatcaaacgccgtagggccagctgactgagcaatcccccaagcatctggcttactctgatatatgaagaatgacaccgcaaagaagagacagaatctcgacaaagaaactagtgtccatatctccgaatacagtgtcgcgagacgtgtaatgaacggatttgtacgcatgcgcgcgaaaccactcacagctccaggagcctccgatctggcggcctcggccatggccagaatctcgtttatatgtgggatcttggttacgaggatcaagtctattaaggcgtcggcgacgaggaggatgccgcacattgcgaaaggggattgcggacgcgagaagttcggggatgggcgggaatcctggttgagttatttcttagcaaatcgtttgttcatccggatttgggatgggatgaaagtcctgtaccaaatgtaggaattcccctagcatgaagaccacatcgctttccgtgataacttcgggggatttggtgaggtagacggcgagggtgaaaaggaaaacggcgtgtgccttgatcagggttttggaagagaggaagcccatactgggcgggacgagtcaagagcgatgacaggaatgaaagaactgtatatagattcaacttgctgtctccgtaccgagttgtgtaaggtgaagctcttccccgtagctccggtatcttttttgctccccttagaggtgtggggtcgagctacctacatggatcatcattattcttcctccaccaagaaaagcaagagagtcatgaaagttctttaacaaccgtgggaaactcagatactgctcctcaacttaatattcgtttctttagttcatttcgatctgcttgactttccttcagagagctgagagtcagccatgtcggaagctgtgtttcgaaaga

SEQ ID NO: 1315 - DNA, 6741 bp, Emericella nidulans
ttgcggcgaagagtgagagaagagatgccacacccggcacattaggaaacagcatgatgatatatagatgatgatatggggtaagtataaaccttagggctgaagaatatgaacagcagcgacgtagggaagaaagaacccgagattgagtctcaagatgcacgacaagcgggaaaaaagagcatgaccgctcgacgctcttataaagttgggaaggagcgttccgtctatgagaattggcagcatgaacatgggttggcgaggttagatgttctaggaaggaggcaggcggcatcgtgaacccgagttactgaagaaatgtctattggtccagccgaactctatagtagtcccaggaaatacgcccggggtatgacctgcagaagcgcctgtagacggttgacacatcatcttatgatctgtcttaccgcctcccatatatcttaacgcggtcctcaattggcttctggctcttctccccaggaactcccttagggctaccgaacaccaactgtgcgacaagtttccactcggaagggatatcccattgcttagcgactgggccgtcaattagaggattataatgctgcaagtttgccgcgaacgcaagggattcgagtccggtccagacttgcatgatgtcagcagaatgcactcacaacaaaggatgggaccaaaagtagggaggcgggggtcagacgcacggaagaactgatgcatggcattggagtgttcagcccaaggctgaaactggtttctgtatagagggaacttctccgagaatggcttaatatgcgttgggtcttcgtaaaagagaatctgtccgcacactcttgattaatactccgtagtccgtacttatcgcgatccatgtccaatcagtatctcgctgcgtggtcgagtttaacataccgttcccacgccggctcggaatccctgcagcttcggcagtgtctgcctttcccaaacttctttgggaatagcacctgtgttcagtaggttcttaaagacttcgattgcgacatcccacaggcgctcgtgctcgcggtgcaacagcacaagcagtcgtgtcgactgggtattgaaggcactggggacgttcagaatggcagcatgaacaagcttctcgatttcggagtccggaacagggctgttactgcccaactgatagacggttcgtcgagctttggccaattccaccaggatgtctgtcttaggggatccattccgcgcggagtaagagaacggtcgaacagctacagccttgtttggtgagaaaccgcggactccttgcggtattgaaagaggcaatgtaaaaaatagccgagaagcgatgcgtgggattgccatgctgacttgggtggttggttgtcagagccgaaagaccaaaatatatccgcacagccgacctgactgccaagactgagatctctttgtcacaactgactcatgattagaaagctcttgtggaggacggcataatagacgtaatggacgcaagtcaggtaaccaattgctgttatttaaaaaaaaagtctcgatctaccctagacagccgaaatatcgctcccgtgccgaaattgctcgccatcagtatgtatgaacaaatcaaacagaatacctcccaaccatgagattactagtaaaacggaacactgataaaagcagcgtgaagaggaaccgaactcagggtattctgcacaatatccgaacacctaatcaaaccagactcgcgatgacgtctgaaggactcgagggcctaagggacgtgatccataacgaaaagcgccgaaagaaagaaaatcacaaaactttggagacgatggcgttgatatcctcgtggtcatttaactttcgtggcatgaagactatatgcaactccagcacataagctgtagtccccattagatttctgctcaccgtgaacgtagagtataggattcaagagcaaggaaaaagccatggtctcacatagaaggaggtggctgcgttcgtggactctgcagagcgcagtcgcatgaacgagtatggtttttagcgcccatataccagccctcgctgagcaaacgatgctctagttctagccagtactgggctttgcccccgccggcggttttgagatcaagatcgccgaggcggatttcgacgcggcccttctcacttctgggcatctacaaaccgttagtagacagttgtaccgctgcatgccttctccagtgtaggactaaggagtgcttggagtgatttccaggttccaaggggtgtaatcaccttgatatacattgtacaatcccgaagagtcattgcaattgatttatcacgcgaaagcggcgagggcccatagagcccgacatctttcatgctcctctggtgtgctagaagttttaacagcgtaggattccggtagataactttcgcaagccgggtatggtctttatatcctttaacgaacttggttgcgcgcaaaacatgctcaaacttgtcagataccaggtccagagggcaaaatgatcgcacttccgatgcacccactcgacgagcatcgtgattcttcatatcccgcaaagcgcaggtgcgacatctgcgagcgctcaccggagcggatggagactggacaagccatttcggttttagctcagccaaatctgtcccaggattgccaaaggaggtcatatctgtgaccagcagtccaaatggttctgtaacagacagatacacaccccgcctttgcttcggccgctttccagtaagctcagcggcacgcagctgatcattgcattgctgggagaggccttttggtaggtaaaccagttcctggtccaccagctcttctgggttgaaaaggggacggatgaccctgtcaaaatttcgagcaatctcctggtaagaaacaccggccggtgtatccttgcggagtcgtagcagctttcctctgtattcagcaggtagaatttggtggtctgcctgggacacaatgcggtaaataatatttgcgccgccttcggcgaggtatgcaagctgagtcccaattgggagctcaaacgacttgagttgcgtcattggtcacgtcgtcgtgtgttgagttgttcttgatccaacctttctggaaaacaccatggccacgctggcaaaccgtcgatgtaagagtgtctacaaaccagaaaacctaaaagataggagaatgggcggtccagaagtggatggaattaagcaaacagaaggttcctgagtcaaaatggtagcctttagggcccgggtaaccggctgtgagaacggggcttcgaaaaagcaagaggataggttcgatttcgcacacagatgtgatttgggccgcaaccgattttaatactgcttcagtggcttgacgatttcaagaaacgtataagcctctttgaggttggcgaatgactagtacttcgtctgcctgaaagctcggtcacaccgtgaattgcttttttttttttccttcctttttgcggttgcttattccggcgtcgcctccgtatgagcggaacgactgtgcctcgtaacttgcagccaatcgatccgaaatgaccaaaaaataagctcgtagtagtaggtaaaagttatttatggcgcagggttactcagctgagatatggtgaaggatgcgcttgactggtgctggctgccgatgaccaccaggcgataagaccaagacaacccgattgcgtttagtgccgagggtccttgacccatgccatgagtcttgtgcaggatttagaccgtctcagcaggctgaacgtttggccactccgtcaatgctgcgccaatgggagctcgattggcaacttagatcgccgacaggctctgtacgccagtccggagtcctgatgacgctggcaccgctgggatggactaaaggctgtatggctgttttctgacgtcaaccaaggccggcgaagtttcgttggcaaggctagcagcgaacttgaacggaaatcccacaatgaaacgactccgcggatagcgcaactcgtggcttcgtgaatcctaggctgaatgcacagagcagctgagcaaaggaggctaggatggcaggatccagggcgtcgggcacggacgcttccaagtcgacttgggcagtctctcgcggcgcagattccaggcaaattcaagaagagtagcggtcagaacggcggctggttggttgcctgagaatgaccataagcgattgtgtggaatgtcacaggaagacgatctgctgaagtcatgcaagaaatcgcaaggacgagggataggctcagactagcagggatccggcggcttccagaaggttggaaagagccgggctgttccttgataataacgagaagatgagatggaaacaaggacctggaggggacgagagaaataataattgttgattgtgagtcgagaagattgcagaggtgcgaaccaagtcccaagttccagagctgtggatgccaatcgtgactgagactctgcgccccgcttgtgttctcgtgagtaacgtgcactctactcgattcgataacacgggtcacaccagtagtagccgcatcggcgagataggaaacctgcagccgggctcctagtgtgctctgactccggttcagatgtcaatcgcttgcatacagggatgaagcaatacttggcctaaccgggcgggtgatgcctgcagttggcgataccgcgatagggcgataggctgcttttaccccgcggctatgaggggcgccaggcttagcctcgcacgacgaccacccaatacgaccactcaacacgaccaccacaagctcgcaccatcgccagtggaacttgcctcttacaaggatcttggttctgctagtgtcccctgatatagcgtaatatcgcaagaagcaaacccaggaggcacggcaccagaatatcgcttcctgcacttcacccatcgcagtgggccgtttgcagacgtctgacaagcacctcaaacgcaccccgctctctctggcaatggcgtccatcccgacacccccccattgcactgcagacttctgcctgatccccgtacgtcttcgctagcacatgcatcaatcatgcaacaatataccccctgcgctgcggttcgctcgtttgccttgttcttctctatctgacgtttctgtcctatcatcgttccttgccacgaccatgtgaggccgcagctcagccgactaatatcacgattcgcacagattggcacctcctcgccatcagtttccgcgcaaattgcagatgtccaacgtctgatcgagaaatcggggctgaaatacgtcatgcactcagccggaaccactctcggtatgttctgcttcgtcctaccataagtacctcctcgcatcaaggacgctgcgtgatctagggtcccttgttatcgccccagattacccctcaacctggttgagagtcgtgccactatgcagatgcaccttgtcctgccctgactgggattttggtgtcagaccctgttgtaatgccacgagtgggctaacgattttcctccgcccctgctgggtgggccagatcgattaacagaaggttcatgggatgaagtacatcgagtcataggtcaggcgcacactttattgcatcaacaaggcattgtgaggatccaaactgatattcgcgtcggttcaaggtttgtttttctcgcagtggtcgcaggaccactcgctctgtgtgttaccagcagtaaccgggctaacgtcatgtccaattcaggaccgacaaggtgcagtcgttcgaagataaggtggccaaggtccaagagctcttgaagcagtaacgcaaatcattgacggggcgaagccgaaagccgttcagaattgagttcaggatttggtcccgctcaatacaaacagagaatcccggccgtttttcaaggagatctgcagccaccggttcgcggcgtggagtatagttatcttggcagtagttgagaagatctcaatcggatttacatgccaactggagtgagcggccgcccctgtctgtaccgtcgatctgtattctgccataacgaagccgtttatagtgacttactctgatttctccaaagcaggtagagtaactgtcaattgccgtccagtaaacagaagtatccttgcggctggctattcttatagcgcggcaaaatactctgttggtgatggccggctgacgatttttcagagtacaatgaatgatcagtactactcagccgtgtagacgaggcatagatgtgagattgacgaacctctctggcatatcaacaccacaatggatctaacaaaaacgtcagagagcataggtaatccgtattctccgcacctaagatcatgtacttttacccggttcacaccaattgcttctaaatggaactcctcgaaacagtaatatgcgtgcgtacactccaagtatccaatctcctccttaggccacgagcaatttgagcaggacggttcaaaccatctcaccgattcaaccgtgaatgttgaagagtaggtatagagtatgatttcctataaagttagactaaatcagaaccttgctgacaggtcggtaagagcttttctctgcgcaagggcagggtgtagctcatctacgtgggttctgcgagattggtgtttctgttgccactagaatacacattcggctcgtgctcgggcagcggtcatttcgaagtagtataaagtattctcactttgtcctggaggcagccagcaggtcaagcccttcacagccctgtagctctctata

SEQ ID NO: 1316 - DNA, 3168 bp, Emericella nidulans
ctattatatgatagctgtctgctactagatagcagtatactagtatagcactggtagtatattatctactaggactgttgaaacagctgtaggaggtactagtaccttggataagagtactactgctgcagattgcagtacttgggacaggattaatacagctgaggtttcagacatagatcaagattaataatcaagcagaacaggcctattttgtatattaggggggttattaggctggttacttatattaatattatattctgctgctgatgctgctggtaatagtaatagtaataatattaggatttacttatcctacctatctagctggcaggtattatatagcagcttatcaggatccttatcctggcactactagtatatatatctattaactatcctgtccagatactggttaaggatatattaataacaccctacccccttaataacctccatgtacacctgcacgtgcttgaacttggcatctaatacctagttaacctatagattaaggttgtcccagccctgggggtatataataacagccttacttgctaagctattatatcctatatacctactcttctagctatagttaagcagtatctatagccaacctagatagattatatactagatattagggatgttgatgcctatatctaaggtgcttgttatagtaataatatagatctggctactctggaattattatattatacctgtctagtctagaatagtactatagtatattttatagcctagcttatagctgatagcattaacctggctcttgatattagtatatataattacctggctattaccagcctgctagatgcactgctggatgaatctctatatattagactatgtcaactactagtatagcttgtaaggaatgcctcagggcagcaacagctaaaccatgcaatatataatattatactgacttgtctatgtataatagatgccaaccttgctgtatttatgcttaatatattgcaggaactgtgcttcctctgtcaggggcagtattgctgtcaaaaatactagctatgtctaggtactgataagatacccaaggtatgctattgccagctagaaatccttctgattattaaggataatatagtacttattaataataatctggttgagctgttgtatctgctattagtagttcaggaatatatagaaatctaggttcttagttaactcaggtattataagcatgattactgccttgtcagggggccagtagctctcttataatatatataagatacctagggcctgatagtatattatcaagtctatatatagtaatagcaggggtactactataattatatatccccctggggctgtatatacaggtaatataaatagtatactcttgctactatctataggcataattataactacaggactggtactatcctagattaccttcagtactagtacctgcaccctgcacaactatagcacaggctatcctgttatgtactacaatgcctgtactatatctatctaggccagctgctattactgttactcctgatagttaacagcctgctcctcctatagattagcatgcttgcctagtactgtattaactagtagcaggtctggaaaccctagaaagcaatactagtcagtactcaatgcttgaaactgcagctagtatattgttgtactgccagcaagcttgctgctctcatgcctatatattattactactatatagggcaagtgccctgcctgcttgtctgtaatattacctatcttatcaaggtctttgtctgcctccagggcagctattacctacttatacttggcctagatattattcaggaatatacttaatatatacaggaattaatagctgatgctaatagtaatattgtaatagttagtaatatttagtagatactaggtactaatactagtcttattctcctgcttcagcacctcgcgcaggtgcttgctggactattcacaatctatgctgatatctagcccctacagatacaggctgtagtatattggcagcttgctagtattactgccctagctggtactgctgaatattacctagcactatattactgcaagctggcgcacaaatagcagcaccagccacaagtactatataataagcttgcccacttcgcgaggcaggtactggtagatgatcttgatattattgcttgtataaaaccccttgtaatacactgtcacaaacatgacaaggctgtcctcaataaagatgttgtgatgccagttattgttggtattaatatactagatgctcagcagcttaggcatgtatgctggcaccttgctagtaaggtgcacagctactgccagcttttctttgaattgtgcgacctgctgaaagtacttctgaaccttgtttatactgacagtgccctgggtaataaaggcttgagcaacagccagttcagtactgatctggttgaccagctatgtcttccctgctacaggctacagcatacaagcatcctgcaggaagctccagccggctgcacccttagttggattattaaacagctaatcctacaggatggccagccactgctagtgatcaggctgatacagcaggcttgctataagctcttgagcagtactgacaatgctgttgttaaggatctactttgtcagggcagatcagcctgtcaaccaggtaaggatgccaatgccatgtaaggccaacaacaaggaaacaaatagtaatgtattgcaagactaaaccttggggatccttcagctgggggatctcctgtagtcctaaatatatttgtagaaagacatggatgtaacccaacagtaagaccatgacaagcaataaagtcataccaaactttatctgtaaacagcagccaagtccggtggtttcgatgatgcaacatgggaaaggatttctagatctctaatgcctatcttagagcttaatcaatcatttgcctgaggctcccaatccttgatatcagggcccagcagatccgtaacatgataatgttgagaaggtcttggaagtacatgttggcaaggtattatgcccatcaggtcatgcacagccacaggtttgtattatatagtatattactctgggctgtccggcaggacgcctgc

SEQ ID NO: 1317 - DNA, 5116 bp, Emericella nidulans
atccaggccagatccttgctcaatggaaaggagatcttcccaggcgctggtgctgtccgtatcggatatgctaaggttcctgggtcgtccaacgctggcactcctggagtcaacggtgcccagtcttctcctactcctgatccgaactcgaagtcaactattcctgatgaagagaaactcagcagcggctcaaacgttccccagattccggctctccctgatcttcagcccgagattgttcaaatcgttaaagagtttggagcaacggaggacgagaccacgaagattaatgcgagtattcagcaggccatttcatatcaggaattcagcgacgaaatacctcctattgctgaacctaaccaaactaggatgtttgatgcccctcgtctccgcgacatccgcaagaggattgataatggaaattgttcgatacaagaaattgaggaaaccgcaatcgccatgcttcccgaaattgcagagcttgcttccgattatctaggcaacaccgttgttcagaaacttttcgaatattcttccgagcccattaaagaacgaatacttgttccgatcgctcctcatcttggggaaattggtgtacacaagaatggaacctgggcagcacaaaagatcattgatgtcgccaaaacacctgcgcagatgcggatgattgtcgacgcacttcgaccatacaccgttcctctattcttagaccaatacggaaactatgttctccaatgctgtctgcggtttgggtccccgtacaatgacttcgttttcgagactatgctgagccgtatgtgggaaattgcccagggacgttttggggcccgagctatgcgagcctgtctcgagagccatcatgccactaaggaccagcagcggatgctcgcagcggccatcgctctgcatagcgtacagcttgctactaacgccaatggcgctctattgctcacatggttcttggatacctgcactttccctcatcgccggactgtattggctccgagattggttccccatctcgtgcacctgtgcagcacaaggttgcgtacctgacagttctcaaagtcatcaaccaacggaacgagcctgaggcgcgcaatatcgtcttgaaagccctattctttagcccgggtgacgaggtgctggaaaaaatcctcagtgatcaaacgtcgggtgccaccctaatttttaaggttttgacaacgccctgcttcgatgaatcaatgcgaccagaagtggtaaaaaatgtatcgaaagtgctcaccaaactcaaagccactccaagccagggctataaacgtttgatggatgaggttggactgtcgtcgcgaggtggttcgcgcgacaaccatcatcgcgataacacctcaagctccgagaagcaacagcatcggcccgcgtcccgacaaacaactgctgtcaattatgcgtcgagccgtcccttgaaaggcaatatagtgggcagtttcctactatgagccagaacctcgacaacgctcggcccatcccttcggaacagtctcacagcataccgtatgagccttattccgttaatggagtgaatgctctaaatgggttgggcgccgtcaacggcactggttttacccaggaacccatgatgcctcttgcccaacagcagatgcagtaccaggcatatctggccgcccagtctagaggagtgtcaccgggtctttaccaggctttgggcaattctacctatggataccctgcggggtcagatagtctccgacccatgcaagctcaacctggacaagtcaattcgggctctatgctcaaccagccaccttacccacctcagcaattcagccctattatgggctcagcccagatgtatcagtacccccctcagttctactctcaagcggcccctgtccaaggacagccgtctgggggacgacgtggacgtgtgagttactcctagttgtttgagttacaaatcggaagctaacgtgcattttcagcgctgaactttgcctataccttctaatccgtcttggcttctaacagtgtataaagttttttaccattttttctcatctgctgtgatacagagtaggatggatatatgtcggaattctcccatcgcacctagatcgacgctggatcgtctatggggaaggggactgcagaagcgaaggaaaagtgttgcggttgtttgattcgggcatagtggtgcatttgacgcgggtcctgaggtctccaggctctgcaaaatttccatcatagcctgttggatataaaaccatctctattgtttagtactattactactttcatgatcatgattatgattgacgaacgtgctcccggaatatggtccagtctgttaccttcacgaaacattgctagccctaaatgctgttcacggggacacctaaatcacctcttgtggccatagacgagtcattcatcaaggctgtcacctccaactttaaccttctgcgctgacgggttcattgtatatccacttttacttaatactatcgcaacacctaggtagcgctgcacgtgacacccagatgcggcactccgtgttcaaggaacgacaacatattagagaccaattcatcaagaatcgccagacgtacagccaggattgataaatttatatccctaaatctaacctgaattgctcgctgctgttctcttttctacacccatccctgtgggaaagtgctgaattcatcgcgccgtgattatgccagccaacggcgatatcgctcgcggtatgcttcgcacctaggcctcccgcatctcgatccatcgttattactataaacctgtacttacccataatatatactaatgttgttgaacaatacagcgtcgccggctacgtcgggctccggaggtttcatcgaagcgtcgggatacaagttttccgagaaggataccaagccgggaaagatcaagctgaagaagccggggaagctagggaagaagaagggtgagaatcagtctggcgcgacctgttaaccattaatcaactgacaccggatgtgtcgcagataaagaaccaccaaactctcccgattcatcgccgattctgccagagatcgatgagaagacgatgtctgttttcccgacaggaaagccgcgcgaggaagaccatctcgagactgtggtttgcaagacgtgcaagaggccggttctcaagcagaacgctgcagaacatatccggggatgtataagggcgaagcaggagaaggcgcggaagagaaaggagcttcgcgacgcgacgaatagggccaaagctggagaaaaggagggtgatgatgagggcgcaggcgttgacaagggtggagatggcgatgattcaatgaaggcgcagaagagtgcaaagaagagtgctgtcaagggtatggcggatgatggaacgaaaaaaggtaagaagcgcaaggcggaaggcgaagaagacaataaggataaagaaccgaagaagaaaaagaagaaggaggagcagaagccgaagactgcaaagccgaagggtcctgttgatgttgagaagcagtgtggtgttccgttaccgaatggtgctcagtgtgcaaggtcgttgacctgcaagagtcactctatgggtgcgaagcgtgcagtgcctgggcgttctttgccgtatgatatgctgctccaggcgtatcagaagaagaatcaggctcgccagcagagtatgttccttcttagctgggtttggttgactctactaatatggttcacttcgcagaggcggccattgatgcaaatgcgccacttcaagatgacctggaaaacaacggccctgtagattcggatgaagaaaaagatgcagttatggctgcgatatctcgttctcaaccacagcccttggtcacccacaccctgatatccacaaagaagaagtaccagtttgtgcggatcaaggaaatgctctcgcatgcgctgggtggtgcccgcggcggagggctcttttcgaccggtgaccaactcaatagtcctattgaagggaatctctttcaaccgatcgacgatgtcaacatggcagatgcgcctgacgatctcggcaacagttcgaatctgcccaccccggacgttgcgagaaagactccagttgctgcggggtcgtaagtattatgactattctaccgttgattatacgatttctcttcttacaagcatatgcgagcgatggtggtctattggcaaactggtataattgagcaggcgttggtggtcatttataccctggaaccaagctgtttgatatttttgtgatatttgcaacgcgataccctgtgtaactagtcattggttttcaaattgaagtatgacctcccagattcagaatacatttatcttcgtgcattcttaggtactatctcctgctaagctctgcgttgcctcggaatggtaagtccctgcctgaggcacaagaccctcatcgtcgttcaagacctaaagccagtacaatgaaagaaacctcatacgggtcgcacttggacggactcgctcctcacacgcgatacctacggtactctcttccaagcattttatcttgatttaatttaacttttgacctaccgtgcaacctctatgcctgccgacaagtgagcaagagctcgcgaacgatcaacaacagccctcccccgttctagcgcgcactcccatccccgcctctgtcgccggctccgagaaaggaaagagaataatatcgggagatggggaattctgtgcctgatctcgatgcagtcggcatgaaagccgggccggagctggctgatcaattccgcagagaaattgcaagcctgctaggtcgcaagaacctcagctttcctggcgctcaaccggtcagcttctcgcggcggcacctcgccgagctccaacgcgaagactactatgtatgcgaaaagactgacggcatccgctgcctaatgtatttcgcgcatggcgaatcaccagaccaggagatccactacctgatcgatcgcaagaacgagtaccgctacgttcctggcctgcacttccccctgccgggcgatgagaccttaaagcactttcacgtggatacacttgtggacggcgagctggtcaatgatactgtacgatgacggtacacact

SEQ ID NO: 1318 - DNA, 5090 bp, Emericella nidulans
  unsure (1)..(5090): unsure at all n locations
cttgcaggtgtcgaaggtattgttgcttgcgccgctgggcccagagcagcgctaaggggggttgcgggaagcgcaacagaaggtgacatgcttgtgttgagctgagggtgatgttgttgatggtgatggtgatgctgctgctgctgatgtgaagtttgggacggcaagggtggtccgtatatggccggggggcgttcccgggagccatgtctgcaagatatgaccatggagaagcctcgatcaagcgacctgcttccctgctggccttctgcacaggccgaagaatcacgattacttcagatgggagtaagtgcatgctccgtacttcgcgcatgtcagtcaccagttcgacaaaagactgcataaaggctttgcatagttgccagaactctcgttggttccgcattccaccccctggttccttcactttcatattagacaaacgaagcccgagggcttctgatacttccagacaaacccggcagcggtgaatgaggttgttccatagcatctggatatcttcgaattcccgattctgttccgcgacctccaggttcctcgcaaaatgacggcgggcaacaggtagcgcttggagagcagcggtgtaagcagcggtaagttggtagaaaatcttctcaaagatccgttcctcttctatttcgtccaagccggtcaaggggtttattttaggtatcaccgaagtaggcatcggagggaaagactcgcctgaccgaggagtagcaagggacgagggtacggatgtgttgacatgattcgacctgctgctcgaccgactcctcgctccatagctgtatggagtgggagcgaagcctggagagctaacggcggactgaaatgtggcagaggctggcaggggcccatgcatattagtttgtggatgcaagattgttgtatcgctacggagccggcgagtggagaaggacggttctcttccccgcgttggggtgactgttgtgcagtggtatctatctgaatccgcagattctctgctgatctcaggtactggtggccttccagtaggtctcggtcggtttccaacaggtacctccaagcatgcacatgcgttgcggagctcaaccacgctaccaaatatcataagcatcagcgagcgaatgtagcgcgaatcgccattggcaacgattctgtcaaggctgttgcgtaactgggttccgacgtgagagtacgccatgatacacgtctcgcattccctcttgacagcctcgtaggaggctcgcattggctccgcatcatctgctcgtgagttttctgcattttcaagcgcctcatttagtcggtccacatgagtggaagcgttgtaaaagacaatttcgagactatttcgccggtaatcatcacgcttgatgacatttataagggcatagacatgagactggacttgaaagagggcaaaaagaattcccttggcgctttcgattatggggctttcagtttcccgctcgcccttgtgctctggtagactcgacatccgattcacaaatccatctctgggccgcctgcgctctcttgggctgctcggactagatgagttgctgatagatggccttgtccgaagaatagatccataactgagaccacggaggtgactattgcggtatggccgcatttcgtccagtgtgcccaagtctgtgttctttcgactgatgacccccatgcgcttggaccgtgttgcaaaagaggcttgaatgataccctcgctattacttcgattccgctcattagccccaggtatgggaccgggacgctggaggatttgcagagcaccgccatgtccagaagcaatgcgataatgtgatttaagtgggatgggaggtggccgtgataatgacggcgatttagggtcagcgccgtcgcctgtgcttggaatcactgggaagcgactgctcactccccgtttgacgggttttggagtgtccaagatgccatcactacgtcgccgagaattagctcaaacccaacgcagccggctttcagaaacatacctttcgttgtttgattcaaaatcattagaattaataggttgccgcgccttaagataccttttaagctcagccgttaaagcaacttctttttcgttatcgctcatcattgaggaggtaatctcggcctcagatgtttctattactttgcggagcgggtaccgcagtggatttccagctactttgaggatctgaagcttgttcatatccgacacaccaagtggtaaatcgtcaaggcggttttgcatcaccgacagaactcggagagatgttaatttctttatttcctccggaagctggctaattttgttgcggctcaaatccaaaatctccagtaatggcagtttaatcacctagcataccagtcagaaagctacgacaagaaatcaatcagacgaaacgtactcctctaggaaattcacgaaagttgttagatctgacgttgagatatcgaagatgagagcactctgcgaatcggtaaggaatatggaccagttgattgttccataacgagagcctacgacatagtcagcatcatgtggaccaactttcattcgcttcgtgcacgatgaatcccaggagctttgttattacacaccgttcaacttcatccttgataatatccacaaccggctccggtatacgactgatatttgagtggcccaaatcaatggtcagcttcggcttgaccacatcaccgggaacttcgcttcctgccaaagaccgtttcgtttcctggatcccgttctctactgctcggcgcgcaagttggattgtctcctccggcgtaagcgattcacgcgactttgtcggcctgctgctggtatcgccggtagacccgttcaccaacgtggcttcatcttcgctcttattcgacccgtcggtggtcgaggatgacgaggataacggcgccgctggctcgggactgtgtcggttcgcgtcttcctcttcagtgtctcgatatgagcgaggcattcttagactatcctccggtcgaaccaaagtagaaatcatggtgagtgaggaagagccacagttaatacacccaaagcatgcattcagacttggccttccaagctatccactcaaacaacctgaagatctccgcagcccgtattcgggtcgaaaccaagcatgatcgataacgaggtattgggacgttgataatcactccggaaagcaagtataatgatagagatgtgcgagaagtcgcgaacagagtaaacagaagaaaggatcacgtttgttcgaagcgcgaaacagagccgggggcgagaccgtccgttgcgttgaaaaatagaccgtagctcgtttaattcggagtagaggagcaagggggaataactgtattaatcgtacagaggcaaactaagtcgtcagaccgatagactgtagatatcaaaaggctggcaggtcgctacgtgcaatgctcaaccgcgttgggtcggtgtcatgggaacgggcgtgctaggagattagcgagatactaactggggaaaaagcctcatctaataagatgaaggataaatatgaatatcataaaacacaattgcagcagataccattcgttctcgcattcagtaggatcaagcgttacggcttgaggttgatgtcggggtgaaacagtcggagaagcccaagttcgggtcgccgatgaaacgacgattggcccaatatccaacgccttgaatagtccactgttcgcctgttttctagacaatacaattgtgtgtactggttatcctgtttttgcgtgtttagttgtagatttctgatttttattttattttatttttgtttgcgtgttttagttatgtagacaaatgctgctcccgtcacgtaaaatcgacctcaccgggagatttatacaggaactgaatggaccaaacaaagtacaataatatacataagccgttggtatcgactatctcctttcagaccagacaccagctggagagatcaagccggctaaggaaggctctggttttcagagccatcctccgatgttgacgcctgatcgacaatttgtgcttccgtcttcgcccatgacttccaggcttcgaattgctggttttcaagttccataccaatctctaggcgagaaggtccaaagaccgcacctgtagcctctgcctcttcaacagctacgcgacgctcaatatcctcctgtaggcggagtcgatagaattcgcgtcgcgcaatatcgtaagcacgactttttgtcatatcgggaacgttattcaggagccacagctgtcgttgcacgacgctttgagaacgagacattagccactataggataacatagaaggacaattccaaactaccaatacatacctctcgccatccagcttcttgcctggctgctgcattctactccagttgtaacgctcagaatctttgcctgaactctctaccagaattctaggcctggccagttcccagggatggtcgcggaagaactcttttcgcaactgatcctcctcgtacttgatctcgacgggtaagaacatacgactggctttctttggcttcacacgctttgtctggacctgaaagactggctgcggtgttggatttcccggtatagttttcatgcgttgccgtacaagtgggtgttgctggggtcgttcgcgcacgaggatttgggcaggagggatatcgccaacgacattaacccatcgagggagatcgcctttctttccagccgcaatcgagtcgattgccgtttttcgcacttgaagtgctgtgagattgtatttccccatcgtcgagaacggttgctcctgtactgtttttgaaggtgggagcgggagccgtgtagcagcttggagattaacggctactttctggccggaacgcctcgttcaatggccttggacgtgacctcgtgagcgaggatgaatgatggcttgctgaagaggcgtgtctggtgaggagctggacgggtggacgaggaaaagatggattggcaatgaccggctccgattgtccgagcgcagactccgtccgtncagaaagcgcatttgctcaatattgactcagacaggaccaaagcattgtattcacgcg

SEQ ID NO: 1319 - DNA, 3140 bp, Emericella nidulans
ttgatgttgggaatcgtcatctccattatacccatcacttcccgacgcataggacccacgctcatggttgaacgacggccgacctgaagaggatacttcgtcaatgtcggtgaggagactcggattgtggccgaaaaggttcaatctcgaagcgcgcctaggaaataagacactgtcatcgctggcctttccgataagcgattcggggtcgtcttgttctcgtagcatactgaagcgcgctgatagtttcggcataagcaagctagttcggaaatcatcggtagacggtaatgcgcttgagaggtcgatgtcaagatcgggctttgactcgggctctttcttgttcttcttgagaatcgcgccgaatgtagtagggggaacactggtttcggtaaccacgacatcctccttggccttctccctcttgacctccttctccttcttcgacttgcgaaaacgattcatgatggcgacgactccaccagggacaaatatcgcgttgaccaaaacgagtgccgctcaatccagtctttcgaagtcagaatcaagcgcgcaggtgatacagtgggttggcgggaacataagaatgacctactgagcaaaaagcgaatgacggaaaggcaaagccttcagtagataacgaagagacgaaaggagaaattcaggtacggaaaacgaatgtgagcatcagatcaacccctggggcagattgcggaaccggtccgtggccgattggtggtgcaataatgcgaggtgtaggacgagcgaagtaccgcggtgagaggtgtcgcaaacaacggctgaggacgagtaaaagaatcaattgggatgatgaagatgatgaatcagtccgtcaatcagctcgccccagatcattcgatgagggggttggtgggaggaatgtggctgcggcggaggcgacgatagagtatggagtcaaaaagaatggactggaacctaggctaaggtcaaactagatagggagagacaagtcgactaaaagatctgattcgatctgattgagtccactaattgaagtcgaatgggtattgaatgagtagagagtgtggtcgacaagagagatctcgagtaaagagtgactggaagagaaaacgagagagagacaatcttagagagcgtgatgaccgagaaaagaaggatctcgatcgacgatttaatttttaatccaagtcaggacagtctgaagaaaataatattaacaataaataataatacaaagtccagactcttttcagctccagctagtttgttgggtcgcggagtcgatcagcacgcacataatacatacggagtacgctggtacactggtacaactataatttcctccgtctccagtaccgacaaacaaggcgcgcactctgagcagtcccaggctcaaaccaatggctgagtcctcatcctcaatgtctcgtctccgccgatccgctgcatgaatcatcccatcccatctatttcacactctctggattctgctgtggctgactgccctccatcgtgtgtggacggagactcctcactccatccctccgaattaaagtgtttggaaccatggtcgatactgtacggtacagggggtactggggcagtcacgaccgagcccttgcaggtccactgcgcctgcccaatcagtcacttcccggaatgccgggaataccggttagtggttctatgtgatttagcgactaagctctacagagtatcgagtctatcgactccaagaaggaaagaatacgatcactcggaagaacaggttgaaactcggcagaacttggaagaaaaacatgatctcatcacgacatcaattgcgtcggttggatttcatgtttccacgccaagcaggcactctgcaatcgcagcctccaatatcctagctcctgcatatggattccgtatttaacaagtcctcgggaccgaatcgaatccaatagtcctcacactatagtggcggcgcatcagctgagctggacgctcgtatgtgacctatcttcttgaggactcgcccccctcagtcgggtgtttcacaaccccattcagcgcggctattcgtcgcgctcgcgcaggatctcccttgaccataatgctcagattggagcgatcactttgttgtacagcatactagcaggacactgcagaacccgagagacggagtggcggcattgtgccgtgcaatgtgcgccgtctgtgccactgcatgctcatgactgcatctcggtacgatcaagatcgcaggacgaccacggtcgttagagttttcatccccgttaccccgtggctttcatcccaaggttaatcttgtatcattattaccaaggatgtcgggattggagcccggcttctgaggtttgagattatacttcgtacttttttttttgacagccgttgaattggagacagtcttgcggcgtaatgccaggacagtcacagactggctgtgcccctgacgctaagcaaatttgaggatggctaggcaggcgactcgggaggggcgcagccctagctgggagacgaatccctttgtaatgtcagctaattgtatcacacataaagcaatggtgaaagtggtgaaggcgagcgataaaaaaaggcattaggtaccgagatcacagacccagatccgtagttcttcactttttgtctgagcttttaatccaagccgtcctgcaataatcaaaattgcatgccgcactcgatctgaatcagatctaaagcggagagtcccccttcaatttcatcagccaatgatgcccaaacagccgtattccctccactgggtgatgcgcaatcgcaaccgccggcgtttcagttaccttcaggctgaggactggcaaccaaccaacagcgccccgtcggagctgaccggtcggccctctgagcctctttacttgaatgacgcctggagtatgaatcgacgacggcttcaaagtcttctaaagcggcgctagaaggtcgaagaaccgttggtcttttgcttatctcggggcaacatttcccaacgttgtcggcccctagtccctcttggtgcgagttcgcacactagtttggggcatcgggcagcaataggacagggcaaggatttcacatcatgaatcatgaaccatgaacctatctcattctgaaaa

SEQ ID NO: 1320 - DNA, 4004 bp, Emericella nidulans
  unsure (1)..(4004): unsure at all n locations
tcccttatcatatacgcctctacctacttttatagaactcttggcgacgacggacctataggacactttataacgaacccagcgtcgatctatctagatcgcggctgggcctcgtccacgcacttcctcacatgctccggcatccgccttagggcgagttcctgtactagtactccgtacatgcaaacatgtgtttcaaatacaaatacgattaggttgaacccgcgttttccatgaggatcgagaattggatcatacttgacattgccactatctggtcttgtgatgggcggcatacttcgttttggcagcagtcactctgtatggactgccccgccagccggtaacgtcagagtctccgtagcgccgccagcaaaaaacctcttagatcccgcagtagcaatacacctttctttcttagtttcttaaccctctagatctgttctacaggtctacgagttttctcctattttctgcgcgttttagtgcttcagacttgtcactcgctcaattgccagtcgttgctttttcacgcgcagcatcatccttccccactgtttcccgagacatgatctcgcgccattcaaatggcttcaggaaccgtaggaccctcgccacctagtggtgtgcagggctcatcggcctctgataactccgggaacccaactcccggagagattcatgacagggagaagcgcacagttgcgtctgtccggccgcagacacagcggcacccaaaccctttcgtcatcaccgagcggccagaggagaaacagctggggatctctacccgtcagttgagcgtccgcgacttcgtattgctgaagaccctcggtaccggttagtaacagacctctatatatacgtggctggaatctaatggtggtatctgtcttgcgcaggtacttttgctcgagtatggctggcgagattacgcgacgacaaaacgagaccagagaaggtctacgcgctaaagatcctaaggaaagctgacggtatggacaatcaaatgccatcccactgtcacggtcttggctaataaaccgggactctattcagtgatcaaactcaagcaagtcgagcatgttcgcaacgaacggaagaccctggcggatgtgtctggccatccattcatcacgacattaatcgcctcattttctgatagtcaaagcctatacatgctggtactctccaactctgcgtccactgtctttggtcgttgactgacatctctcgagcttgactattgtcctgggggtgagatattcagctatttgcgccgtgcgcgacgtttcaacgagaatacctcgaaattctacgcggccgaaatcaccatgacgatcgaattcctccacgatgccgagggtgttgtataccgcgacctgaaaccggagaacatcctgcttgatgctgacggtcacatcaagctcgttgattttgggttcgcaaaacaaattggcgaccgcgaaacgtacactctatgcggcactccggagtatctcgccccagaggtgatacacaatagtgggcatggccttgctgttgactggtgggctttgggaattctaatatacgaatttcttgttggtcaaccgcctttctgggatcaaaatccaatgcggatctacgaacaaattgtcgaaggtcacatacgctacccttcgaatatgtcacccgctgcacagaacatcatttccctgctgtgcaaaacgaacccagccgagcgccttggacatatttcgggcggctcagccagggtgaggacgcatccgttctttgagaatattaactgggatgaccttttctatcgtcgtattaaaggacctatcatccctcgtgtcgaccatcccgcggatacagggaactttgaagaataccctgatcctgatccgaaatctcagaccatatacactgaggacatgcgttccaaatatgaaacactctttagcgatttttaggacaaccagcagcacccgatcgctattataactgtacgcacattcaacattgcggaatggtatcacacgtccaacaaccggactgtgcgggatccctagccgaagaagtaggcttcggcccgcttcaaaagccagagtataaagcaattctggtacacagcagggcatcctatgctacgcgagactcggtcgcagcggtttgatcatcttcctcaattgccgctaaatcacttctcaattgactgtcagactgcctatatcctcataccggttggggacatggccgggcacgcttccaccatctgtctttgcatgtcaatacctgtcctttctcttggacatatcaccccttaatggtttttccaagttgcgttcccgattcttccgagtcacggagagattacaagcactattccgccaatccaagtccggaggccatactgtacttctcttgacttccatcataacggctccatctctttctgttacctatcctcaagtgctggcattttggctaatcagtcaatgatggatccactatctactcaccatctaaatacgaagtctttttttgcaacacatttcgccgtgggcatttgattccctagctgtccgtattactgcatatgtgtatatactcctaaagggatcttggtatagtgcataattaagtgcataggtagcttccctaattggctgtagatattaccttgtcttatgcttttgggagacctacgattatgtctaagagaacctatactatttacacatgagtattttattaccaaggctagcaaactccaatctgtaaacggactattcaatacagagtactttagccgggcagatatcccaactcccaaactcaatgaggaccaaagcccaagcgactaaaccttgaagatgaatgaaattacgaacgatatatgagccacataagaagaataagtctaatcgaaagaacgtttctgggtacataccagcactcagatgacaccgcgcgaatacaccgacccctaaagatggtgattcgtgaagcaatgttcgctcctaaatagcaaacatagaagtttgtgacggttttaaggatcattcactggcccaggatgctcagaggcatatacaggttgtcagcgcaatcgtacagtgactcgtgagatgattttggccagttcaaaggtcatagataactgtcaagagtcgtctgatcaggcaatgaaggcggagtagtgaagaaattttcgaaatcctctgagcccaagttcatacaaggggtttgcattcacattctcgtcgtgctacaagtgacattgaacaaggaggccttcaatagatgaggtaagccctgtccaagcctagagattcacggcaattcacaagaattagaccagtcaaaggaactaaagagctgcagtacatatatgggcatatattaaagcatgatctgctattaaaccctctattgattactcagaacatgtaagaaagaaacagcacgtatacacatacacatcgttactgtgngcgaagcgcatatggctaggttgacaaaccagccaacggcaatcagtatcaccaactccagaccgagaacgatagaagggctgccggctcagaagactgttttactggcaaccgaagtcgccaaaggcgtgcgcaagagtccctctgagccgcacagcttgtggaatctctccgaaacgcggggctgttggatagcagtaccagttggaccatcggggaatagtgagagacaacgtggcagtcacgcagagccggtgtggcctttgaagcggcaatgcgtcattgctgcttcaggtcctgtgcgatgggcttcaaggcattgagattccatccctatcgcgaaaagccgaattattcgatcttgggcactaaaaagatgatcttcttagagcgagggatcggttttccacgttcctagccaagttgtcagcttgcaattaacgagcaacggagaagagatggcctacctccaaaattgtgtttgacgaatgccataggatccctatagtagtcgtattatcg

SEQ ID NO: 1321 - DNA, 3872 bp, Emericella nidulans
agattgattcgccaggcgggcgtctcagtggaaccgaattcctacaaggcggatggccctctatcgaacaaaggtcgagattacgccaagaagatgactgaaactttgctgaaggacagggagtccgagaagcaggcgatgatcgaccgaggagagactgattacgagctcaagcctttgacggtatggacatcaacgagacgtcgtacagtcgagactgcaaagtatttgcatgaaaaggggtacaaagtccggcagagatcacaactgagccagctaaaccctggtgtctgcgaactgaagtcagagagaagaattagagaagagtatccagatgaagtggctaaacatgaacttgacccttatcatcacagatacccccgggccgaagtgggtcgatccccctcttcccttcggactgaaactaactgctgtagtcataccacgatcttgcagtgcgactcgagcctataattttggagctggaacgggagcaaaatgatctgctaataattgcccatgaaagcgtgcttagggttttgtatggctatctcatggcgtgcaatgctgcagatatcccgttcctggaattcccacgtgatgaaataatagaggtaaatcttcttagttcgacatgttgagctaaatcggttgactgctgtttagataatacccgagagttaccagaatgaggcgcgcagaatccagattcctgacctcccagaagagatcattcccggttcgcccgaagacataaagattccggtaccctcgagtggactcaacaccccgtcagtccagggcataggatcgccgaatgacggcgtattaacaccgcagggcggtatacgaactcctcgcgagcccgagaggatttcacagcagcatgtggaagacgtcgtttaaattcaggagtggaacctccaacatgcagagttttgtgtccaacagcaaagcgcttattggttgagtgtgaattggattatcccccatgcagcgtagaaacgaatactatattatccccttgctgaatctcgtatttctcctcaccctctagctcccagtctgcatcgttgataagtaccaggatcccgggtcgtctgcagtgacagtcagctagacccattactatattttgcatagcacatacacattatcctcaagcacaaaaagttcctttctccgatccttcatcacattatcgaccaggtattggagtagataggagatattcggcctagtgccattttctaattgagcgggtaaggtcactttatgctttcgttcattggcaaagagaatttcgagccctccgctatataccaagcatgtcagcactcaccgactcgacgtgacgggactggaaggagaatagtacatacgtaaactcgacagtgattgttatagagtccgtgtcactttgtgccatcctgatgaatctttcgtggcccttctgagggtagcgatgatcccctgaagattaaggacgtagtgcggaggcgaagcgaatcaagctaggagctgcttgggacaatgttgcttgtttatgaggggtaaaatatcaaaagcggaggtaggtaacggaggaggggttattgctgtctgtctgggcccggacctacatatctaccgtatcgataagcacaaaaaagtcgaccggttcggcgaactcccctcctcggcagtcactcatcaattactggcagcctgctcgccagctttcattcacgctccccggaagcttgattcagtcgtctgcctacccatggtctcattcacctccgaatacatcagtgtcggtggaaataggcaccccgccgccgcggactgggatgttcattccggcatcctcgcctacggtgcagataataatgtagccttgtgggatcctctcgtacgtggctctgaagtctactacacaagcattcttcctgcctaactttgtgttctatatatgcaggcagaatcacgtcggggagtttattcggttctagttggccataccgacaaggtcagcgttgtcaaattttatacctgtcccacaacggggacgaggttacttctgactggatctgtcgattgcaccgtacgattatggcgtgccgatcccattgaccacaggcgattcgcccatgcgcttaccttgacggatcacactggttcagttaatgcaatagctacaaattccggggttgatattattgcaactggcggcgcagatgcaactgtcaagatatggaggatatctattcaagattctgtcaaaggagagctattggaaagcataccaacgaaaccgcgctacttcccacttgcactggcactggcgccgcttccaacggacacgcaggacagacctgttgcattagcagttgctggcaccactaacatagtgcaaatatacgctgctgagaatactgttgacacaccgcggtttaaggtatctgctacactttccgggcatgaggcatgggtgcgctcgcttgccttcactgtggacatgcacagcaagacaggggacctcttgcttgcttccgctagccaggacaagtacgttcggttgtggcgcctgaaccgtggagaggctgcatcgtctgggttagtgggatcagaggaagatgctgttctgggtggattcgagccaacattgtccaacaaagcccaccaattcgaggcagcaagatccaaatattctatgacctttgaagctcttttgtttggtaatgaagattgggtatacactgctgcctggaaccctaacccagagcggcagcaacttctcactgcttccgcagataatactctgaccatctgggaacaagatccgttatccggagtgtggctttccgcggaacggatgggggagctgagtgtacagaaaggctctactacagccaccggtagtactggtggattttggattggcctttggtcgccaaatggctgccaaattgtctgcctcggacgtacaggtagctggagggcgtggagataccaagctgaatctgatacctgggatcaaaccttgggaattactggacatgtgcgatctgttaacggaatccaatgggaaccttctggtggttatcttctatcaacaagtgctgatcaaacaacccgccttcatgcacagtggcttcgggaagggcaaaagtcgtggcacgaattctcgcgaccgcagattcatggttacgatttgaactgcgttgacactcttggcccggaccgcttcgtatcaggtgctgaagagaagctgttacgggtgttcaaagaacctaaaccaattgcccaactgctgaagaacctttccggactcgcacagaatacagagggagagcttcctgacacagctcagattccagttttggggttgtccaatcaagctgtgggtgaagaagcccctgtggaaacagatacggcagaggccgagagtatcggacaagcgcaggcatatcaatcaatactatcaaattcgactcagcctcctctcgaggaccaactggctcgatataccctgtggcctgaacacgaaaaactttacggccatgggtacgaaatatccgccgtggccgtaagtcacgaccgcacactcatcgccactgcatgcaaggccagctcgatagatcatgcagtggtgcgtttgtacgacacatccgattggcacgagattcgaccatcacttgcagctcatactttgaccattaccagtctctccttttcagctgatgacaaatatctgctcagtgttggacgggatcggcagtgggcggtttatcgtcggagtgaaacagactcatcaagcttcacactcattacgtccaaccccaagggccactcgcgcatgattctcgatgccgactgggcccctgtct

SEQ ID NO: 1322 - DNA, 2893 bp, Emericella nidulans
tttgtataggggccgctgccaggaagcagagtctccgtttcacttcagtgtgaatggccgtcgcaaattctcagcggcccgcaacccaccttagcctaacaacagtagacactatagcagcttcaggagcttgggttttccgaccaaatgtccttgcttctgagagattagacacttcttagtatatccagcaacggttgccatcacatacttaaggaaagattgtgcagtttgcagtttacgctgctgagctatatttcaccgagacggtgtctttagcgatgacagaagtgatagcggcttagaaagagagctttcgaatgtatctttatatgccgtcaatttcagaagacacagagtttcgaaggactaggagactttgattcgaagtatcctttgctcggaacagttatcagcccaaaggttacgtctggttaggcttctgaaaaggtcgtctatgtctctataattatgaagacaagcgtctggtttgattgcagggactggactttgggtgcgatatagttgctatggcaaaggccacgagcttcttggcctggcattctgagagccggcaccgactatccctttcagaagtagtacccagagaaaaaagaatgatattggcttctccatactcttgaaaagagtcgaacattcatgcaccgttttaatctattaactttatgaaaaattcagcagaacgattcccggaggaggtggagtggtctgcgctggatccgacatagagtctaatgttgtatgtcactgtaaacctgatcctagtgggatagcttataaaattgttagtctgcagtatcagaaagaatggcaaggttgcgttgcggacgttgcgcgattgggctacgttggatgggttttctgggcctttagcaaggaaaccatgccgatagggcaaccagtttatcattggcttcattcatgacttgcggacagtagctctatgcagcctaggaaaactagatggtgaggtggattagtcggttggacctgccgccgacgctgctgccatacacagtggcgggttgcggagccgaagtacgaagaagagtgcttgataaacctctgcaacatgtctctattcactgtctctattcacattgactcatccttcttccacagcttagatgctattcttccggctactctcttatacagtatagctagtgtgcccgatcatggcctcgttttacgaccttccgccagaactcgtcgaatcagtcgcctcgttcctgtggctgagcgaggatctctgctcgctgcgccttacatgtcgatatttctacctcagcacactgcggtactttagaaaatctcaatttgagaccgtcagtgtcgacctctacctgagttccctccaccggctcgaggggctgtgcacaagaccagacctcgtgcgaaatatccagcgtctcgttatttggacaaaatggacggcggagagagcggttgaaacaaaacaattctggcagcggtacccgtctggacgactaatcatgtcccaggccattatacgccgatggcgcgcggtgattgagcgccttgtctgctgtaggtcgttttgcatttaccatcgaaccgaccccccgggtagctactgggatcccgaccttacgactgacgacgagtatgagcctgtctggcgggtatcgttgtcagtgagcgatattgtggcaatcatgctgaatattttcagtgcaagtcaaatcccagtgctcagttttgctctgggatgtggcaggtatttcagcaaaaacccaggccatcaaattgataccacgcgcctcgacccggtcctactccggacggccaatttcaagtatgcctggtccaacctgactgctctagttcttgagtctgaaattacggggagttcgactgtgcaatttgctacatctctcgtgcaagccgcgactaggcttcgacgattgacaatcaactttgaccacgggcatgacgccttggctttaatggagcaactgtcgtgcacggatttcgaatttcaactagaggaaattcattttgaggcgggatggctgggatctggcgaatatctcgagcgattcttgttgaagcatgaccgtacgctctggactctctcgctggtcttgatcggcttgagacaggaggcctgggttcccatgctcaaaagtctcacagatttaagagcactgagggcgttcaggcttgtctgcccaacggctagtgaagccgacaaaaagagctgcgtcaagtttcccaatgttgagaaaaattgcattgttgatgaagcatcgggaacacaatttaaatacaggagattttggttccacgagtcgcatatgacaatggtcagttaccgtgggtcgaagatgaaggttgcacttcagacattggtcgacggcatcgagttcgctcctaagagggacctgtcttcgacggagtcgttcaagtcgattgatcaacggcggatgagcgtcagctccatgggtgtgtgggattagcgggtcagatattgctatgactatctgaagctgaggctgcattcaagatacgagctttgggaaaatatgctgcaggtgtggcctgagagacagcgggcacaaacttctcagggcttcgatgtttgaagggatgtctattggcagaactcctctatgatacagttgagcctctacagcatttatatgtacttgtatatgcgaaattacccagtaacagagcctgggagttcgtagaaatagtactcattgtggtgttatcccagcagtgtccttctgattatccagcatcgtaaagcgatattttccgagaacgatccaacaacaactaatacagaatttcgagcagcggatagagaaaccgctcatgagattagtaaaagaatacttta

SEQ ID NO: 1323 - DNA, 1998 bp, Emericella nidulans
gtcctgccactgacatatctagaccctactatcccaatggaacaatatgccgagtcgtgctagctatagtttcatccctcttgatgccgggagtgaagaaaagcctatggatgtcagaaacccagaacatcagcgagaaatccttctcgcagcacagctttcgcgcatcgtttgccgcatgctcgaggtcgaagggttccgcaaacttgagcgcgatttctacaacatcaaatggaaacagatatcgcaggaaacccatatgaatttcctcaaggaactaggacacatccttctcactctccgttggcgagtttcctggtggaaacgcctaggcgatggcggccgcgaacccgacccgaccaagcagcactatgtagaacgagtcgacctactctgcaggattctttacgtctattacacttgcgtcttggcgaaactcccctcttggtgcgcttccgaggttcctaagggcatctggtctacctacgctgacgcagagaatccggtctgggacgacttcccggttgatcctacagacgacggtttcaaggcgtggatcgagcgaggggcagagctcatcgagcaatctggggcgcccgtccgagttgcgaagatttgattttggacttcacaatccaaccattagaaacgaaccaaccgacgactggcggagcggagtggataggctgatattttgagatacccttgcagcgtctttatttctctgttcatgacttacgaacttctcatgttcttttttctcatgttcttttttttatattctgctctattgtactcttgatttgatatcgggataaagaacaattctcttgcgctggttgcattttccgtttcgttcaaagtacattatcctatatatatttattatatatatatatctatataagtgcggctatatgtggctatacagcagaatagatcacgctttagataagtgtttggtaaatattatttcacgcatagcacaagtcactgagtgtggatgggtatcaaagcttcattatgtgtcatcttataactatcaacaccgctcatgcctcttaaacttaaagtcattcatgtatgcccacaagagcaacaaatgactcctgttccagaatcatcatattacttcccccccttcttctcccccttacccgccgcagtagccttcttatccttcttgcccccagcaagcaactcaagatgtccagcccgctgcgcgagactcctttctgtcttggcggttaatccagccgatagtttctgtgcgaagtttagcccacatccacccatctttatgatccccaaccatccttatttcataaaacaggcaaatttgaagcatttgacccgtaggtatagggaacagggtataggtatagataccttcgtgatcttctgctgtttgatcagcgctgccttcttcggggcgatctggctatttcgtcctttttttgggccgagagctgttggtctattccgtgtaaacaatgaaaattatcagctctttgttctttgccttttttttctttgcatcttcgtggggagaatcaaggaatggatgcgatgcaacggaacgtaccgttttgaggacgaaggtttcgccggcgccttttttaggagaccttgagccatgtcgatgaaaattgatcgaacgattgagtgaagtgactcagggtgtactgccagcagcacagaggataggctcgtgatggatgtcaactgatctagctggttgctgcggcgagcggagtgcgggctgcggagagaggaaaaattgcttatcgagaggcttatcggaatgagtgattgacagtcacgtgcaaatagcttcagctgggtatggatagaacccctgaagcaactgaagtctatgcttttgggcgaaggtggaaagagagtagagacgtgctccagcgctgagaggttaaggggcgtcggcctgtttgtacggttcctacgaagtagcatccatcataatttgtacatacgaga

SEQ ID NO: 1324 - DNA, 1779 bp, Emericella nidulans
ctcaatcggagggataccgcaaaggcatacgctgaaacagggaccagttcagcgaatgtctttggtaaaatcggcgttccagcccagagggatgctatatcgcctgctccttgagaaaggaagcctgtggacctgcagacgcatcagtaccgcgccaatcactcgtacgcagggaacgatcccatgattctcagacttctagactctgtatttgcggagaactatcccacagatttctttgaccttggtccctatgtcaaagagttggatactcgacggccgattatgaaagcggacggcgatgtgagcaaagtctggaaaccaacagggacgctggtgacgctctttggagagcatagtggacctgtgaaccgagtggtcgttgcaccagatcactcgttcttcatcaccggttccgacgacggcactgtcaaagtatgggacaccacacgtttggagaagaacctcacacctcggtcacgccaaacgtaccgtcactctagcgacgccaaggtgagggcgttaactttcgttgagaatacccatacattcgtcagcggtgccactgatggcagtatccatgctgtcaaagttggataccacaattccaacggcacagtgcggtatgggaagctacagcttgtgcgcgagtaccagctatccactacagatgatgcgtcgcctgagtacgcagtctggatggaacacttccgcacggacgcacagtcaacactgctcattgcaacgagcatgtgtcgaatcatcgctctagacatgaaatccatgcgaccggtatacaccttgcagaacccgacccaccacggaacccctacttctttctgctgcgaccgtaaacacaactggctcctcgtcggtacgacacacggaatccttgacctgtgggatctccggttccaggtgcggcttaaggcctggggcctgtcgggctcaggccctattcacaggctgcagctccatccgaccaaaggccatggccggtgggtgtgcgtctccgcaagtggcaaccatggaaacgagatcattgtctgggacattgaaaagaccaagtgccgtgaagtgtaccgggctgattcacccgcactaggacacaaccacccaaaccaggcaaagggcatttcagacaaagaaattgccaggcggtccccaccaaatctcaagtcttcgaagcctggcacgtccgaaggtgaccgcccagaaggcatgctcagccgcttcggaacaggaaccgtcgaaccaccatccggttcaccctcaacgggtacctcatccggaaccggaatcaacaccttcatcggcggatttgattgccccgaagatgggagagataatagcacccgcgtcggcttcattatctccggcggctgcgaccgcaaaatccgattctgggatctgcatcgcccagatcagtcttgtattatcagcggtctggatcccatctccgatggaacagttacagggtccccgcggtacgaggtatcctcgcccacgcaatcgctgaccttcgccatcgagcacctacccaaccccggtgccaacgcgggtggtgcaaaagggagtggtaagaggagcggcgggggacggctaccaaggagcacagtgataagcctccagcagcagcagcttttgaagagccatctagattttatccaggatattgcagtgctaagggtaccgtatgggatgatcataagcgtggatcgggctgggatggtgtatgtttttcagtaggagatgtttactgataacgagtctgggtat

SEQ ID NO: 1325 - DNA, 2707 bp, Emericella nidulans
agtgttcagtaggcaccggtagacctgtcccacctgagtatgaattctccagggcctggagatgtgcgggggttgcattggaagataaggtttgagcggtgacacgtcatgaggctgatgcggctcagagggggtggggtgtgctggctccatggcgtgagtcctgaggcttgggctttgcacaaacccataatcatatacgggagtcggtacagagctcagcaatctgagtaccatgactaacctgtggacaaaatgcattgcaggtcggttgtgaagggcgagagcaaacttgctggctagagaagtgcgaagaggtgcagagtttacttggtaggttacgaccagtttggtattactactacagcgaactgtcaaagaggatcaaagtgcaacaataaaatggattggtaataatcatattctggcacaacaattaagagagtggacagcactcaaacagaacaatctggtggaaagatgaaaagagaaaacatacaacagtaaggaggccacgagtcaatccctgtccgggagacggtcagaactgccagctaacggttgatcaagaacatagttgagtagagaaacagaagataattatcaagacgagtggacgaagagtaagaagacatcactgaagtcgcatgcacgattcagaagaaataagaaaacttttattatgccgagagcgtcatcgccaggtaaccaacacataggagactgactggtgctctcgaagacataggacgagaggctgctccgcccccgcccacgagtcgcatttcgactatgttgatccaaaacagtacgtgacagcaccagaataaaggcgcacgatcgtaaaaacaaataccgccacaacggaagagcttcttctaggcacctcgtgcacgtgcctgagcctgagatttccagaactccaccatctgtcgggtttcctcaagctcttttgagagttcagcgatacgacgctccatgtctccctgtcgctcaagcttacgggcacgagacttgcgagcagcctctgtatttcgcgcacgcttggctgcaacaggatcagattcgtcgtacttgatcggaggaagaggtttgcttcgccgggcgcttactccggcgacagtcgagtgtttggttgtggaacgagaggtggcagtgggcgaacgagcaggcgacgagacgggcttcacagtaggggaggagacagtaggttcagccttcactgctggaacaggagctgcaatttccaagccagtcgggtcaaagggcatcgacattccatcattcgaagggaacagtggagcccattcttcgtgaccgggagcaagatccaggtcagcgccaaacacgggagaagtgtcttggctaaagtatccaggggaatcaaatgaaggtgtgctgaggtcagtgaacgatgtcgatggaggagctgaggcatccatgaaaagatcactgggcgagacagtgccggcaggcacgtcccccagagaatccttagacgccatgatgccggttggaacgaggtgaggcgaaagcatggttggatcggtgaaatcctcaccgaagccttccgtgaagtcgaagaactctgggtcatctaagttagtacgcaggccaagccaaaaagaacctgggcagccgaactcaccttgatgagggatgtttggagtagacatgttgcgacggtgatttatcgactgtgcgtactgattctgaactggcgagtttgtggtactgttattgaagagcgggacaggtggacgatagtgagaaatattagaattcgaagccgcaggagcagaattcgaagctgcgaatcgacgcaaagcgtgcgtctgactggaaggacttgaccgaagagtagtagacagatgatatccggtaggctgcgtgttcagtcgcggcactcgagggacttgagaagttgcgagctgctgctgctggtttacggagtgtcgacgcggaaagttcctgcgcgaaagatatctcgactggatgagagcgcgctgataagctgcgatgtgtctaggggtaaggtatgctggagcagatgcgtccgcgtgttgttcttgaggctggagacacggagcagggtagagcacgaagtcctcttgcggagaattgctgctgttcttgttgttgctgggatcggaattcagattctgagccaaaggcgtgcgtgggcgagggtgaaggaagccatgattgctgatggttatccgtggtgaacgacgtggagtcgaacgtggtgaaagggttcgaaaaagaacttgagctacgcgaagcgatgctgaagttcagaggttcctgagaaggagtctctgaagttgtttgaatgttggagaggggagtagaagacgaagtccgttgaggatctatggtgtccgtctcaactgagaagaacgacgtaaccggggggtgcgcttagcagtccattttgagctggataatcaaagtgaaaccgttgtgaagactgagaggatatggttacggctgttcagaaagatggccagacagggttgatgggatgataggaataaaaatgaggagatttgtgagatgaaaagaaaaattcagggaggaaagccaggcagcgacgtgccgggggataaggcaccttttaacagtcttactcctgcttgtgtgcgtggtcgccggctcgcctgtccaatcagcgatttttgtctccccgcctagtgcaccagcc

SEQ ID NO: 1326 - DNA, 2080 bp, Emericella nidulans
cttttgcgctcgcatctaccgtttcagactctagcactcttcttgtttctttccaggcagccatgttatcacatccctcgttccgcgcatgcagcgtccatttggcttgtattcaggcaaagatagcacttgcccgtttgggtatatggaatacaacgcaatttacttcattctagtaagaagtgcaattactattatcaacattgtacattgtaccctgatcatagtatgacaaacaaccggtcaaatgagacaagaccaaatcagagccggagcgcaaactatactctgaatgggttttggccggtacggtgtacgtgatcttgtatctagccggccctttggcagtaagcagcgctcagcaagtcaaagtacgaaagttctctgctatattattgggtttgtgcatagcatgactatgggcatgtacactggtgcagaatagtgtagctcacttcgctgcccacacccaattcaccatatactgccaatgactttgaagtcgccattcggatagagaagtagattgtagttctatattcccattcttcctcaaattccccttccttcttctagtcagtcacctcgcgccaagcctccgcccatggcggctcgctattgcgccatttccgccaagaaaacagggatcccttcttgaaattatcagagtatttctgtcgccttcaacctgcggacaataatctcctgtcgcagagaacaggactcggtaacagtaatgccactcctaccactcaccggccttccctcctccctccgctacctgatacaacaatggcgtcctcgcacagccacatcccccggccctgctctgagcagtcgggtgctcgatgtcgtcagaaaaacgtgggatcttggcttcacggccttcggcggaccgccggttcacttccagattctacatgcacggttcgtggagcgggagaagtgggttgatgaggagacggtgccgcacccattcatgccactacccctagtcttatccttcacagatgtagactgaccgagtcgaccagtatcaagaactctttgcagtctgccagggcctgcccgggcccgcaagcacaaagatgctcttctgtctgacgctgctaagggcagggtttatccctgccgttgtagtctttctgctctggtggtgcgtcatggctcatccggccaacactccttgtatatgctgattaccgcgccatgtatagccttccgggcgcaataggcatgtacgctctctctctcggcgtgcagcgcatagacgatacccttccagccgccgtctacgcactgctttcggggctgaacgcatcaacagtagggattatcgcgcttgcagcggtacagctcgcggagaaagcggtccgtgataagctatcgcggctgcttgttatatttggagcttgtgcagggctgtgttatagcgcgctctggtactttcccctcctcatggtggttgggggttttgtcacggctgcttgggatgggtggggagcgaggtgggtttgaggagtgatgaggttgcaatccggtttgcggattattgatgttttatacttgaacataatggcttcatccttcgtattctgagacgttgcacggcctaaacaggccttagatctcattatactgaggatgagaagggcatcctataactggaatcggaatgttttctaagggaaccaagaaaatggctatttgtaattctttaccaattggagtctcttcaggatttactttttgctctggataaatcgaagttcatgaatactccttggtttctgaaattatttcgtctacttttatggcatcggttctctcattattatcacttacctactttgtagcggtatcactattgtgctcttgaaagtaacaaattacatttacacttttatttgtatcattttcctatatatgcttcataatttattcattctcttctctcacttaatttctttattcctgcatcttattatttttacaaacaatctctcttatttataattttttatattatatcactatgactactattatatcatttttattttatcatttttactatttc

SEQ ID NO: 1327 - DNA, 1700 bp, Emericella nidulans
attcgcgtccagatccccaatctccgcaaccctcactctccccatcccgcccacctctcgcccttccaccatatcaagctcgtctctgcgcctctcaacctcctcctcgctccaccagctaatcctcacatcaagatccatatcagtgattttgtcgacttttgcctggatgagcggcttatgctcattatacagcaatccttcgaactccaagcacgcctcgcgggggaaatggttcgccttgacctttttgcgctcgcccagtgtcgtagataaaaggcgcattgcgaggccgagaacgtgacccgctgtgtgtaagcgcgagtgatagttgcgtttggcagcatcaatatgcaaggttaccggctggtgtgcagtgaaatatggttgcttgattaaagggaccttagcgaatcgtccgaaatggaggatcttcccgtcgcttgttttgcggacgagcaggacttggaagatcccgtcggcttcaccatttgcattaggtccttcagaaatgctggcctctgcgttcatccttgagtctaggcacaatgagattgcgataatacccgtatcacttggttgtcccccgccttgtgggtaaaagaccgtttgttgtgtcgtgacggcgaagatatcctcggtcctgtcttcgtcggctccagagctgatgttccttgcaagcctcttttcctcatcgtttagattggcaaacgacttggaagaggttacttgcgtgcttgttgtgcatagggtggcgtcgtctaggtacagggcttcggtggactgtgcgatgtcagaggtgtactcactgattagaagtaaaatatggtataccattttagctatttgtagatggtaatacctggtattggtgtggaagcaccttgagttatttataacatcagtagttacagaatagaagatgtttaggtgtggttggggtttccgtgaactgaaatggtagggtggagttaagaattggagaagtatcagcaagggctaacacagggaaaaaagttacgcaaagatccatcttcaatcctaggacatgagggatgccaactatcaacgtcggaactactaagtgtttagtaatcggattgaggcagtgctctagatatttggggtgggcaaaatatatagtggaattctgtggggttagatatatttatattatcttaacccagtcacttcgacccttccaggtaacactacactttactatcctgcaaagagatccacccaccccaaaaacattcaaagtcaccaaagccctaatgtatgacaacagcaacatgatcatccatataattggcaatattccccaaaaagcacgccgccaggattgatacgcccccaaacccaatgctggcataatatacccacttgtagctctccgcatatgcaagctgcccagcaagaacgacagcctcataagcggtctggctgccgcttattccgggaatctcgtgcaatccttcaggagagacacacttgtcagctcattgccttggggatcagacctacctctgtaatggtgagctgcatgaccttaccccgcccaggttttctctgcgtggggccaaccttgtcacaaaccctgtatatatcgggtaccttactgcccccccacccgtggacgccttggccttatggtgcaaccgctctgccctgggaattttcccttacccctgatcagg

SEQ ID NO: 1328 - DNA, 1894 bp, Emericella nidulans
ctcactataggtggccccgcttaagagaccacggccagtacgaccagcatcaccctggggaccgccaatgacgaagcggccagagggctgaatgtggtagacggtgcggtcgtcaaggagctcagcagggatgaccttcttgatgatcttctccttgatgacagcgcggagctcttcggtggtcacatcatcgctgtgctgggcagagacgacaacggtgtccacacgcaggggcttgacggcaccgttgtcgtgggcatactcaacggtgacctgggtcttggtgtcgggacggagccaagggatggagccgtcgttgcgggcagtggtcatggcagcgttcagcttgtgggaaaggacgagggtgaggggaaggagttcaggggtctcgtcggtggcataaccgaacatgataccctggtcaccagcaccgagcttctcgagggcctcttcgtagtggagaccctgagcaatatcgggcgactgttgctcaatagcaaccaagacgttgcaggtcttgtagtcaaaacccttctcggagtcatcgtaaccaatgtccttgatggcaccacggatgatggcctggtagtcgagtctggcctgggtggtaatctcaccgaaaaccataatcatacctgcaggaatcagcaaggcacccggttatgcggtcaggcaaggctagataacataccagtcttggtggcggtctcacaagcgaccttggagagcgggtcctcagcgagacaagctgatttctctgtaagcatctactcttttactttagtgaatccttgtagacgtaccatcgaggatggcatcggagatctggtccgcgatcttgtcggggtgaccgcgtccaacggactcggaggtgaacaggaaagttccattgggggtagcgactgagcccatggtgacgatggtctgaaaaaatgaggggagaaacggtatagagggagtcgtaaaaagaaagagagaagaatggatgaggaaagagaggtaagaaaaaaggagggcggggctcgagtggtttaaaaagaggggacgggagaaggctgattgattcaactgccgccaaggcggtggcagaaaaatcccacttgcagccagaaagaccgaagtccggcacggccaattcaattgaatattgcgtgataatggtcggagctggcaagcccaagtttagtttgatccttttccggcgggtcagcgcgtaagctgactgtttctgatccggagtacggagtacaatagtagagacggggcagctaaattatcgaaggctcggaaaataccgttatatgctgtgtcgctaggtgcataccgcagcaggctcaattgacctgagcctgttcggcgggtggatcccccatgaagcggagtaaaaaattccagagactcttcccaatgacctgtaaactacgcctgccatcggaacgtaacaacattcagcagagtaaccatcacaatgtctaaattcggggttctagtcatgggtccagcaggcgctgggaaaactacattctgcaacgccctcatccaacactgccaaactacccgccgcagctgcttctatgtcaacctcgaccccgccgccgagagctttcagtacgaccctgacctcgatatccgcgagctggttaccctcgaagatgtgatggaagagctggggctcggtccgaacggtggattaatctattgcttcgaattccttttgcagaaccaggatttcctcactgaagcactcgatccgcttagcgaagaatacctgattatcttcgacatgcctgggcaaatcgagctctacacgcacgtaccgctgcttccgtcgctcgtccagtttctgtctcgtgctggcccgctaaacatcaatctctgtgctgcgtatcttctt

SEQ ID NO: 1329 - DNA, 6806 bp, Emericella nidulans
atcattctagaaaatacctgattgtacaatgtatcttaccctgtaggctttatcatcacctttcttatagacaccaaatatcctttcccctaaaccagataggaggcgcgaatgcattgaaggggatgttcactaaggaatggttaaatctaggcgtgcgctgaaggcgctagtacttcaggctgcacaaaatcaacagacccgaagaaggtctcagtctatggcaatccatacgggataatatagctgacgttgtaataccaaccgccaggcttcatccggcgctgtggagtctatttctgtctccttcctccctccccccctctgacacacatactgtatctaataaatgaacttgctgatgcaaggtacttctgtggtagagttgtatattcatgccatggtcataaacccaactgtcaacacaggtcacatcatactaattgcatgtacacaagaactatgtgtcatttcgttttttgtggctcagcggtctcaatcagggtaatgtttaatatatacatttttataccaaagcctcctgcccatccacatgggaacgggtcactgaatacaaacccagacaacccattctactgtagacattgcagattctatccgtacttgaacgccatggcccaaggccaagaaagcgaccattgatagtgtagtaacaccccacaagaaagttaccatggaccttattgtcttcatcaccgattatatcgaatttgacttgttgtaagaacggttggaggacataagatgtgacccctggacggatgcttggatcttgcatgtctagcatgatgcgcgtccattcttctggggaaagatccgcgcccagtaagtgacctcttccacggctctggcgggcggctttcaagatatagtcgttcttgctcacttcaccttgaatctgtcttccgacccaatacttcagttcgagggatccgggcaggagagtaggtactatgccttgctggagagccggccttgacctggagtgaggatatggtgctcggccacgagagaattgatttcttgcaatataatacctagaaatcgctcgtcgttcaccagtaaggaagcccgaagatcattcacggccacagtcgccagctgccggagcatgtcttgcgaaagcagagtgaactcgtccggaaacagggtcacgaccacctgatgtattttttcacatgcgacctggtctcggcaatagagcgaataccctgtagcagacgactcatcatgctttaactctacattgttcacgttcacgaaccgcggacgtatacccgtcctcagttccaccaagcgcaccaattcctgtcgctggagttcgtctcgtcctcgaaggatatgaatcggtaggtgtgtatggagtaaactaaaaaagctgtctatccaatcgtcgtagtcgcctgcgggctgcagaactgagctgggtcccatcaattggcgcatttgacgatgtttatgtgcgctgagaactatcacattatcgggtgtacggctattgatctcgcagatctgaaagccagggccgttagcacagctattctcggtgactaggaaatcaggtctccagtttcctagcctgtcctggaattctggaaacatttgattccggctttgctcgtctatccactgccatattggttaatatggccgtcccctagttcagagctatggcacactgtcacctacctgtagcacttcctccacatgcttttccaaaggcagcctagccgggaagtctgcatcagtatcggtccaccatcgatctactatattgacgacagctttgacaagtgcgtcgtgggtatgtctcatacgcacgagaaaacttttatcggtcaagattggatgcggggaaagggtctcttcctttgggctgtacccaggttgatgcattaacgggattaatcttcggtaggcttctacctcgctgcttcgatctcttcttttggcgtcaatcgctggcactggtcggccaatcgcatctgtgactgaccagcaaatttgccgatggttgggcgtgttatcgagacttctcattttgtggattgtcggacactgtcgcgggctcggtggatagtaatatgaaggagaaacgtcaggaacgtagtttccatatatttggctaagggaaccgcttatatccgtacacaaaggtatgtgaggcgtcgagagttcacggaaaaaacctcaggtctcgctggcattaccactgatctccgatagcaccgtagcatccgattctccagccataaaattccagtcgaacggttagacccaccgaactgtagtccgttacagtgtcatcggcttgaatttgtatatcatgatattcccaagcgccaagtcgagacgtcattgattttcttctcctagatagtgaccatcttcagctagagacaccatcaacgagcgagggcaatccggcaaataaggcttagcagaacggccaataaatttcgctcctaggcaaattcactttttaccatttctgcccgttttttgcccggtcaccaactctcatccagtatgagtactaatgatcccatgccccagatctgtctggaggcatcgaggaaagccggcattccttcgctagcaactagtgcatcttacgaagatagggtgcgcagcggtaatgccttttcgtcgaccttccttcggtatctaggaggggagcacctacttccatacttcttgagatttatgtgtccgcacccagtactggttcccgacactttcatggccaatctgaaggagttccatgtcgcacttactgctgccttgacaaatatcgtgcaaagatgggtaatagatgaggaggcggacttaccgtcgcggatgcctctggaaccacatgaggaggacattctcagggtacgatctttgctttgcttttcccacctgtgggttttagtaaccctgacaatcctggagtagtggatacacaaaatcactgaagacaagctattccccgcgtatgacggtcgtcaaggcaattggcgaccagacttcttgttccagccaacgaaacaggcgggttcagagtttgcgaaatcaatgctcggttcacatccaacgggctggatttgaacgcgcgggtgaatagggccatggataattcggaaaacaagcccccttatcttgatgtggaaggcaacccagaccatatgatggaccgactcaaagctctgtttcatccgggatggcctcttcgatttgtccacaatagagaacacaacccgatgatcgaggctctgatgagagacttagggaatatgaagccgcgcctgctgacgccggatgatctacatcttgtggctgacaaaacctcgccgacagggtatagactacagtgcgtgagagagccaggctcgtcggccgaccatgacaatgaaaccgtggaggatattcaccaagtagcgctccggctgtttcttgacgagctcgccgcacttcctccggaaatgcagcggcagctggcgttcctgagctgcaatgacatccggtccatgctattaattcacgacaagcgaatccttgggattctgctccaggaattgaatgacctagtcgtgaagcacaatgtcttgacttcccgacaggctgacctgctccggaaaggcgttgtcttcaccatcatccccggatcgaaggagctagatcagctcattgattcgtactataaaggcaaggtatccaagaaagactttattctgaaacctattcgatctggtcggggggaagggattctcctcggtggagatctgagtacagtcaagtgggaggcaatcctctccgacatgaagagcgccgcgttggcccctagtcgagcgcagtatatcatccagccgtttgtggaacagcttgaagcggatacgttcttagatgaggaagctggggttcagcggactcgccgtgttggcacgtatcacagtatgcatggacagtttgtgtcattgggggtgtggagagttgggatctcaaagagtcgaacgatcaatatgactacgggcggtgcttggaaattgggtagtatggtaagaaaaatgaactagataggttagttctgcaggagcgaggtatgcaatactgaaattccttctttgggtcagttttgataagcagcaaggacgatgttagctgcttgctttgtgactgacacagcatcagtacagagtgtgtgtgtatgtgtgtgtgtgtgtgtgtgtgtgtattcataccctggcccctcgcctaggcgatatgcaggataccactatctagtccttgtatgtgtctatgtacagtgaaccattactttccgacgaatttagggctctgtcatggcctgtggtggccaatgcctggtgttctgttcagcagccctgtggcgcgcggctatggaacctctataatgcctctgcaaagtccagtactgtacctaagatactactatcttatatattatcctgcttacctttcttacctagagatcctcctcccagcatgcctgaaatattattaaatatagtccctatctttctctgtagcttttattgtagatcctttagttttgggtagttaattaagacatgaacaactatttctgcagtttatatttatacttattatcttctctaaacttatataatttactatatattgctagccaggaatagccagttcagagttagataagtagataggcttaatttcagggaagagagctatatattctctgggtatagattaagggtaggtctttgttaatctaacagaggtagctaccttttttagatatcttctatttatactcctattctttctagatcctgttgcagatgaacccttttcttataatagaagatattaaaataggtatttattatctaggctaactacttctttagccagcttatctactactttgttcccagggttactatagtatctagggacttattagaggtagaggggaatcccctatatctttaatttattagctgactaggtaatggcctgtataatcttttatcctgacttattttctttatttgctatagcttgtagtactaatatactattactaaggatagttgctggttaatatccagtatctggggggccctagtcctttatagatacctaatagactaagcttatggcatagtatattgctattagttcagttatatactgaccagtactctattaagctaatatagactttctagtattaggtaatattctgattctgatccagggctaccgccgcagcactaagaaggttatattgacctaatatatcagagaaaactgcaatcctatcctctttctgtcttgcagaagctctggctttggctttgtcatggtatggtttaatatcaattttcacaaatgctggtatctgccatggtggttatggccttgggtcgatggtttccagggcctgtagtcaggcaaggtctattgtctttagggtttctgccagagggaattaggacctagtttttatataattgctgcatgttctcgcgcgttctagtactcctttgcctgggtggtcctttggcagtgtgctaaggcaggctgctaccaattgcgcacattgtttaagttgtagatgggttggtaggatgtgggatttgattagacttgttaaaccacgggttggggcgggttttcaggcctagctgatccgcccacgcgggttttggggtgggttaccttcacagtaaaccgcccatgggtttagcaaataattctaacccaacctaaataacccaaaataacccagctatgcatatcattactctaataagcagtgatctacatagttaataaaatactgtatttaaatactgtattataactatctaagtaagaaaaatgtaatctaaatacagtaatatacctattcagatatcttggcaacccggcaggttgctccgccgggctttggggcagccaaaaatatccaaaacccaatggataattagaaggtctaacccaacccatttcttggcgggtttcgtcggttggtttaacaaatctacacctcatacaactccgtaatctcatcaatatgaatcaagagctagcagcagcgagctcagtcaggatatcatcagctgccttctcagcaaccatgtaggtcgacacagctgtgaaagtaccaggaatcttcgggtaaacggaagcatcaacaacacggagaccagagacgccacgaacacggaacttggagtccagcacggccatgggatcatcgtcggcaccgatagggcaggtacacgaagcgtggtgaccccatgcgctgtccttgacgtaggtctcaatgtcttccttggaagtcacggccgcgccgggaagaacctcggtgacgttgattggctggcgatggaaggcgtcacgggcgagctcgacggcttcgtagagtgcagtgagatcagcgtcgtaatcgccaacaccggtgtcaaagtagttgaaggtgatctttgggacgtcgaggggattagaggactgcagtgtcacggtgccagcggtgttgcggggatgagccttcaggatagcccaagtgaaccaattgtgttcgtcggtggcgttgatgctgtaatccgggaaagtaccgtggaaagttgactgggccccccgaagcagaagaatgtcgaaagcttgtggtcaacgattaaccgggacctctttgtaaatacattggcggccgggtgaggctcttgggggacgaagtaaaaatggccggcgggtcacccaaggggatggggaaagattttccaattccgttc

SEQ ID NO: 1330 - DNA, 2337 bp, Emericella nidulans
atcttacctatatctcccatgacactcgaagactgacatgccatgaaggatgcggcagacctcctatgccaggaaggaacggtatctccgcccctgtagcacacaccgagctcagctctcaaggccatcgcctcgcaccttcagctcactattcccccaacaccccatccgactcggctggaacgccctcgaacaatggggagtcgttagccgaggctggtgatacggaacaaggcccaggtgaagggcgcgactccgatcctgaccagaaccgaacatactacaatgcacatggccgcttcgcaggtcaagtcgtcgccgccattgatcctgctgcaagctcgcataaagtcccctttgttgacgcgccgctattcgagaacctcattctagattcctcacctcactcttttcgctcctatttcgtcgccgagttaccaccgcgcggctacgcggatcatttggttcatatatactggcgatttgttgagccggttgagccaatcttggattaccagcggttcgttgagaattacgagaagatatactcggcatcagggggaccaccatgtacgcgttccgacctctggttgtgcattcttaatgccgtctttgcgctggcggtgcagcgacaagaacatatcccgccgcagcaacgaaacgagcaggcgaaccgtttcttcttgcgcgcgtggacgctgcttccagctgacttactgtggatgccagcctcgcttgagctgctgcagagcctgatattgatcaatcgataccttcattgcacagataaccagcagaagacgtggatgagtgcgggcgtggcgattcgcatggcgcagactatgtgcggcagtcgcggtgaaagaagagacgaggccctgaagctgaaagtctgggcgagttgcgtcgctcttgatcggtttgtcgccataaactccccgattctcgtcaatagcttatcattacagttgtacttcctggtctctggggaaatcatcgaccctagttcccattctataaccactaagcggtagcagcagatcggggtgccagcgcagagcggagactcgtgcggagactgagactctattgaaatcgcgtaaccagatccaactcgcgcagttacgaatccggagtgcacccgcatcgatatcgcgccagctaggttcgcagtcacagcaagaagattattgcaacgcggccttacagctcgacgcatcattgcagcaatgggaggccagtcttcccctcgagtggcaggcaaagaatctcaagatggttattgacagaccatctcgcgccgagggatatctcctccatctgcggtaagtcagagagccctacataatgagcctgacttcagactggacttcctccaccagaaacacttgttgtaataattcctgctgatcttcgccagatacctccaccaccgcgtctttctctacagacccatgcttgcgcgtatctactccatgacttccaattccaatgcctccttgtcacgaccaagtctcagccaccgtgtcctcctgagcgccgcaacgatgtgcctcgaagccgcccaacacatcgtcacgctcgtcatcgaaaccatcgaaccagatcagcaaatcggcctgctcccctggtggtaccgattgtactacctgcacatcgccggagcaagttttctcgccgccatgatacgtccagagctgttctcagattcggttgcggaaagctgggaggctgttctacttgctctgcgcgggcatcagcatctttgtacgtatgcaacgcagtgcgtacgaacctttgagagacttgccagcagaacaagggcacggtgggcgatccctgttaatggcaatgttggtgctagtgctagcaccggcgaggctgaaggtggtactagtgcgtgcatcggtgtgagtacaggagctttagcggctggtgagtcgccgccggggatttgcttcgataatcttttacaagacattgattttggtctcgacggttttttgtttggcaccggagagttcacagaaggcgttttttaagcaggcatttctagcatatgttgacccttgtccatctgtgggtagtttagtcgaaactatgctgtccagatacgtgcttgtgggttcctcgttccctcccatatcatttatgctactaagagggaagacactaaacagcgacagtcaggacgagaaatattattctctcagtcaatgtgccgcaggtctactaaatgcaacaaagtatgccctcagcggcccgttactacggctgcccacacaacgtcaagccctagcctctccgacgcgccgaggacccggctaaaaactctga

SEQ ID NO: 1331 - DNA, 2573 bp, Emericella nidulans
  unsure (1)..(2573): unsure at all n locations
ctgttgtcatatttgatgttgagacaaatggcgttgcgcgcaacgtgaaaggtcacattcggcaaattcaatctctgaggtaaagcacacgatcctggtcatgtctataaggacaaactgactttggctgtatagctggtctagagacggtcgctatcttctgagctcttcacaagactggaagtgtattctatgggacctgaaagatggttcgcgggtgcgcacagtccgttttgaagctcctgtgtatattgcagagctgcatccttacaaccagtacgtttcgcccgccgcacgggcaggcgccagacttacgatgagctaacaccctctttttacgcagtttgttattcgttgcctcactcttcgaagaccagccggttcttgtcgacatttcctccccgaaacccgtaaagcgcatcctcccctccgcaccctttcgcgccgcgccctccaaagacgaagaaattgacccgctgtcgcagccaagcaagccgcccaggatgcaaagcactcaacctgcgtaaccatcttcaccgcgctcggcaaccacataatagccggcacctcaaaaggctggatcaacatcatcgaaacccaaacctgcaccacaatacattccacaaaactatgcgccggtgtgatcatcctcctccgcctcgccagcaatggccgtgacctcctagtcaacagctccgaccgcgtcatccgcacaatcctcatgccggacctctcccaactcggcatcgaccttgaaccaaccaacatcaaactccaagtagagcacaaatttcaagacgtcgtcaaccgcctcagctggaaccatgtcgccttctcatctaccggcgaatttgtcaccgcatccacattcatgaacccagatatctacgtctgggaacgcagccacggctcactcgttaaattcttgaaggcccccgtgaagaacttggcgttgtagaatggcatccaacccgcccattcgtcgtcgcatgcggccttgagtccggctgtatctacacctggtccattgtcacgcctcagaaatggtcggcactcgccccggatttcggcgaggtcgaagaaaatgttatttacgtcgagcgcgaggacgagtttgatattcacccggcagaagagatccaccagcgccgtcttgacgctgaagatgaggagccagatgtcctaaccattgagccctctaaaagcggcgacgatattgagtccttccgtatgcctgtcctgttggatatatctgatagcgagagcgaggaggatatcgttgcggttgggccagggactatgcggcgccggagtcctggcaccggaagggacaagtccaatgcgaatggtgatggtgagaaggatgggcggaatgggacgaccggtcgaggagcgaagggtagacgacgatgatacggtaattatctgcgcaagtaagagatgggatcatctcttgaccacctttaagctgtaaacatagacttacggaccggtcctagccatttaggcgtttgggatttgcttgtttgctggcatggaacgggtacatgggatccatatagtatcaatcacgggttggagtttaggcaacgtaaacatgaaggatcgagaagtcaaaccttttcgcttctgctcaatataaatttatctcctatttgtgactagctttcaattgccttatgcaaattctttgttgcatgcatatgtcgcagaaaccggagtgtgggacctagcatgactcgggaatatatatggggcctagatccacaccacataactcacctactcgtcgcttgtttccatgctcctctcgtactccgtcatggccaacttcttgatccggggatatagctctctatcatctccattcccgcgatgagtatacgataccggcaattcgactctattatacctcccaggtgcgcagcggtaacgacaagagcgtcatgatagtttcacgtataacgactacccccgcggcgtcgaggattatgagaagggagctcggccaattttgtctgcatcttcacggtatctagagcgccagagtagatagagaggatacttcgccagtatatacgacgtcgtaaagcaggttgatagggcgccatgctgggcctgcgagaggaaccgaagggtgtgtgatggacgaattgtcgttcatactcggttgatgcggttcataactttcgctgttgagatttctgatggctgggcgtgtgccagcgtgacataaacttgcgctagcagttttcctccttttcgttttgcgttcctggatgtggtcgccttttgctcttatcttaatggtttcctagcctggtatatgtgcagtatattgtaggcatggatctctttgttgaatgcttcggacttcacatctgcggcgagttgctggattctctccaggggccagcgatagacacgacttgagggagccagactgaggttttcgatgctctctgagacggccaggttataccaacgtgccaccttccgctcgtgttcgtcctgatgccacgggtngagcgggagtcccactatttgatggtcgatctccgtgaacccagcgt

SEQ ID NO: 1332 - DNA, 1685 bp, Emericella nidulans
acgatggatgatgatgcaaacgcgcgaaaccggccattgtttgactctgcgacggcgctgtggacgcccaaaccagtttgaacggttgtctcgctggttcctgcatggttcaccagtggaacctgcagcaatcctgcccgagattaatcatggatgcttcatctgtgcgcttgtttgcacctggagcgtccacggtttgaaagatgggagctctcgtgagcgaagtcaatcggtcgagtcaagcaactcaggcccacctgaaagagtcgtctaagctaacaatggtatgttttgtgtacataaaacagattgtgctcgactggtacgggtatcattgcgatcaacattgtgccgcccgtcatccttagttcgatgaagtgtgggcaggccccctcaggattcaggagataagctatctagatactccataatagacctcggtcttttggttggagatggtaatgtacaattggtgataaggatatcatgattgcgtctcaagtgctcaagtctctgtaggcttctgctccaccgccgtcttgaccttctcggtcttggccaccagatcctctggcgtgctgagactgggctcgtagtcttcccagccttcctcctcacccgccttcgcaatgctcgtcgcctttctcttctcctttctcctctccttgtatttcgccctctgtctcttgtaccgttctctctgtgcagcggtttttccaagctgcgggtgttccttgtgttccaatagcttggcagcatactcgtcgtccgattccgcacacagacgcagcatctcattacgtaggcggattcggactttgaacccgcgtttgtataggtcatccaaatagagataggcggacttgaagttgccggttttcaagcaaagaaatagcagatgctcaaaggtctccccgttcgggaccaggccgagtttcgccatttccttcacgaaaaatacggcagactggacgttgttgccggctcggcacatggcgagcagagagttgaacatcggcagagtcgggttccgaccgcagagggcgtagattcccttgtagatgttgactccgtcgtcaacaacgaacggatcccgggccgcggccttctcgcacagttcgattactaaggcggcatattcgagctggataacttttcccgatgccttcaacgccttgatcgtgttccagatatctcgcgggtggatgttattctcgcgacaatggactcggatcgacttgaaacacctcattcgcgcaccgcgggcagtccccgtacatatttctaacgcggaatacagatcgccggccgcaaggtgtcccctgaccaagctcaagaaatctttatatccaagttccagctcattgtgttcgagcatattgactacagcgttcttgagctgcgtatctccatggcgcgcagccacctcgagaacctgctcgcagatgccacgtggtggggcagcgttctttagttccactattctcctccagataaaggatgtcaaatcatagtggtgagccttgctcgctgagtcgagaacatacgtgcgaagctctcggctcataacatgcccctggttcaagcgaaccaccatcagctcgcgaaccaggtcaaactcgttgaagtcacagagattgtaaatcaaaagactgtgaagccagtccttgaccccgctcgagttc

SEQ ID NO: 1333 - DNA, 1954 bp, Emericella nidulans
ggagttcccgcctatgcgtggcaatgagtcgcagggtcgcctggtcacagccaaagccacgaggacttaagtccccgttaagtgccttgccagatccgagagaattggggtggtacttgaatggcatgtttcgggtgtggggccaaaatcattagcacagagaccagaggtgggccacgcgccggttcaatacttcgagtccggagcgggtttctaccatactacccagaccgataggccgtgggttgtgggcaggaatttaccgggcccgatttaccaacatgggtctcacaagggaccagcacgggggcgccataacggtcctgagctcagcccgtagcattggaggaaaggtatcggccgtccttggctccggcatggcatggtagaccggggccgggggtgccaggcccaggctcggagggccgacattgtccaaaatctgccggcagagttacgcgcggaccccgcgggtcactccggcgaggtaataggtgttcgatgacggggcaccccagcaagatggcacattcccatcgccccataagccgccggggggtgggagaaaggccagggtttgggctaaacaaatatagtactcccggccagaggagatatggcggcaatgtcttttgaatgtgcacgagtggcgctcgcgccctctggcccaagccaggaatgagaggctgggtcgcactgcgcactcagggggacattaacatcgccgccagcaccagcctcaacgaactggtccttcttggagatgagctggtcgatgacgccctcgacgtcatcggtcaggtcctgcatggggctggtgagagccagggcgtccgagttggagagatcggggccggcgttgacctcctcgacggcagatcggatggtgctgacgaggttgtccgaggcggactggacatcagaggggtcgccgccgctgtaggagctgacggcagagccgagggcatcgaccttggaggagatggtgtcgatgatatcagcgggagaggactggcgcttggccggggtggccagggcggtggtggccagagccagggtgaacaagccggtgaacttcatggtgccggtggttggtgggtggattggctggaagaattaaggattatatatagaggggaagctggtaacgagtgcccgggactgaagctgtgtaacgagagacagttcgcgtttgactgggagggaagaccagcagcagggccggtggtggacgggctatatatacccaagagctggcacctcgcagacggcaactcacatgcgcgccggggaccgaggcgagacgaatcaggaggctgttattcttagcaagattggatcaagaattggcgttatggcaacagtggccgtgatccaattgccaggttcgcagcagggaacgactggagatcgccattgaggtatatgcttgaccggagattaaccaacgattcgaccgtttcagcgccaccgcggtcgacaacagggtcagaaacggggccgacgcaatcgaccaacctcgggctgcgtctggggaccaaagaaatcaagaaaacgaaggaaacgaaagaaaaacacaagaaaaacactaaggcggcagctcgtacgcaatagatgaccggggggcattagcgtctgcgatgacgggcgagcttccagctccccctatactgctaacgcgggtggcgatgggcaagagaaaacggagggccacctgattggcctgattggcggactggccagggacgagcacgcacagagatgaaagaaggagtccaaaatacgacaatgcagtactttctggaggcgatattggcctgggctttccttccttttgggaatgcacctttgcaggtcccggcccgccccgggattccatttgctctgggctatgatttgcggacccctgtgggctctgacagggggtggctgatctggacatgctgccgcattg

SEQ ID NO: 1334 - DNA, 2762 bp, Emericella nidulans
tactcttgctaaagcagttatagcatagttattagcaatataatccttttcaagatctccccttatgcagatacatgcctttgcctttgtaaagtaactatccttattaaacttgtatataaatacctatttgagtagcaggatctgcttccctgctgcctcctcttgtttaacaggtataaatacttcttttatctctaatcctctaatttctaggcgcgctgctgctataaatttattcttcagcagatactatagtaaatcaaactagttcttcagtagtttaggaagcttgctgcgatgctattatttcttgctctcttctgcagtatttagtgctatagtaaatatatatttgaccctttctagctctttgataaatagtgttttgatggctgtataggcctggtaatctgcttaatcttttcaaggacaagtctaccatcttccttctattatatttgctatatcaagcctgtccagatactgtcttcctaatctcctaccccctgatcttgataaggcttgtaaatcaagattatctataccctctaaggtattagggagatttgcagtctctctgcttgcctgattctaatcttcttagagcaatttaaggagatatcagcttagtaagtcctctctttcttattctgcagattctgactattcttctgcttctataaaggctcctggcatctaattcaagccagaattgcctaagttcagtgttctatcaggtgtaggtaatagcagaggcaaagacagtatagtttttctggcagaatacctatatttctctgtatcttccttttgtggttcctcaacaccagcttctcctatctcagtcaatttttcattatttctaatgctctgcttattgggagattctgcttgtattgtactaggtattatatattcagggagcttaatatctatattaattacttccctattagccctgccaggtaatatctatatctccactggtagtataggtaagctaatacttaactcatcctccacaaaaggatctgatagattgtatagccttgttttatcaaacttgatatttcttactgtctcaactcgctgcttcttcaggttctatataaaccatatattagaggctatatagcctactagaacatcttggtaagctcttagagctatttttacacctttttcttactactgatgtgtataagatatgcaaccaatcaggtagaaattggctagatttggcttttttcctgtaagcatctcctatagcattttctatcctatagctcttataggtgttctgttgacaatatttgcaactaaagcaataatccagggccaaaggtcttgcagtaagcaggcacctattagaacctaccttgcctttataataagaagatatcctgattattctgcaggtctattctaatttagtattgtaactactaagtactagtaagcaatgccttctgctgcttcaaatattataatctaataccctagtattttcttattattacttttcagatatttgatagtgaggctgaaaagattcttcatctagtttataaatttctgtacagtgttgacatatttgctcttttattggtaggtaaagacaaaatatattcttgtggctttattatagaaataggtaatctatttatccctgttcagactaggttgtattttgataagatcaaagtatacttactctagcagagtagtagtagttattattggtctctgagagatttgctgaggcatatttgccaacttgtaatctttacatggttgcttagaatcatggtttatatctagaatattaatcttgatacctgtaactgcttcaggaagatgctgcagagtattaatataagtataagccatcctttaatactaaatatctatatttcctttcagaagtagtagttttgctgattgttaattatctatagttataaaagtatatatattattgctttgttgctctataacccagagacctaataggtaatctctgatcttgaagatgatattattttctttcttgataatattattgttaaaatcctagctatatccagcttgtttaagtcttctagctctaataatgctggtataaagacctggcacataggctatattagtcaaggtaataataatatttcctaattctctaccataatttggacagatcttgatgctcccagtatcttgtatccttattattgtattaccagcacgaagaattctggttgctgatagattatagttttcaaaccttaagatattattgcaaacatgtattgaagctccagagtctagaataaagtaattctttaataaactgctaatttctatactaaaaacaagtattataatataatactcctctggtttgttgctttctttctacttattgcccttattttattgcttattattttctatcaaggttttgatctttcttccaaccttattatcttttgcaatagctctgctaatcttgcttttaatctctttgttaggtttctattattttagttgttttgagtgtattatataccagcaactactgtatatatagttctttctgtatatatataagctccagtatctattgttattaggtttgctttggctatgaagtattgcaaatactattctggaagttattatcttaaagcctttagtattagccaggtaagtctgatattgtcctaggagtttagggaagttctccttcttatatatag

SEQ ID NO: 1335 - DNA, 2560 bp, Emericella nidulans
ggggaatactgtccctaacgtaatgatctggctagcatgcaataatttgacaccccgcgagcaggtccacgacagctgtctatcatttcttccctgtcagcgtactctgtcatgctacgtggctggagattaggtcgtgagaaaggatacttcagggagatttggatcagaatggcagtgctgagacatgtatgttgactgcatattgagcccctatcgaagctgtctcgataggtactgacctttttgaaggccctgtgagttgggatttccaacgcatgcgtccgttgaataactcataccaccaggggtgcctccaacgcgttccgggacctcggcggatttatagtaccctcacttagaacacccgtttaaaccacagaagtccatttggcgacatttgaagcaatcagcagctccttaacaccgctgaggcgaacatgggtgttcattagaccatccaacagcctgacacgctcgtggtcgaagaaagggaagcagagcctgctggataatttcaccctaatcagcctactccacagccgagaggactgagatacttgcttagacgcgtgtgctccgtatacttctaggaagcgtcaggcatttaaggcatcctccgataacacgctatattctactacagggcccgccctgaaactcggaaaacaggacatgaacttatcaattgacttaggcatccaaataaaccaggtctcctactcatattattgccagtggaggacctgcgttgccatcagtccatgccccatcgacccttccgcatatatattgtcctaccccttcttccctaacctagtttccccatgtttatttgcgtgtctacgttacccacagtcattcgtggattccagctcaacgcctgcatgatgtctcgccatttcgatgacaccgctgaccccccagtcccagtctaaaaggcagtgtctaccgcagcttgataccagataacggtctaattacagaaaggttattgggaggaaggacaaaaatcccggaaggtgctttagttcgggacagtgactgtttatagcacactgagcaaacgtatcaactggcatatgataccaggaagctgctccgcgcgtcaaagcaggagagtcaggatatcagtaacgaacagtgacacacgaggaacggtaatacagggctagactatcgcccttcgtccaaaatactcgttcgacggtgtagacgctgaatgcgctctcgataccccatggtttttgcctgcgagaccagaagccatgagactttgagcccagcttcttgcagaaagcctctgagattgcttatggcaaataactcagtccaggaaaatcaagttggggttgcagggagctgcaagaatggtttccctgatatctggtgttcgagtatagatctacctcccccgaagcaatcagctaagtactaagtgtctagctgaaatcacatataatagtacctgcacgaccttctaatgtcaacaccgagcatcaagagccttgtcaatctaatctcgcagcagacagaggttgggtagttatcagctgcagtcgatcaatcaattagctgtctgcttctctgaagacatacggtattacctactcagtgacgtatcgagatggagacaggcactgaggatgctgctaccgagacaacattgattaccaccatacaagctgtgttcttgccaggaccaacagcttttcagggccaaaccgtagttgtataaagcatgctgcccgttgagcaaacaacccggaaaaacaaatatatatagacatccgacatataggcttggttgtggctaagcgacgttgcatgccttactgctagtacacggccaagttaacaagacggcttcttgcctaggatacttatgtaagaggtgcagagacatgaggaataggtataggcatataggcaccaggtacagagtctcgccggcagtggtaggatgacgaaagcacggagttccgacgaatgctcgcatcgtactttaacgcggagcgcgattttatagatcttgatgtcattgtcgcggacagtttcaaccctccaccaaatgatacgtagtatatcagacacgacccaagaccagtgccactatgcacgccgggattcgccatgtatagactgcaaatacggttaggctgccttcggtacgcaaaatcatcgagtaagcgtatgcaactctatcgaaatgtcaagatgcaagtttgcaacagttgcagccaggaatggctctatccagactggtacttctggtagctatccaaggtgtgatattgcccagtcttcagaaccctatatagatatgacgctgatgagtgccaataaggttggaaaactgaaagctaagaccctttgcacgaaccgcagacgggtccagaatctccacagacacgcaatgacagggcacttagaccctcttaaatcagagatacgacacccgcaaaatctaggtttgtcggttcattgccacgggaaccggtattcgcaattccgccaagccgctatgtcaggaattggaaaaagagccgagtaagggatg

SEQ ID NO: 1336 - DNA, 2320 bp, Emericella nidulans
ctgatattcatttctcatttctcatttctcatctttcatctctcattactcatacttcatacttcatttctcttttctattttctctctcttcgtggtctcctaccgctgcttcttcccgccttgcttgactattctggggtctgatgttcccatgtcgtatatgaaaggtatggttcatttggttccagcacgtttcctgtgctctgccgctccagccgtcgcaccggtcactttccaccgtcctcgttgagcttcactttctcctcttttgtgctttgtctggtgtgacaggcgctgtgtcgtggtacctggtcttctcagctgcctgcctatcgtggtctcccagaatccctccactgcgccttcctgtttcgtctggaccaccggaccttgctgctccattgaagcttcaacgcaacgctcacctccgtggatgcgtacagtgctttactgcttcgcttctgttgtctgaacttgcgtggacatctgtgagcctttgcaaccatcgccactgtccgttgtttcgtgcaacccacgtcctgctggatcatcggctaacctaagtaccagactttatttacagacacatcgcctggcttcaattgacctcttgattacttcatctttctccaacgaagcaagcttctcatctcgtatccagacccttttgtcgtcagccgctgcttgtgttcctctgcacaagaccggccggatgccatacactgcgccgttgaagacgtcgccttctacgctgcatattgaacattctgacctgagcacccctccatctccaagctcacccaacgtggccgacccggatgcagacaacctaaacctccccccatcttactcttccgcctcctatgtccgtcggcaccggcggtctccatctaacagcaagtcatttgtttttccggcacctgacaacagcttcgaacaaagccggaacacagatgtctttgctagccttaggcagtcgccttcgcctgtgaacgaggggccaatcccccctggagctctcctgtcgcctccggagtctggccagaactctagtgatgaagagtcgagtagcccagcgagggatgtgttgaagctggaggagttggaggcggctgtgcggtcaatagagcaaaggcgaagtgtatctcctgaaagaaaaccttcagaggatatacttccggcaagaagtgaggaacaggcgggaacttccccagcgagacctcgccgtccttctctgacccacgataaccgccttatctctcgctctcggtcattcgtcgaaaagtcagcccaccggaacccagaagaggcggtcaccagttctccagaggacagtgatcgtgatgttgaccctgaaccaagattaccaatggtgcgcaagaaatctggcgagcttgttaggcctgcgttacgcccatcatctcgtcgacggccgtctagcatgcccgggactcccacatattccaaggcggtccactttgatgctcagttggagcatatccgccatttcttgcagcttgacaagccccaagccgtcagtgccggttcatcaccggtggaggatttggaagcagactccgaataccctttccattccgactcgtcgagctatcctgcttttgaatggggacttcggctatctaactttccccataaaccaccatctcacccacacccacgtgttcgccttgagcgcctgtttctttcgacagacaagcactctctggttggccaagtggtggtcgctaacctcgcttatcagaaacatgttgcagcccgcttcacgtttgataactggagaaccacttcggaagtaacggcggagtacagccatgatgctcgacgaaagcagctacacgatggttacgatcgattcatgtttcatattaggcttgatgaacagacaaacctggataagaaagacatgtttgtctgtatccggtataatgtaaatggccaggagttttgggacaacaatgagacgaggaactatcaggtcaatttcaccaagatccccaagccgaaggctcaaacccaagatatgcctcgcgcacgtcctcggccgaatctgcctcgaagcaggagtttcactggatctggtagtcgccctctctcaatgccttcttctctgaaggatttttccgacatgcatcggtacatatcgttcggtcctcctctcaacgatcgaaaggagaaacctgttgatgacgatgatgtgcctcacgattctgagagccctgtccctatacgccgcgacaagcagtcgcatcaggtttttggcaatcgctatgatttcgagtcgtcactatccgccgcta

SEQ ID NO: 1337 - DNA, 949 bp, Emericella nidulans
aataccccaaaggaagggaacttaattaccttggggttacattggagcaaaattgggtttagcctttattacccaccaaaaaaaaaaacccccccgggaaaaaaaaggagaaaccctttttttcccagggcccccgggggggacaaaaaaaacattttaacatttttacgggggacattacggggggttccagatgacattttacatgcctcggagacgtaaaaagacttgaaaaaactggataaacccaagcattcccaaaatgctataccaacggctgtttgtatctggatatccatacccagggcagcactgcgaacctaaggttcaacagcgtcccaaataatcttatagcatgccattcggtatggatcgatagtgttgtctggagcgttgcgcgaccgttgttgatactcaccattaattctttgctgcatatcccttggcagtcgtttgttttgagcataagtcgtcatatatgtcacaaatttatgatccaaagacctgaagccgggatcacgggcaacatactccgccgcttctgtgatgaatccgcaacgcagaagatagaatatgaggatccagcagtaatcatcccccaccatttggagctcggtaccatccggcgcaaggtctctcctggattccctgaggcgtatatacgctcgaaccttgttgattacagtcggtatcccacaagctgcgcttcgcgcggatttttcgcaattgcgccttcaatctcagtatagaatgaattctccagaaattttctggagccctcaacaactcgctttctcaggttgattgcttgttgcgactttggcgcttcatccaaatactcctccatgaattgacgctccttgatcgcgccagggtccgaaacgtccctatatcagcccattcttcgacaatattaatcaaagctctatacgcatcatatagctgatga

SEQ ID NO: 1338 - DNA, 4657 bp, Emericella nidulans
atatatatatagaggatattagactcgtcagattcggagtataagctatgataaagtatcattttcaacccaacacgacctaggggtcacaaccaacgtcagaatgtccagaaactacatgaattatgttgcttttacaagacaaaataaatagactttaaagcagagacccttcaaagcaacgtgtcttgccattctccaccaacgcacgaaacgaaccgctggagtctgcaactggccttgagcgtctagtcgactgctgatcaaccttgcccaatgcccataatccagacgcacaatggactaatctcattcggcagaggagagaaacacttctgcaggtgtcgacaatgataggcacaagcgggagtgcgtatggtcctactcgtgcagttggtgagagcacacgctaaagtcgccagcctccagaattcttgtcctctcaacgacgccggccggacgactatcggagttcgatgagattctctgacagctcagcgaagcgggcctggatttagatatctgcttgcttgctctttattcctatctctcttttcttctcttccctttgtcaatcattattattgtgtagatacttgcagtgccataatcttcaattccaccgccttcgttcatcttcgatccgcgccagccaatcagcggcgtttctccccccgttgaaaatggttcattctaagagtttcttcggcttctctcgttctcactctaccaaccaacatcagaagcagaagtcttcctcgtcttcctctaagacttcctcgaaatcttcttctccttccaaatcccattctcgatcctcctcctctccatccctccctgcctttcgtgcgcgcccgcgtaattcccatcggcgctcccacgatcccgactcccacccgctcaatcttccgcccgacgagcttcgtcgcctgtcagccatggccgctgccgctgctgatccccgcagctcgatggatatcgacagcaatgatccccgtctgacaacgccctccgaaccacagccaaacggcgaacagtttcaccagagtccgaccccgccaccgcatcgctccaccggtaacacagacgaggctgattctttcaaactggctgggaacaaattcttcaaagacgggaactacaacagagcgatcgaagagttcactaagggtttgtactaagtcgtatttgacttttgcgagctcggatgttaactgcaagcagccattgaactgaaccctaataactccatctaccgatcgaaccgcgctgcggcgaacttagccgctcataattacttggatgcacttgaggatgccgaacgagcggacgagctggatcccggcaacaacaaaattctgcacaggctaagccgtaccttgactgctctaggtcgcccggccgaggctctagaggttctcgaacgtatgcaacctccggcttcagcagcagaccgacaaaatgcagagaagatgctccgcttcatcaaccaggcgaaggagacgttggccgaaaaccgtggtgcgtcgatggcggtgttctgcattgatcaggcgcggcaactccttggaccaggcgtgaaagagcctcgtgcctggactcttttgacggcggaggcgcaactgaagatggctaccggtaactcctttggaaaggcccaagacattgccatcaacatgcttcgagacaacaaccaggaccctgatgcccttttgatccgtgcgaaagcttactacggcttgggcgagacggaccaagcgctcaagtcgctcaaaatgtgtattggactggatcccgatcacagagaagccatcaaacttctccgcatgctacagaagcttacccgaacgaaggaagaaggcaacaatgctttcaaggctaaggactaccgcaaggcaattgaactgtatacagaagccctcagcgtggatgagacgaacaaggacgtgaacgccaagatcctccagaaccgtgcccaggcatatatcaaccttaaagaatatgatgaggcgatcaaggactgcactgaggctttacggctcgaccccacatacattaaggcgcagaagatgcgcgccaaggctcatggtggtgcggggaactggcaggaggctgtttcagactacaaggctgttgctgaggctaaccccggcgagaagggaatccgggaggacattcgccgtgctgaattcgagctaaagaaggcgcaacgaaaagactactacaagatcctgggtgtctccaaagatgcgacggaaacggacctcaagaaggcctaccgcaaactagccatcaagtaccatccggataagaaccgtgaaggcgaagctggtgatgagaagttcaaggagattggcgaagcttatgaaactctcatcgatcctcagtatgtttcttttacctagtgttctaaaattgcaggatactaatgattgcaggaaacgcgctgcctacgataacggcgatgacttactggaccccgcagacatgttcggcggcggcggattcggcatgggaggcatgggaggaatgggtggaatgggcggtatgggcggtatgggcggcattcatatcaacatcgatcccagcgtactttccaacatgatgaacggcggtgacggattccattctgctggagacaccccatctgggggcgacctagcgcgcggatttcccggcggattcccgttctagctttcccgtccatttactcgaatgttgacgcgccaagcaccgtccggattttgcccttgcacgacctaatcaacgcatcctcatcatggttacacactcgattctccctgtcattgtcatgtcacacgggacgatgctcgatgcatatgcaacgtgacgaaaatgcaaccacaccaccttcgatttctgaacccaaaagtcaagtaaaaaagcaaagcatgcattcatccatacagcaggccggtgaatcccagcaaaacaatcctcattttctgtatccgcatctgcatcgtacggtgtcatcggctacttactcatcttcctcattcagcttgcttgtctcatccatctatgtccttttgcggggtatatcatatctgtactatgcttgctctgcttgctatatatcggcaccggcgctacctgcttgcttgcattattcagatagacctcttttcttttcttttctttttttttatcatttcatctttgtcttattctttgttactattttctttgtcctgagtgaggtgtcagtcgtagcctcttttccggcttgtgacgacttgaccgacttgaatagtttcttttcccccatctgtgggcttgtttcggcgttttgctatatacctgggattttcttttcgcttcttttcccttattaacgttcgccagagcatataggttgggattatgttcgcgactgatgaatatcatatggatgaatatgaataagaatctgatacgttgatgttatcttgatggagagcagtacacaacacagttgacatcacatgagacgtgactgtatatgtagttttatatctggcattttgtgggcataagatgttgcaggtcacgatatgaaaacggattatattcattatggaaagcaagtacgtacgaaaggggatatatacatgcccaatgccaaacatgaaaatatgcatgactggggtaacaataaaacagcagatgagtcaatagcaatcggatgggctgggtcatcatcaacattaacatcaaacatctcatacaaaattcagaagagctataaggaaaatctcaatatccaagtcccgaaagtatggtccttgtctctgcaagagccatcccgcatacacctagggctcggacttggctacccttgcgaagccgttggagcccaagagcgaccttccatccctcggtttcctgcagtacaaagacgtacctgcggccttcctgatcacgaatcgtcgcacggagaacatggagaccgccataggggtggctttctttgttgtttgtgctgcttcggctgaagccgggcgaagcgagccggcaagtgttcttgcagactttgaggaagttggaaaggtatgcgtctgattcctccgaagatggtgcctcgttggtgctgcggcgaaagaacgcctggtttgctttaggagcattcggttttggaggtccaacttgcggacaccatacctcgacaagtttcattgtccatgccttgacgtcccattctcgctgggggacaccacggacgtcatcgtcgataaagaggccttccgtcgtaatgcgcagcactagcccatctgtcaccatgttctgacctgacactagctgggccactggagtgcgaaggaacgcttgattgaaggcgtacacacccctaatgacgatcttgtcagggtccttggtctcataggcgctccggttggatggaggtggggtggtgcgtgctgttgactgcgatggtgcgtaggacgactcagagtacacggatcctccgtatgggcgtctaggtctatcgtagggtcgaaatgagtatgcatcttcttcatccatcgcaggcgcactagcctttgacggaggaactgtcggtttcttcggtaatggagttcgaggtgatggtgccgatgcgctggatacctttgaggctgtcgccgcagcctcttttgcggctgcttccagcatc

SEQ ID NO: 1339 - DNA, 3353 bp, Emericella nidulans
tgtgagtagtatccccgccgaacatcccaccctcaaaccaggcaagagcacagaaccggatgtgagtacgaagtataagaaattcccgaaggcagaagacaagtaaagctaagagctccgggacggacagacacgaaaaaaggaaagcaaacgagccgccgaagagcgccaggctaatcaaactccaaccataatgcaaatgaacaggtagtgagttgtctattgaggaagcaagcagtagcaggaaacgcgacggaaacgtacgcatggagtacattgtcacccagacgccgaacagacccggtgattaaagttccgagagaatgaagacatattgagaagagaactgtgtatagtgaaaaaagatagcggctggtcgccacagtacttttgaaatgacaaaatcgaaatacgataaagggccggcagaagtaccttaatcggtactcgttcaaaggtagaaaacgtatttgattgagactgaggagcgtatcatgactgactctggctagaccgcgatctagaccttctacttcggtgtgagggttcgcgcgcaggcggagcgtgttcaaagaacggaatcaggtctgggttttgactcggaggtgttgtcgatgtcgcttgatagtcaccgataatattgtcatccggagcggtgtccggatgtacttcaatgcctggttgtccgctccgtctgccattgctattgaaatcgaacttgaacgcctccccttctccaggccgctcaatcggagaccagccggcaatactgccagccacgactcccgccatcgcagcggctgggccaaaagctgagttggagcgggaacgcgtacgcctccttgagcgggaatccggcgacgcagagaatggaggagtaccttcgctactgtcgccaacaggagtccccggggccgaattttcacgcgaccttgagccactacgtgatcgaggaagaagttcttgaggatgctgcagcttgtgagccaccttccttaggcgtccaccacgaagggatttgaagaattttagctggtcgcgaatctcctcaagggcaggattccactcaaaacgcctgtcttcgtcggatacaatgagctccggccctttcttgcgatggaaggtcgggatgagcttgcgaatgaactcatccggaatgagtcgaatgatcacaccaaccgggatcgagatgacgcccaagataaggcacactgcccattgagctccagtaaggcgcgtaacggagaaggcatgtccaccgacgaatatgatcaaaatctgccctccaacgataataaactgaatgccaataaaccacctattacgaaaaagaccatcgaagatgttgagtccgttgtccaaacgacgagagctgatccttgttagattatactgaacttccctcgggatcataatactcacttccattggttgaaaatctgcatccagacgaacgtgttgaacaccaccgttgtgaggacattgtttgcattggcatcaccagaaaagtcgattatagatttcaaaatagatcttccagagaagttgaggacgagcgtcaccaccagttgataaatgctttgtccgatcatcattttccacattgtcaaattgatgaggggtgcggattttggctcaggtcgacgattaagaacataaggcgatggaggatccgttgctatttgttgttagattatgtttagggtcggagaagtcgaacgtaccaagagcgagcgcggcaaaagtgtccataatcaagttgacccacagaagctgaactgcagtcaacacggattcctcatcgccactagccactgcggagataaacgtgagaagaacggccgtgatgttgaccgtgatttggaactgtgccagttagtatataggcatatatagagttggccataacctacttgcaagaacttcttcacggcatcgttgacggtcctgccccaggccatagccttcacgatagaagcaaagttgtcgtccattaagataatatctgatgcctccttggcaacctccgtgcccgtaattcccatggagaacccaacatcagcagttttcagagcttgagcatcgtttgttccgtctccggtcactgcaactgtctcgccgagtttcttgagctgggaaacaagaatctttttgtcatcgggactggatctggcgagaacttgtagccgtgggataatctgtgtcatctgacggctgctgagctttcgaaatttaggcccttcaattgcaacaccacccggggtaaagatgccacactctcgggcaattgccttcgcggtcacgatgttatcgccagttaccatacgcacaaaaacaccggcgcgttgacactgttggactgattcagtcactccggctcgcaggggatcttggataccaaagacaccaaacatgaccatgtctttgaaaatagaatcgaatgctgcgagtgaacgatcttcttcctgcgtgggtgctcctcggggaggccactcggtaaagtcgcggtatacaaggccgatggttctcagggactgggtagcgtatttattgatggtttcgtcaagtttagaacggtccttgtcatctaacggcccttcctcgaggttctgagtagggttccgaacaatccttgtcgattttgctaacaggacttcagacgcgcccttcactagcattcgatacttctttccattgtcaagcttgataacaactgccatgcacttgcgacccgaatcgaacggcaccatttggacgatacttgcgttgtgccgcgcctcgctaagcgatcctagtccgaggtatgtccgcgcgaatccaaggagggccgtttcagttttggacccaataaacgttatggtcccttcctgttccctttcgaatgcggtccgattcaaaactattgaatcaagtaggagctctttggccggtttccaaaggggtgacgcaaactcagaatgggacaattcgtttccagaatcagttggccgatccccctttttttttgaaggtgaagctgcctggaactccctccaatttagtgccagttccagggttgtggcgccggaataattttttttcagttgggtgcctgttttttggaaccaaatgttggtgttttccatgttaacagccctacaaaccacccattgtgtttctttatacattgtactaacaatccagcttaagcaatggcactcttgacggcccttgccttcatccaaaaattatgatgctgccttttcgttgcaggtttttgtgggggtttcaaaccaccattaacctgccccatatttcttaatttacatttcttcacggctttctcttgtcgctcaattaatcttatccacatc

SEQ ID NO: 1340 - DNA, 1730 bp, Emericella nidulans
agcatccgcgctgtcaaaaatgttcgccacccgcaggaaaggttcattcctccacggccatcacagatcaaagcttttgccctcccctatgcaccgaaaaagtcgagtgaaaacagcgtggctcatcctggtaagttatccaatcttcaagacaggcgacagatgctgatcaagaacagctacagtgaagaagaaatgcgtgcagtcactgttggccatcgcgaggcaaagaattggtctgactgggtagcgcttgggagtgtccgcctgctccgatggggtatggacctggtcactggctataaacaccctgcgccgggccaagaagacatcaagaagtttcagatgacggaaaaggaatggttaagaagatttgtcttcttggagagcgtcgcgggtgtacctggaatggttggtggtatgctaaggcatttgaggagtctcagacgtatgaagcgagataacggatgggtatgtcgagatttctttcatcttatacatttcgtggctcaactaataatcaatgcgcagatcgagacgctccttaggaggcatacaatgagcgtttgttcttgctcacattcctcaagatggccggacctgggtggttcatgcgcttaatggtccttggagcgcaaggagtgtttttcaacggcttcttcctctcttatctcatctcgccacgtacctgtcatcgtttcgtcggctatctcgaggaggaagccgtgctcacttacactcgggccatcaaagacctcgaaagcggcaggctgccgcactgggaaaagctggaggctccagagatcgctgtcaagtactggaaaatgcctgagggtaaccggaccatgaaggatctgttgctgtatgtccgagcggacgaggccaaacatcgcgaggtcaaccacacgctagggaacctgaagcaagcggtcgacgtcaaccctttcgccgttgaatggaaggatccgtctaaaccgcatcctggcaaagggatcaaacacttaaagaccaccggctgggaacgagaggaggttgtttgagcatttatgcatttatacattgtggttttgtcattcgcgggagcaaatgggagaacatgcatatatgattaaagcggcgcaaattggttggacttgagcatagcatcgcggatatctcctctccttagtctttattggtaatagaatgttcttgaacctgttcagattaattgatatggaccggccatgcaattatgagcgcagatgaaacatacactaaactatattgggatagcaatatccgtgtggaaaatgggtctttgctgttactgagcgtagccaggggcttgccatcatgtctcagagccagatggctccatccaaagctccgtttatgttcgctaatgcatgtcaagatgtcatcaggtttggtgcagcctgcagacgcgatgcagtgttcatctgcctcttgtgggatgagggaccgacagattgcacggcatatcctgtgtctgggcgtcaggggcgccgggacgaaacagatcgaaaaagcaaacaatagtcgaatgccgaagaccaggttttctttttcttaaagcatcactctatccatactcagagtaagctatgatcacctggtaggcatggtcgttaggctggcgacgttaaaggtataggcgctactatcgaatagttgacccgcttcccctttagtgccacgaaagaagcccagaaccccccttttgaacg

SEQ ID NO: 1341 - DNA, 828 bp, Emericella nidulans
  unsure (1)..(828): unsure at all n locations
ttccttagaatcagggatagtcaattgctcaattttgccgatcaggaagtggcggacgcaattacccctactcaatctgtcaggaagcttttgacttcagagtcacgcaccatcggcaacaccgcattggggagatggccttttattagtcttggtcttttcgaaaggaccactaagccagacagttttgctcgcatttgtctcttctcaagccaatcagcaaaattcctcgcctctggttcagaatcgacctgcagccgaggagggttccatcgctcctatcgtgttcaggcccaacggctaagcctatgataatccgctaaaattgtggctgcccagtgactcgctctgattgatgatgcacgcgccgaggaaaaagccttgctgatccgagcattgacattcgtcgtcgacttctccagctttgaggggctgtaactggtcaaagcttctcgattttttctatgatggaacagatcctgttcgctcccgcccggtgcgcatagaacgaggagttatcttgatggcaatctatcctatgggccttccaaaccactgctcaaatcgggcaaggaagagcaagcaagaaagcatccctgaaatcagggaaacacttgctaggggcttgaacgtgattgcttctccacacgtatagctcgcctcgccttcccactcgattatggcttttttgaccgttgacagtttatcgccttgtctttcccccaaacatcaccctactgcgagtttagccaaggatttgaagacaacgctgacttctgacggtcncacccggagtaggttcctccacgaaaatatcgaggaatatgt

SEQ ID NO: 1342 - DNA, 11535 bp, Emericella nidulans
tcctaagggcgtccccgtaaattcagcatcctcgtctggcaccttggtctgatcgagcgtcacgtatttaagcgcaacatcccggcccatcttcggtgcctcggcaagtttctctttacgcaaacgatttccttcatcagttaagcggagatcatcaataccgcaagtgaaagcgcgcatgttcaaaaacctggtcagcagccgccccaggatactgagcaactttcctgcaactgtgtggccgtagacttcgtgaatggcgtcaatcaaaccacctgctgtaggtccaatctgtttcttatctagaattccgcaaagaagctctccattcctgaatatgaccttgtcctcctcattgccctctccccatcgatctcctggcgttgaggatttgctattaaggttgagtcctgctctcccgggtggcataatattcctgagaattgttgtgatcacctgcttaccagtccaaaggggctttggcttgattattgcggggtcgacgacttgaatcctttcagaaactgtatgcgaattttcgggtctcaaacaactgtacaatagctcgtgatagtcctccctgtcgaaaaaggcgtctcgacaagtgaaccatgtagccatcgaaatgtgatcttgaattaaacctctaagaggcttgcccgaagtcgcaacaagatactggtggtctgcatctgcgagtgtcatagcttccgttcgggcaagttcgttctgggggaaatgcatgttcatttcatcaccatcgaaatcggcgttatatgtgttacagttagcgtaatgcattcggattgtcttctcgttcggaagcacacgagccttatggcccatgatggagggtttgtgtagtgtcggttgtcgattcatcaggacaatgtcaccagtggtgaggtggcggtagactttcttattgcgtgagcccttgatcctccaatttgaaggcgcaagtagctggttggccaacgctatccgctcgtcaaggctcttgaatttgagattggtaacttgtcctagctcgttttcgatggccatagcaccaggatacttgtcaggtccgttgatgacagcttgcttcaactcccagaagttgtggttggtaacaggttcaggataagtcaatttcatcgcgaacaccatcggaacaccaatttcattagtttcgatgttaggatcgggcgaaataacactgcgagccgcaaagttgacacgtttacccatcatgttttttctgaacagaccctccttcttttccaggatctgtttgataccatttgcagactttcgtgccgcagaccccgtcaggccgtttcggtcacggtcaatcaaaccgtttacagtttcctgaagttggacaatagcatggagaagatcacggtaatcccgaacacgagtagcggaatcattgccgagagtctgcctgtccttactgatttggttgatgatgtcgcaattcttcagaatttgagttaaaggtgtattctgttgcgcttccataatcgcacctccttgttgttgtgcagcaggtcgatacttgttcggcggaaccagaatattcttgataaagaacatgtccgcagtgactttagagtctttcatggacgtaggtcgagagttatatacgaggtttaaaatttctgcctctttttcgaagagcagagtaattgccgcatgaacttcggatgatggcatatattgttgcgtctcaccagcgccttgcttcttgctttctgcctgggctacaacagcattcccgcgtgcaacttcttcctccgcgccatgagcctcggaggtaacgctagcagtatcagagacgtcgttcgcgggacctttcttctctttgacgttgagtttcttcgcttgctggagcagaatcaaaggattcggtatctgcagccctgcctgtatcatggccgctcgagccttctccgtgaagggtttgcggaaaattttggaggcccgatcctttcgatagcctggagaaatgctactcaatgaatcagttactggccataatctcacaaggttaaatgggttcgagtagtagcatacccactgcaatgggcacactttttggcagccactacatccttgaagaattccttgatcaattctcgccttttctccatagccagaggattcttttgcccagccatcacgctcttcagcaacccagcagcctgtgcctcacggatgcactttttgacataggcatttctgcgagagatcacatcgtcatcatcctcttcttcttcgtcgtcggatccgccagcatccttgcccttcctcgatttcggcgacgtcgctcccatagagtcgatgaatgctacttcttgaaccaagccgtattgtaaaaggcgcaacttgcaagcgtagatatttatttgggtccgggacatctgaaagcggtgacagaagacgcattgcgctcgtagtaagcggtacagctggtctaggtgtgttacgttgtaaacatgtacaggaagctcgatgtgtccagggtggccggcgcaagaccaagaattcatgcgacatgtcgtgcagctgtagatgttagctacggcaaaaactgtgtatgggcggagatataacacatacacatggtcattccaagcacctaacgcagtatcatataagccaccaggaacaggattgttgaaagagtcgagggttggggtattgtggattcgcttcacggagatcgctttgatatcctcgtcggaatagacatcaaagttgatccccgcgattgcggaggccacgggacgtgcgaaagtggccattgtccctgacgcagctccttcagcaacagaaaacgccgggaatgcgaatcctttttgttattgtcggttgctggcggaagagcgaaaggcgggagatcttgaagctccgaagaaaaaaatgtcccagcattttttctgccgcttgaaaccgccttcgcggccacgttagctgccgcgagtttcttgatgacggtctttccccgtctatctccccaaacttgctgctgtgcggcttatccgactgtggtcgatccagtgattataaactcatcgcgtcattccggctattcctctgttccggttggtgagtcggagtccctccgtcaagagcaatggcggacatgtcgggcaacatgctgaagcggcctcatcctgatgatgaagacaacaatgcgcaaaaacggcctcgttcaaataatgggtctccccatcctgggcaaggcgctccggccgctggtaatatcgacattgaaaagattgtggccgaggctagagcaaaagctcaagccgttcgagataggcttatggctgaaaaaagagtttctgcgtctccctcaccagcgccagcagcttcaagccccagtcctgctcctccagctgctagctccaccatgtcaagaatagaacagatgaaagctagagtggctgcagctacaggacgatcacaggcagccgcgcaacaacccagcgctccgactcccccaccacttccgcgagctcctgaggacgatgaggacgacagcctctcgcgcgctcgtggtggtcttgatgttggtctgcatcctgccctcctctcggataccctcgactttcggggcagtaagggacgacaggtgcaatcgagaaaccggaggaccgagtctcccggagtcagtggaaaacaggagcgagctggccttgatctctcaggaccatcactggaagagatcaaaaacaatccctattacgatcccaatctagggccgaaagctacgatttccaaaccccgccagtcgcgtcaactcctgttcaaccagaaaggtaaatacatacagcaggctgcagctcttcgtcgacaggctcagctggaggaaatgaagaagcgcatcgcggagcgagcacggcaggccggtattgatgaagatctagatgtggaaaaggcgtttatggtacctgctccaccagcaattgaatggtgggacgaacatctagtgaacgaacctgattacgctgcaattgatgacgaaaataatctcaaaattgactctgccgattccataataacccgatacattcaacatccagtgctcctcgagcctccacaagagaagctcaagccggaacagaagccgatgtatctcacgccgaaagaacaagccaagatacgccggcaaagacgcatggccgacttgaaagagcagcaagcgaagatccgcctaggtcttgagcccgctcctccgccaaaggtcaagaaatcgaatttgatgcgcgtattaggtgagcaggccgtcaaggatcctacagccgttgaggcgcgggtgaatcgggaaattgcagagcggcgtgaaaaacacgaggccaccaacgaagaacgcaagctcacgaaagaacaacgccatgagaagctcgcccggcaacatgcgcaagacgccgaaaagggtcttatcatgacagtatatcgaatcgacagtcttgccaacggacgacaccgattcaaaatcagcaaaaatgcggaacagaatgcgctcactggcgtgtgcgttatgcatcccaaattcaatctagttattgtggagggtggcgcccattcatccaacaactacaggaaactgatgatgaaccgaatcgactggaccgagaatgcggggccgagtgccgtacgggaaggaaaccgcgaagcccaggcttcatggctcgccgctgaagatgagaagggtgaactgaaggatctcagttcaaacacatgcactctcctctgggagggtcaggtcaaggctcgtgctttccgtaaatggttaggtgctcgggtgtgcgagaccgactctcaggcgaaggatgtacttgcgcgagcaaagttggagagtttctggactttggcgaagagcgcaaagcagcagggcgaattttgaaatgctatttgggcagcaattttccttgattacaggctgctttatcagtttcagtcatattaatgtattagtaaacaaataccctatgccgttcgcatgacttcaaaacattactggaattggtatctcaaatatgtggcattgaaacaaacgtagtagaacttttccgagagacgtatccgaacccatatgatgcaaaatgaactccaaacggatatatagatagtatttttcgtcaagagcgaggcggccattggttttgcccattgctcagctgtcgtagaagatccagctgcgccttcacctggtcaaaattcatagcctggttttgaggctgcggttgccctgccccaggttgttgctgaggaagagcttgagtctgctgatattgttgctgctgttgttgctgttgcaacgcagccaagaacagcgggttgatatggggggtgggcgacatctgctgataaggattaggctgctggtaagcctgctgatacggcatctggaaattgaagggtgctgttgggattgcagcttgagcgtatggctgctgttgttgaggttgttgcggttgttgtggaagagtcgggtacgatggatattgctgagatgggctgtaggcgggatagggctgcggttgatgttgttgagattgggaatgaggctgagaatccgacctctcctgttgatggtacgcctgacgatcgtggtatgactgatgtccgtgatccctaccaccccggccacgaccacgactacctctgccacgatcagaacctcggccgcggcctctgccaccgaagccagaagtcctgttgaaagaaccatcattctccacgggagctccctgctgcatcatctcgtgtagatttttaggtctcgcaagcggggtgtagccatcttcgggtacgttatcatcgtaattgagctcgctatgactcaacttcgatgggccaggtggcccctttgcaggcttcgaaggcccgccgtcctggttcttcgctccctttctctcctggcgcttctgcttcaacttccgcctatattcagcttcttgttcgtcgtcggagaactccacttcatcttcgccgacttcctcatcgtggaagttggacgcatcacttcccttcaagcctttcaaaggttgtgtgaagacaaacgttgagtgatccacgacatagtatacgacagtgcctctagagagaccatgcttctcaacatcggcggttgtggcaaatctgacagcatacagcgggttctcgacacgccctaaggtctcagagaccacaccggcgacgcggcgatcttccaagcagagaagtgagccagcctcgaggacttggtattctccggtggtgttcgccgcgattagtacagtgttgtcaatcgccgcctccacgtgccctaggagcacgatcttcatttccggggtaattgaaatgtccggaataggcagaacttcctcagggatctcgttcgctgtctttaaaggagcaccggatttacccttaccctccccttcgtcatcagagcctagctcagcctgcatcagaatccgcgcttgttcctcgggactcaggatcggataatcctcatcctcgtcgctctcgtcggaagagtccgaggagctgtcagaggaggactcgtacggggaggaatccatctcccattctgggtgctcctcctcttcctcctgctgttcggcttgcatggtcgcggcggtgtcagcagctgcattcacggttccatcctcatcaccacccatcttatcagacccctcctgcgccttgttcacttcaatctctctcttgggctgtttatcttcctcctcgacttccatcgcatctgggcctccctctgccggcctctcagccccttccttctgtgtctcttgtccactatgcacggcagtaggctgggtttccatttccgtttctcgagtaggaatctttgaatctgtaatgttcgagttttcgttcgtgccgggattctggctggaccggttttgactgaggctgtcgttaaccagactcaaacccgggatttgtggaggtgggacagaggagacgggttcctcggtgaccacaggtttgaattcattttccaccttgtgctccccatttaccggcgtccctgaaaccagcggagtgttgtagaaatcgcttccatcatctgctggggtcaacgcaatgggtggcgtatcgttcatattgattcgttttgtgggcggaccctctgggacggccccggggttgttctgactattgggttgtgtcatatttttgacagagagtatgataaaacacaaattattagaatatagccaaactgagaaagtgtaaaatgttcactcgaggattcttcccgggaatttttttatggaactaccacttttgccgttgcggtcgccgaactagctccttatcgataaggatttcggtttcgtgtccgcttctattctccagttgctgagggacgatcctttacgtccagtctgacaacaacgaagcaactatcataatgcctcgaaaaggaattgaggttccttctgttccacaggggcaggcagctccacggacaaagccacggtatcaataacactcttccttctccaatgcgccagctgacatcgacatcacagtccgcctccaccacccttctaccttcccttgaacgtcacactttacgtctgcctcatatcgaacggaatcgccgctttcctcgcaccaattcaagattgtgatgaggtcttcaacttctgggagccgactcactacctagaccacgggtacgggctccaaacctgggaatactcgcccgtatattcaatccgcagctggttatacatcacgcttcatggaattgtcggcaagatcggctccttagtagttggtagtaaatcctctgaattctacttcattcggttctccctagctatgatatgcgcagcgtgtgaaacacggctatactccgccatttgtcgtacattgagccccaggatcgggctgctgtttctcatgattgtcgcattcagtccaggcatgttccacgcctcagccgcctttcttccatctagctttaccatgtatgcgtccatgctgggccttgcttcctttttggactggagaggtgggcagaagacagcacaagggattatgtggtttgggattggtgcgatcgttgggtggccttttgctggagctttattgctccctcttcttttcgaagagattgttatcggttatctttctaaaaacatgcagaaggtcttttctgacgttctgaatggggttctcaggtgcttggcgatactggtatgacttgattataattccagctctgaatgagcactaacgtctccaggccgcagaaatcgccgtcgacttcgccttcctccgcaagcttactgtcgtgccgtggaatatagtcgcctataacatattcggaggtgaaggtagagggcctgagatctttggtacagaaccttggacgttctatgtcaggaatctgctcctgaatttcaacgtctggtttatattcgcggtctcagctggtccactgctgctcttgcaggccatattccgcgctcgggcgacaaactctgagaccttgctcagaaccgtaacccttttgtctccgttttacatgtggcttgggatcttcaccctacaagctcacaaagaggaaagattcatgtacccggcatatccgtttcttgccctcaatgcggcgatcgcttttcatatgattctctcatacatcggctcgagtaacccgaaagagctgatagggcgagtccccgcaaaattaaagcttgcaggagtgatgtctgttatcttgcttgccataaacagcgggctactaaggaccctagggatgattaccgcttataatgcccccctgaaagtcctgcagccattggagcagtcagagatagctcagccgggcgatacggtttgctttggtaaagaatggtatcgctttccttcgtctttctttctacccgatggcatgcgagccaaatttatccaaagcgagtttcgtggtctgctccctggcgagttccaagacgctccaagctattcggccctgcttgagggtacctcccgggtaccggaaggtatgaatgaccgcaataaagaggacacggggaaatacgtaagttctatggttctgcaatctatgacttttgcgtgactaacaattcaatagaccgacatctcacaatgctctttcttggttgactcccactccccggtcgcgaagccacagcgctggaacccaattacttgcaagacaaggcgcagtggaacgagatctcctgcgcatcgttccttgacgcttctcaaacggaccttttgggtcgtctcatctgggttcctgatctgccgatcatcccagatcaattccgcagaagttggggccaatactgcctactacggcggcgcacctcggactctgagtcggagttagtatagactgtatgatcacctaacaagggaaaccgaaaagcagtaacgtctcgctgttgcacgtacctgtatcctggttgcggccgcagcgggaaaaccaaagggctgggctgacacgcggcttttcctgatacggtaaaaatatcccaagctactcggactccgggcagccatcagtgcagtcgccatgcggactgataagcattcccctcagttttcatcgcaaagacttatagtgcatggtctatcgataccctttggcttgccgaggtcgcatccgatgaacagaacaggcaagcagacaagccatactctccagaacaacacgtacaggtggctataataataagttatcggctctcgacttcttgatagaatgctagcatgccatcaatcttgaccccattctctacaagatatgatttcagagacaatctatctcacacagaaccctatcgggaatgctgtcgctgcctctgcggtgacaacgttatgcatatggatttttgccaaattcctacaaaaatggaatgtattcaagtcgaagcctttgaaggtacctaattatcagaaatcaacaaggaaatatggaggtagagtctcctctctagtttcacaaacatacgatagggtgctaagcatcgctctggatgtagaatggacaccgtccaacttcaagagaccaaccgcatctccctaccccaactgggacgtccacaccacgaagccaattccgtaccgaccatttagatacggaccgtaagtgattctgaagcttcttggatgtctgtagagttaacgcgccacagcaactacttcattaccatgggcctgcgaagcatgaaatgggacgagtggatcggtaagccctgatctcatattcagccacacttactgacagcaaccagagctggacaaccactacttccgctaccacagagacaaatcccgtcggctcaaagaacgtggagacaaatgctgcgcaaccgcccccgaagcatgggacgccgctgtcgaacttcttgaagaactgtataacacccctgcctccatcgatcccttcaagtatagctaacactccatccaaaacacagtacttcctaccttcccgagcgctacccaagcatgttccgcaaaactccaactgggctcaccaaccttctcacaaatgaaaccttcgatatcacacagcgcccactccccgaagaccccatggctatgtgcgctcgcctaatccaggacgacctcgctctcatgattgaaaagcctgacggcgaatactacctcctagccggtgcgatcctcctcgccggcttctggcgcctctccgacaaatatggcatgcgactgtctgaaatccacacatccggcgacgtcccaggctacaaagagaaattagaaagggggatgatgaacttcttccgacgcctgaaggttgaggaccctgtcgtgcgcaataactacttcatccaggtcgacgacaatctagcctggagtcacagtattgggtcggaagatgcggacgtggtatcttggaacacggcgcagaaagataaggccattgaacaccactacttccggtccgagagacagtctctgcggcggttaccgaggacaggcgcagtggtgttcaccatcaggacgtatttcgagccgatcacaaagattgtcgaggagccatatgttgcgggaaggctcgcaagtgcgattcggagttggggcgatgatgtggcgaagtataaggggagagaaaagtatggggatgttctgctggagttcttggatcgaaaacatgcggaacaagttgcggctggattggatctcgagagggaggacaaggtgaggagttatcctttttagccctatgactatgccgcagcgtctttgactatttcacggtattgtgattgttagatgtacatattcacatctgataattctacatactttgtctatcttggcttcaggttgttggtcttcatagaaacaccaagcgcaatgcaataagcccgttcagtccaacgccaatactgatatatgacgaatcagcccaataagatgcaacatgaagataaaacgccgccaccatagtatgctaggcagagtttccaaagaacgccaataaagactaataaaccaaatttgtgagacaaatcaagc

SEQ ID NO: 1343 - DNA, 3956 bp, Emericella nidulans
tagcaacatcaacttggttcaggccctagcaaacacccttcaatacatcccatcaggtcccgacggattcgatcgttcactcgtatgccactatttattgccgggttcactccctgccaggcagccaattccggaccgtcttgatggaacgagctgcagcgctcgctgaacacgccgacctcggcagcttcggacgcatgtgtcgagttttgcaggaagtatggcgtgttaacgacgaattcgctgaacaacacagcagcttagacgagggtgcatcatcatcctcgcaaacggccagtcccgtgaaggccgagccgcccagttcccccagagagagcgagaacagctggacgacgaaagaagccaagaaaccccactggcgggacatcatgcagcagaacggttggaactaccttcttctttgaatttgatcgtataaaaaatacgtatgcttcgcttcttaatgagattgtatctcaagacgtcgggaggtccctcgatgggatctcgtacaagctggcttgtacctgcgacaattttgtgaaagtatttttcgaattcgaatctgtttcgaataatcttcactcgttatatacccatgtcgttttggaattcgttgatatttcactgcaggtcagggaaactgctatggagccttgcccttatgccgaggcgactcctccttcggggattaactactgggacacgttcatcacccattcactaatggatgggtaaccggggaattcatgaggtgtttttggtgttaggactttgttctcttctcttcttggggctgatgattccaagttcacatgacccctgattccgcgactggactacctacaaaccagcccgctggaatctgggttgaaaggcttctggatggagctggtgtggcttggattggctggttcatcatctattctcccacactcgctagatagcgtgctatgttttcaagtctgtatcttgtacctgtggtatcagaacggcgaatggagtattacggctagaatcagtgaaccttgaagggcacggtccgtcctccaacattcaatctatgcttttcaaccaatgtggtttcttcactccgcttctagataatctatcgtactagtcagaaaagccactgatgcccgcgcaaccgcactgacgcgcccccaactccgccgcctcctgcaaacctgcccaacggaggcgactgtgcgcctggaggctggtcttactgtcgcctccctgattggtagtaggtcagtagtcgagcttgtgtcatcggtctactgttttttcagccgcgtcgagaatgcagtagccacacctgggtagtatacaatgcactgctaaccatggtatgttccgtgagcctcttaacactgtactgtgttgcaccttttccggaaacctccagacaatacctttctttcacgcctatatatactccctcgcaggctttagcgcctactacagattgaagcatcaatgctggcgttagcgtaggaggaagtcgtgttgagtggatggggccgaccttgtacgcgtaggcacgtacgcctacatgttcacactcaactatgagcaattagatccagacacactatagatggacaagtgatacggctggatatggaagtggagcccaacaccacatacaacctcacatctatgtgggttgggaaagcaaaaccagtcattttccactccccttggttatactaaattcttggggaacgattacttgtaaggatctagcatcttatcccgctcctgagttgagcccacctaaacaaaggtaactgtcatggagaccgggaaagcattaccaggagctccttccgttagcccaccacgaataagattgcagcgacctgcccacagccggttggtggtcgggaaagcggaattggtgtgctcccattgaccatgaatgagcgagtcttgtgctgtgcggcaggttgtgcgggagtatggtgcgttagtgcttggtagactcttggaagcaaaagtttaaccagtatcgtgtcttccccaatctttagatcatctcgagggtcccgaattttcttatggcatcgtcgggtaatacggttacgagtgccaaagctttcacatcccactcggagcgatagaagcgaacaaagggggggtgagctgcgacaacctatgcagccacgtatttttgttcgaatgcgagaaagactggccatggccccctacgtacgcaagcgtgttcattgggagcaacgtagtgttaaaatctcggggtagccaccatctcggttcgatgcacgcgcagaatgtggcttagaataatgtcgactattgtgaggcctctggttgaaccttcgaccgtacacgagcccaggtactcgaacagtgttggtttgaaggaatattggagcgtcgaggacataatcgtcgaactaagttttgaggactcgagcggattaccagctcctcagacattcgcagtagagaagccacgatggtaccctggtgtggatcactgacgaagacgatagcttaaacaacaaatgatacgccacctgacgatagacgcatgagaatgggtcggcagagaggcttctccagtagacatagaaatgagcatacttcttaagaccgattgcttgacatgagtctatggtaacatcccgcccgccataccaacgaaggattccgtgtcgtccgtgcttgttgggctagactgcgacctgagtggcctcatctgtcgaaccaaggatgagatggattaggcgttggggctcgtgggcgtttaatatacaaccatgtgtcggcttagtgcagaatgcagaatgtagaaagagaaaagtgcactaagacgacgccgcatgacgaaccaacggtgattgtgcacaattgagcgacacaaacatgcctcgaacactgcaggactaggtagggggctggctcagctatgtaatggagtgtctgagacaccaggtagaaagacggtctggtaggtgaggagagcaaaaagccagggcttgcggaattgcagtcctctgcacgaggggttgttgcatagcaaagtacgagcgactccgtgtttcaacgtgaggctggactgatcatttgcgggtcgaaaatcgatggcagactgtaagcgccgaggatgattatagccgcccggccaatttacggaatagggagcgccatattttaaggggcgaaccaaggagcgcggactagccttgaccagcgccaaccgctgggctagaaaaagcatggaaccgaagaagccaacgatattgcgaggggactaaatcgacgatccaatgtccaacagaggatcttaaggaggtcggctttcggtatcagggttgggtctcttagctcgttcaggaagccacgcgcggcaacagcccgcgtaccatgagggtcagagaatattggatcctgagtggctcatagggcgggagcgacacgtgttttccttgtgtgatagtggaggcgcgaggagagcaaaggaattggcttatgatcgagtgtttggccccaaagcgcgcgacaagcggagaatctggctcaagcttgttggacttgggccgtcagtgttctggggtgattgacgagcggtatcagacccttgcgaagagatagaaatataaagaccactgatgctccctcttggtgccccgtttctgcgcccatggagcgtattgatttccttttacctcatcctaacacctgttattgatgagctaggagctaggtcttggcctgtaaggcagagcaacggaagcacaaacctgcataacatcaattggcgttcacttcagcaggcttcaggcagcagcctatacctcgcgcatccggtgagtccagctccagtacaagtgataatgagcggggagcgtcgagctggagactcaatgggactctccagaactcaactgcagccgcgcactctcgagctaagggtgatggcactc

SEQ ID NO: 1344 - DNA, 3078 bp, Emericella nidulans
ggccgccagtgccgctctagatctccacgagcagtccatgtccaattccggcagtgctttcagtgtcagagcggatcgcagcatcagtgggattgcctcgctgtcattccagagacccttcttggaatgccctgacacctggccgattcggagagagtatgtcctcgctccggtttttcgcgcgttgctgataatccgctccccgacgagctttgagcgggcatagcccatactgagagcgctacctagatcgctgatcggtagctcgtctatactgtccgccgaagaagcaaatgctgtcgaaatagatgagcagaaaagcatcacggccggtgtcggcatatgcacagacaacgagaaattgatcaattggttcagtcctacgatgtgcgatgtgaatgtggacagtgggaggttgaagttcactggccaagctgtgtgaactatcaaggatacacactgtcgcatttcttcgatcatctcctcagtcagccccagatcgggtcggtcaagatcactcttgagggcaatgatcttcttcgtccgatagggcagaatactcagacgcttctgctcgagggctttcaggatcgcttctttcgggttatctcgtctcgtcaagcagtacacgaccgacacggtatcattgtttagcatttgatacagtgtatgcgcgccaatggaccggtggcacccgtcaagatctacagagttagcttgacctgtgggggattgctgacccacttacaacgcctctatcgttcttcacgagctcagggacggggatatgagctttaaatgaagagtacttgtcgatcaaatgctgcataattgaatcatggtcttcctgatcgccgttccggccagcttgagcagcatgaatcaactctgcaagtcgtgatatattgcccgcttcgaaaacgacattttgggcaagagccatgctgtcttgtatcctgaagtttcttagcacgagtcgacgcaattggattgctttgaggctgtcgactcctgcggcgaagaacatagtctcggcgttaggtataggtagtcccagctcgttctggcaaagcttcattaaataggtctcagtgtctgccgtattcaactcgagtgtcccatctgactgtccttcataacgagtatataatccttcgataacatccgcgtaacgcgcataaacttgcgccctaattatcgaccccttatcagtctgaggacgagaggatccgtacggcaaaacacagaccatgtctcgcgagatctgcgagaactgctccgcgcgtgagtttgcatcttccacattgggccaaatgaggtccaagaactctgcgtcaggtgttgtctttgcggcctccgacctgaatacaaggagcccaggagctgttctgttgactccaaccacaactgcctcatcaatcaacgcactctgcctgatggtaccttctatgggcagagggagaaccttctctccattcaagagcgttattcggtcgtctaaccgggttacgtacttccatcgctcgcgcatatccggatggggcgtgaatacgtctcgagaatggtacgaacccggcgggtcgtcggagtttgaggccgtaagtgcaggatgcccttttaggtaaacgcattcaaacaggttgtctgagattggcttcatccagatatagggttttaagtcgtcgaaaaaccgcatgtaattccaatgtggatccccaactggacgtgagacggactctgctactaagccagcctccgtcctgcaatcattagccctgatcgaagaagccctgattaaaatctacttacaatccgaaatatccgccaaacttcacaccctcagcgacaagccgatctccaaggtcatctgggcacgcggaacctccatacgtgaccatattacacagccggagagcctccagccctctgtcactatccacgagaagctgaagcagatacggtactccctggactgactccggcttagcagcttccagagcagcgacaacagatgtggctgtgagtgggagcgaggcgtcccacatatacgcgaccttcctcatatacattgcctggaacgcagtcgacaagccatgcaggtgataccacgggagggtgttgaacgaggtcaggcccggtccacgcaacgggtgcgtcagaatggcttggtggcttaggtacagtggctttggtgtaccggtcgacccggaactatgcagaatgagtgcggtccgttgtcttcgagcggcgccgttgcgactgccttgaaacaagatgaaggctgggccatccatacactcagtcggcgaagcacgctgaatgattggtcttactataacaagttgttgccggaggatctcgcccagtgtttctctaatgctcggtgtctgaccgtacatgatggtatcgcaaccaactgtattgagcaacgatacgcatgcagcgccggacaaacgcggagaaagcatcatcactgtatatccaaggcgactgagagcaaaaaatgtgacgaccatgtccatattcgacagggtgagcaaagcgacagtcttctcatccttgggctgtctcgcattagccatggcagaacagaactctcggccacaacgaaccggtttgaatccagcctccaccaaaccacacacggcatggtcaatcatgcaattcaggtcctccccggtaaaatactcatactcaacggctgcatcgagagacttcggatacgccagaattggctcctggactgcatccgctgctcgcaggcggatcaagtcatctagggtattcagccggccaaatcgctggaccaactcttgcgtctcatcctgcagccacttgccggtcgattcagtatcctgagagttccccattgctgccggggcacataggagtaggacagactaccaggtctaagagggatgggtggtggctatgcctcttataagctcgaactcaggttcgacacggcgcaattatggcacgtcataaagagtttgcttcctctgagtaaccgattgtctcctggcatgtattctctcccattattatttatcctcaggcttgacgtgctgagcgccg

SEQ ID NO: 1345 - DNA, 3651 bp, Emericella nidulans
cccgcgagaccgcccaggccatcaacggcatgaagctgcagcgtgcccttgccttccttgagaacgttaagaccaagaccgaggtcgttcctttccggcgatttgccagctccactggccgctgcgctcagtgtgagtgcattcccacgatattcgagacgatggttactccagaaagaggcggctattcgatcaagggcagagaattcatcgcatggtgaaccatggcagatttggagacatcaaatcggagaatggcgtttggctaggaatcatgctgaccgtattccagctaagcagtggggtgttgcccgtgcccgttggcctgttaagtccgccgagttcctcctcgaccttctgaagaacgccgaggccaacgccgacaccaagggcctcgacaccggcaacctcgttgtcaagcacatccaggtcaaccaggctcccaagggccgcagacgtacctaccgtgctcacggtcgtgtatgtttcaaaccgctgacttgtccccgcttgtcaacaagactaacaaatctagatcaacccttacatgaccaacccctgccacatcgagctcatcctgactgagggtgaggaggaggtcaagaaggctaccgtcgtcgagcgcacccgcctcagctcccggcagcgtggtgctcagatccgcaaggccctcacctcggcgtaagcggactgggtgtcggggaggagtgaatgaagtggtcagaatttgaatgggatagccggagtttttctgttgtacggaacaaatacctggtcacgaagaaaatacaaaagattcttcaaaagcataatcccccgaaaagctctttgattatgggctgagcgacggaattcagtctattttgcacggcatggcggatctgtataactcttgatttggcacagtacagccacattgatctatcactacgtgatccatgattctagagaaaactaattaaggtcaagtatgccactcgaaagaggctccgtaagcgacttgcataaacagaatatccagtatatcaccacgccagctttacagcccgggctgagggtagtataacaggagccaagggtggcggtgctgcattacgcatactccctcacttgagcttaaacccaggcgacgaatcgccgggcaattccatcagcagctggctaattgagtcacagcatccacgagcaggtgtggtgtgcatacgtgtttcaagccgctgattgcaactttgtggcggtggtggggaagtcgagatcaccttccaagctccatcttccccaggcatcaccattaaccattgctggtatcccacttgattatcatcatgtctgactggatgtgacaaagttctttcccttgcgtgtcgtcgcaaagcacaaagcccgaatgtgccacttggacttgtgaccaactcgcttggggctgccgctttctttctgcctgtgcaggcgcttagtctggactggaacctggcttgtgagcctaaaccaccccagatgcctccagcattttagctgctgctggtggcttcttctgtttttttttttttttcttcattcctttcctttcttttactctgctttattcccatcaatctctcctcttatcacatcattcctactagtcgccgacataatgaagcgtttactcagcaacatcaacaagcgaccgagcacgagtcagtcagtccctgttccacgacgaaccccttactgaccgtcattaggtcggctgcgcggcggcaccgaatatccgcaagactctccggaaagcgtcgtcctaagagaagtggtttgtgggaaccgataaaccagatgcggggaaattgctgatcgcgttagactgccttttgcgaaaagggtcagggtccgaaccaaccggtacgtcaatgaaccctctcactcactaacggcagctaataaatagcagcaaggagacgagtttgtccatctgcccagcattgtcgaaagtgccgagtcaagccccaatgccgcgcgtgaagccgctcatcttctccgaaaactgctctcgtcgccgaactcgaccgccgccaatatccagtacaatgcgttgatgctggtgcgcattttgatcgacaatccgggacatacatttagtcgcaatttggacgccagttttgtcacagccatcaaggatttacttcgttcggagaaggatgtaggtgtacagcggtttctccgagaaacgttggatgccttggaatttcagcgaggttgggatgaggatctcaagccgctcgtggagatgtggaagaaagaaaaggctaaaatgagtaagacgtacactccgaaagtttgtatggacctttccgacactgtaaggcaaacgctgacctggtacagagtcggtcgaacagttggcgagcgaccatgtcgcgtcagaattcggatattcaggttcgccccgagcgtgtcgataccttgccgccacccgacgagctggtttctcgtatatctgaggcaaagactacggcgaagctcctgatacagttcgtgcagtcgaccccgccgagcgagatgctcacgaacgaccttattcaggaattctcggctcggtctcgaagagcgcagcgcgccatctcgaactatatccatgcgacgaaccccgcacccgatgaggacaccttactgacgctgattgaaacgaacgacgaactatctgtggcactgtccaagcaccagcgcgccatgcttcaagcgcgaaaagccctcggtcagcaaaccccgcccgcagagacagctacggccacacagtcgccagagcacagcgatcagtcaatcacaggcacgtccgcatcacgcccggtccctccgcctcctgtgccgctacgaagtcaaagtcctccgcttggtgagccggtatcgcccatctctcccgaagcaaccgcccaccgcagcgccacaacgagaaccgaacagtctgacatctcggtgttaagcggcaccgggccaactgctcgttttgagtaccggtcggaagattaccaggtgcagaacccgtttgcggacaactacagtattccatcgaccataccgacacacacttatgacgaacgagaaatcgagcgagatcgatggaataagacccagcagccgggccagcagcaccagcattattaaccgagtatccgattttgattactacagtattcttctgggcttgttttccgtgtttttgtatttataccctgtgatacctctttgcggagtatgaatgaatatcttggatacaattccgctttgccacccaattgcttactagctggctatactgatcgaaacagttctatgcatctatctgattcacatgggtcagtattatagattgagccagtgggcatgggcagtgggagggggcagccgaggagtagtcgacatggcgtcgaatggcgcacactgtgaaaggcaggcggcaagttacctgcgaatcctatgaattttatcacaaattgaggttgactcgtcgcaggtggaatagatggtcgtttattatcgagacgtgccatgtaaattgcccgatattgccgagggcatggaaaatcgaactcggcccgcctaagctaatgaagctgaaaccccgacgcgcctaacccggggccaaacacctccagcccatgtcaggctggttaa

SEQ ID NO: 1346 - DNA, 3606 bp, Emericella nidulans
tacaggacttacattgagcgctaattgaggatcatgaggctctgaagccttgataggtggggaatccagtttaaaatggatgcaagcggggcgtacatagcgcgcatgtggctccaaatggcgagctgtgatgaggttcgagtaccagttatcaggattaacaagttttctgaacctacaagaatattgaggttagaaagcttcaagctatcaatcagcagttacaatgcctacaggttctgttttgtcttgcccttgcatgtcttcgacagaactgcaggcacccagtcggtatgcgtgtacgggacatggacccatatcattttctcggttcctggttccggtctatcgaacctggggatcatccgaggccgctcctcaggtgtgcgctccataaatggcacattgagaaactctcggtatcttgacgagagactagatctatatgaaaaccgttagcctcggtcaaggattcgccatggtgttgcatcactaacaaaaggtttttttggctagggcttatagtgcccagattgtctgacgcctcaatctcgtcgttctgggacctttattaccggaatttcatgagaaatacgccgttcagatgctgagccctctgactggatatcaaaatacccttcgataggtggctcggtgacatgaatcctgggagagggctgctgttgggatgggtgctgggcgagaaaacttctactcctcttcactgagggtctcgaagggacgacctctagcgaaattatatctggatcccgcaaacgagagtcaatttgcgacagttcagcaggagcgcttgtaggcctgctgaaatcacttgtatcggagtctagagtcccagaggatagtctagtggatgtctttagtcgttcttcaagacattttgtaggtccagtctccaagaattgctcgagaggggtttttgtcgaccatagttgtaggggagactccctgctgacacctcttgcggtgtcttcgaaaaatccattcacatgaaccatgacctcctgctcaacctgtagcgggacgtcagacatgatagacagttctagtgccgtagagatgcttgactgaaggtccctgataaaatccattctggccgtggcttcttgacctttgaatgatgctgtgccgacatggtcggtggcgagaggcagctcgctctcatgttcaaaccctaataggcctgaccgaatggaggtgatgggaacgtgcatgtcaatcgtgcttccagtctcggtatcggttatcgtgaagaccgagtcgacggtctccaagaaggtccatattttcatgtccgctgagatcgccctaaactgtccagcaaggcgctgcaactgctcatgtcgtggcttgaaagtctcacgtaaccccgtcggtatagtatgtttgagacgtaatagacggtggatactcctaccaaactcgggcgcagagaggtagcttgagccataatgaggcgttccaaaaaatgcgatcccataacagcttgaaaaaactgaatcgagcggcgagggtgaccgactagctttgacaagcgctgctgttgctacaactccgccggtgctgtggcagatgaagaagataggtcgcctgcggctctgaagaagactaagattattgactgaataaagaacaagttctaaagacgtaccgttgacttcctggcttcttgcaatttattaagcagccttgtcgctagcgaatcaagtgtatcctctacacctagttctccatgatcgagaagtaacacgcgcgcattcgggatgaacctgcgaagttctgtcgtcaaccaaggcgattgcgtgtcttctccagtccatgcacctccgcgatcggcccctatcgcagggatagcaacaatgctgtaacttcatcagttttgactccataattgaaggaaacggcgccagggggatagggtcacttactccacgttcgtgatgatatcgcccgccatatcataggaaactcagtgccattcataaagatggtaacagaaaataccctcatcaattccgcctagctgcctaatatagaggtggcccctgatggagtgaaaggaagtcatcgccagacgtcatctgacatagttgagtcaatacgacggcagatgactctcgggttctgagtgatcaagaaggctgtgtcagcattctaaagattggcattcagcctcccgatttccgagagggggggaagcagaagagctttgaatccttcggtcatggcgaggagatcgtcgcgagctaaagatgaccccgcgcgcaatggctgaagctcgtccactgccgcaacagcaagtacaaataagactgagctgctgctatgtatatactctgagtagtaagtggcaaaagaaaataaatgaaaggagttgacagtatttctacttcgcagtgactttgttgtagaagaatacagagttgaaggtatgtactgtacaaaatatgcagacgcaagaattcagaacaaaagtccctccccgtctatttccacagacatcttgaagaaacaaagcagctctatattccgtataggatgtggtatcatcaaaattaccttgtgctcaacaagcgaaccggcaagctggctgaatgcttgagtcgtataaatagcggagactagtcgcatgagtagagatcgctcaaaagtcgaagaacaggttgtgacgagaggcccgcagaatgcaggttccgaataagaaagattggagtttgagattataaagagcatgaattaagaagcgtccgagacattaccatcaggcggagactgccgtcgctcattgacatcccgtgcaaacttcttgccaacctcgtatgttgagatcatgatagcgcaacgcggggccaccttaagacaacgggctacccagccacggaaaagacccgccgcaccttcttcacggaagatgtgcaagagaaactttggcagagaaagctgctccggctgaagaggccccttagggagtttgctgccagctgtgctcggcgcatcatctcccatgtggcggaacacctgctggcgtgttttcccaacgtcaaatggtgtcgtcacaagtgcggctagtgcgcccgatatcgaccctgcgacaaagctatccaagaacgtgttgccctccacatcggaggtccccagctgcgttgacgagggcgcggtctgtggcgggttatgccctcgtgccttctttcgaacctcgatgatcgatttttttacttcctcatatccccaccagtaaagtccagaaaatggcacatcgcgccacatggtgagagtgaacccccgccacaaggagccgtaacctttggcttgtgtcatttgatacaggccctccaaagtggctttgaaatgtcccgcgccagtgccgggcgtcgcctgcagccgcgtccggaacatctcaatcggacttatagcagtggctgctgcaactcgcgcaactgctcccgcaacgaatggaacgtatgcgccagggacgacgcgcttgatcggactcctgtcgtcggtgcgcaaccagtcgtatccggcaaaatagatgacatttcctggtatcccatcattaacgtcggactcaacccacgccagagcgtg

SEQ ID NO: 1347 - DNA, 8425 bp, Emericella nidulans
ttcccgcgctgttttaatatctccacattgtcctctcagtatcactaactgccgaatcatgaacaggcggccgtggttcgtgagacagcttcgccttacccactgacgtagccgcgcagcagggagtctagcccttcttgcaggctagactgcagctagcagccgacttatagttgctgttgatgggaagcaatcaagaatagtggcatgaacagcaaaatggatggaaagggagggacaaccgacgccagggatgtttgttgtgatgataaatctttgctgagagtgaaccagggtggcggcttgcctgtgtccacggaacctgccccgacttgttaatgtgaccagtctactgcatgaatcaagcattatttacttatgtggtaaaatatcaagggactatctcatctaaaatcacaattaagcagtcgttcctcttattcacataatatcgtcaaagccgaacacggcacaaggagagacgacgatcaataaacgcccaaatcataagaaatatgtacctcagtcatgtgatatttagggacaaactgagtctcgaagaatataatacagtagattgtgccagtcagatttctgcaaggcccggaaagcccgacaggacagaaatcggagacggagagcatctgagaggctcacgactcggcaggtttggcttcatcctcccgctcccgttcagcgagtattttgttctttgcatcaatagcgctttgaagggagtcaatgtaagtgcggaatttcacaatttctcgcagcaagtacgatgacttccgctcccaattggccatggattttgctgcattcggatgccgtggtgagaacgcaagcaccatcgctggccgaagttcattatgccgttgcagctcgtcctcgacgttcttgacatacgtttgcagtgacttcaactgatcagcttcattaagattggcggccatcatactttgctgcggcggagtccagtcactgatgtgcaccctatccgcgggcaacttgggccggacaacctgttggtcgatagagctccgaatagaactttgaaggctaggtctcggtcctggcccagatgaagacggtggtgacctagactctggattaatcaacgcactgttgataatcgcgtcgctccatccgtactcaatgttgctaataccaccaataagaggctctttggataatctggcgctccagtagtttgcactagagacaaactcccggacgatttccggtgtgcctgcttggaaaaggtgtactgcaccagttggtagactcaaagcccagacatgcggacgggactttgagtagcctggaggcggaagcgcactggcaatggattgacgcaagaggaatttccagatttcttcggcgttctcggtccaattacctccaccaactacaacaccaccgggcgaacgttgcttggacttttgccttatagtttttgatgcattgaatgagaaaaggcgcatccaaccctgttggatgacagcgaaacaatcattccagttgcggtccttcgcccgcttatcaacagaatccagatgatgcttgtgttttaagtttccctctttggcccatggcgcaccagcgagctccaaggtttcgtcctcgagaagctgaccagtccgctcaaactcttcattgctggcaatagaatgcgcggaatcctcgcgaataattgcctgactgagagcgttggcgaagcctatagactgttgataatctgcatgtggatatccagatgcaaatgagtcaacagaagccgatgtcagctttcctaaagagtacttgctccaagtactggatccagatggactccacagggatgactgatcatctaagcttgttctgcttgagccaagagtagaaggagggtatagccgcgctcgtgaacgaggcttggaagaccaacgtgcggtaccaaagcgagagtcggcagaacgaccgcgcgggaagatgtcagagccactcttgctgacggtgctcgggcttctgcgaaggccatgcggcccggagttagggtttaacattgcacttgatgctgtgcgaggcatgtctctgtctgtttgggctccaagaagtggaagcctttgtttatggatcgatgagtagaaacctcggaggactgcctctacctgttgctcccaggctttcgttgtcccgtagaacgggacgttgacgagcggaccaacctcgtcctctgcgtcatttgccattttcgcacctaaatctgttcgagacaagcgattcaccaattttgcaggagtagtagcgggtttgtctgtcttgtccgttgttgcattgcttaattccgactcctcaggagaaaatgtcgcagatctagaagacgcaaggccagagttcaaattcgaagtggtacatttgttgtcaatgtcgtctggagcagcttcagcagccacccgttggattgtgggcattgtattgcgaacgaattgggatttggtcatcttctgctcgatatctgcaaggtgcaaatcggtattcaacaagagcagggaataacatattgtatgtacgacatctaagcttgggtcaattctgggcagcataaacatgagaagcatcaacttaccagccgccttgaagccatgctgtggattacattggcaccatcttttagagaaggcatccagaacacggtctacttgttgggtctctccttttagcagtaacctgagacataatcctcgcagggctgtgagaatgttcatgttagaccagtcaaacaaagccatatatgcttcgcggatcttggcacgatccggactaccaagccaagcagcggctggttcgttcccaatatactcatcctggctatcaaacagcctccgcgctagttgctcttctttgctgctaggcaattccgagggcacatcagcaggaggatcagcgttatcttctgcgtgtttccactcagatacttgaggaacgatgggggtattgctggcggtttgatagttggaagtctcagaagctgaaaattggcaagactccttgtcgatgactggagaaggcaatttgctgggcgaatccgtgtcatcattccatatggtcgcgtcataaatgtctctatctttcaaatcctttgctcgagtcaaagtcgaatcattctccggtgtctcaatggcgggaaggttggcggattgaatcgatgagcgttccgcaacaggggataacgaggtaggacgcagattttccaatatcataagcttgtctcttgatgtttcagcttgtttcatctccacggatattgcctcactgggttccgcctcagggccatcccttgttcgccggcgagaggagcgaggtggaaccgggggtgcgtcttccagcttgtttgattgaagagaaggctcttcatcgccgctgctagttcccaagaaagaagtatcatgtgcatgactggcggcgctcgcagggtaaagactatacttggccttgggaccgttgtgaacattcagagagttgcccttctccttgcgcctcagcacatcatccggtttcttgttgtcggggtcattagccgcagtgctccagtctgaagattcggtagaatagtcaaccgcaggtgtgctatggttaggagtagcatcggcaagatatgggttcataaccttccgcaggctgctaacagggctgggttctggtttcaatatacccccggccttgggcccgagattttggggaaggatgagggggggcggacattctccgtcaccgacttcttccgtcggcggaaaaatgatgacttcttgttcaccacttgggcaccttcacggggtgcgtgggtgccggccgtgccagtcttctgcggttgagtccgtgttcttgggctggcgctcgctccactcatattcttcgactcgggctccttggaaagtgggtaatccgataggctgtcaaaaggcatgttaccaggggccctcgaggatccgaagacacgccgaaagaatcctgggcgctccttgcttggggtcggttctggaataggaaatgtcggcttattaaatgatattgttggactcggcgctggcggatctagcgaagctgctatattcggcggaggctccaggtcagcgtcgttgagaagtgcaaaatcatgatcccgagccctcatggctgctgtgccaaggttctcagggcgaggatttcgtgattggttaatccgcgaagatttaaggctgtcccgtcgtgatgccactggtgtgcgcgatgactgggcctttggcgttttattaaattcttgcgatgctgcgtggttttttctcgggcctgcgggaatgctaggcgtgggcgccgcatccatgccgtcgtatcccatcgaatcaaagtccggagagaaaccttgggaatttatgaatggttttcttgcgcccatgtcaaagctcgctgatcgcctctcgctggtcgggtctgcctggcgtcttgagaaagaagagcccccatccaagttggatgacgcactgcccttgctgctcttccttcccgcgcgagttgcaagtgcagtagcactggtccggtagtcaacgtgagagccagaaccatcacgactccgcgtgctctcgatccttcttatacccgtattgtaatttgagctgctattactccggcgtcctctcgcgagctgtgacgcgtaccgactagcgccctcatcatatccgtactccacatctgacgagagtgaggaagaaaatgtatggcccctgtatcggcgctgtgcgatcgaatcctgagaggctcgggagtatttaggggactcgaatgccgaactgaagagacggtaatcatccaaagcattgccggacgagaactgatctagggagagcagcatgttgtcgacgatggatgtgcgagcggcatgcccgggggacagcgacagatcatggggatctcgctcgtcgccagagtcgtagctgtcgtttgcattatcattgaaatcatcgaggaaggtctcgcggacagacggccgcggctgacgacctctcttgactttgtaactggaagtacttggaggtgttcggggaggagaaacggtgtctgggtcagggtgctgagaagtcgttttgaagacgcccgattgcgttgatcgactcatggcttaacgagtggtattttccaatggatccggcatcgaacgagagtgaggaatcgtagtttccgaaattcgtcgccaggacaggattatagaaatcatatatgcagtattcaagaatttgggcttaattatatgctggtcaaagcgaaacgagcaactaggactctgtatcacctgggcatggtgtgaagggggagggccacgatgctctgcagtgtaatgcgcaagggggaagatgttatcctcgagaactgcctcagatgaagaacgtgggcgataatagaatcaattgaattggattttcgttttcctgtattacttaatgcgagtctatcgatcagcaaaccaaagagcaaaagtaacggccagcaagacgaaccaaccttgaagaaggtagggactggaaccgggtagtagataaccacggctcgcggaaggagagagtgcggttctccaggaacgctaccaggagtcaggacgcagcgagcgaaggacaggagtttggatatgtaaacgcaagaaaagaacaaccaggatgatggaggcgatggtggagagagtggacaggcatgtgaatgggggaccggatgggcttaaaaagcaatatcgtttccgagaatctgaggaaccaatccatgatgcaaaaggcgatagttccgcttagcgtctctaccagctggcaaggctagaccttccccggcctagacgctgtccgtcaggggcaaagtcgatgggtgagagcattttatggtgcgtcagtttccgagaatttgcataccttcctatggttggagattcctagccgtttcatccagtatcttcgcgaaacccatgaaggtgaacgacccatgaagccatgccgcttgtcaataatggttattactgtacacctgaatctcgagctggacgctaatcgacaccggcagctgagcagacacgacaaatcgattcttatcaggatcatccaaaattactgacgtgtcttaatgtatccagctttcgagactaattcgggctttctcattgatagggtcgactcaatccacattgttaattcgacgccattgtcggcagtcaattgttaactttccacttggttcaacttcaccaagatctatcatcggcggagtccatcagtccgcttgtttgcagccactaaaggtgtcttggcagactggactttgaagttctaactctcctcataattaatccttgaacccgagaggaatgcaacgtgagacatgagaattgatataggacgccgatatgcagaagatacaccagaggttgtctggtcaaatacaaatacattggaggcaaaataattctcgtctataatacttattcactctgtaagactttaagggctccgtctcctaaaagtcctggcccgcagtgacacaagaccatttcttatgcatgcatagtataccaatgaacataatctatgcttagcggaatggatatacaatcatccgagagccgaccaactggcggatgacataaccttcccatatctgacactacggtcaaactaactcactgtgtattgttacttacctctaattgctgcaccacgccgtatatgaaagtcccttctatgttcgcgtcctaggaaatctgacacgagatgaacccccatatctctgtaccccgtcaacatggcagctctcccaactttggcggcttacccgcgaaccgcggatcaagtactatacggatgccgcgtttcttcaagaggtacggttcaagtgagcttatttggaggaagcaacgctaactcgagtcaatcagaatgttcaagttcccgcagatggactttgaaatggccatctgggaaatgacgtcgctcatgatcgcgccgaagaaggtcttcaagtcaatatactaccatgtatgtcttacactgccgatgcagcccagaatacttagctaacagaacatgggacagaaacgtaagtcctgcttagtctcagatctgcttgtcgcttctgtctaaacgtccttctcagaaacaaagaacacatggcaccgacccgacccgtcgttcgcttacctcctttccttcttcctgcttctcacagccctcgcctggggtctcgcatacgccccttcattcggatccattatgcgccttttctttcgatttgtcgttgtgcacttcataggatcgtcactccttgtctcaacaataggttactttgccatcggccgtctttttggccccaatggcgccgcggcgtcaataacaggcctacgcatccgcggacgacggcgcggcgcagcgcagggtctttttacgcaacccggtgagaaggatcagttagagttcgggtactgtttcgatgtatgcctttaaaaccgtttaggcgcgtatgcggaaatttcagacagatagctgacatacggaatcttaacaggtttctaatcgcgcgttcttccccctttaccttcacctctacgtcgtacagtttctcctcctcccgctcctcacccgcagcccgagtgatttccttactacatttctcggcaacacactttatctgtccgcattcacgtattacacgtacataacttttctcgggtataacgcgcttcccttcttgcataacacagagcttcttctgcttccgattttgttgttcgcgatcttgtggctcgtgagccttattgtgggctggggcgtggtaatgcagggacacagcgtgaaggggctgttctggggtgtataatcgaggtgatatcacattggtgttttaatgcatatacatggtttcgtttcgtgtgcaattatgggcgttagtgcattaaacggttctggttgtctaagctttttatcttgcgtcgtttactacattactccagcaggttataggtttatgcaggtgcatggttagtattgttgtgttcagatatcgtcttattctgaagtcttacgctgcattttcgccattaaaagtaagagttccgtactcttcgtctaattgtgaaggaaaacgtactctattgctctgtcatatagcaggcgtggtacgctcaaagatgctaggccacttaataaatggcatagagtcagtgctgatagcttcgtctctttatttcttccctcccttcttcttccccaccttggccagtttcttttccctttcttcggctctctgtcttgcgagctctgccttctcctccttctccgcttccttgcgcagcctcttcctgctcccgcctctccctcacgatcgccaaccgcgccagatccgcccgcgcctcttccgtcttaccctctgcatgcagttt

SEQ ID NO: 1348 - DNA, 1081 bp, Emericella nidulans
gcgccgccaattcttcaaggagctgagactacatagtgcatgggagtgaatcgttgagccgtcctgcctctaaagcttttttgacccttaccttgtatggcaaagcgccccgctcgttgagaaatgcttccaaactcgtcgcgacgtccaaaaaaccaacatatcgatctcgttcgctacaattcagaaggtagcgttttcagcatcctcatcagaagtttctgcaaaggcgcccttccctaggtagacatcaagtccttatatcaagttatatcaagaaacccgccagtgttccgcctgctgcaatgacgggggaaaggatactctacctctctttgctagaactgagaacaataccttgaaatactggattcggtgtctgatacaacaatccgtctacctcggaagccgaactttgaggctgggcagctatgaaaagtcatgcgctatgcaggctcaattactattataaccacaggcgtagatgctgaccatgagcacgtttgcacgtattaccgagaactggcgtagcgctgctgggaacgaacgggtaactatcgttttcttgattattgttgcctatatcgccccattcaaacgcgcaacgcatatcaagataagatcgattcaaaaatcaggcgcaggtcgatgccgcgggttgcggtgcggctcccttgaaacacaagcgttcgtttaaactacgttcgctgtggggtgaagcaaggagtaggtctggcccttctgagaggcttaaggtttgataagcgagggcatgcctccgccttgagcccccaagccttcgatgaaaacactggcctggctctcgttcctcgattgatgctctgtcgcagttgagctttgtaaagcctgagaggtgagaatgcagaactcgcaagctcaattccaaaaatagtagctcggaccggccagataaccctagaatatgaggggcacgagttgggcatgatccttcatatttaacgcagtcccgggcgtttcacgacattctgtcggcgctggaaggccaaccagccttccatcccttcggttaccggttaggagaggtgcgacactgttgtgt

SEQ ID NO: 1349 - DNA, 2280 bp, Emericella nidulans
ccttgaggaattttacgtggacaagcctcctgaaggactcccggtacccctgacagggaacgtctccctgcatcagcccagcttctacgtggaaagcctctccgtatatcctatcaaaagctgcggggcgttccgaattccggatggccagcggtgggaagtgcggagggaaggcctagcttgggaccgggaatggtgtctcgtgcaccaaggtactggcataaccctcaaccagaagagataccctcgcatggcactgatccggccaactcttgatcttgagcgttgtcttttacgtattacttgcggagaagccaattctcgagatgggaaaacgttagaaatctcgctcaatcgcatcggcacaaactctctcacgacatctctgtgtcagaacgcttccaagccctctacagtctgcggagataaagtcgtcctccaagcatatacgtccccggcagtctcgaggttcttcactgacttcctcggcgtaccctgcacactagcaaggtttccaccgcaatcatcaactagattccactctcgagccactgccgcgataaatagggaccagaattatagtcagaagcagagccccagcatgccaggctcattcccccaagcaccttcctcaccagatccgtacccgactcccattcttctatctaatgaaagcccccttctactcatatcccgctcatctgtgaaccgtctgaatgaatccattaaatctgcttcccaaccctgctcaaatccgggcagcgccgccagcaagaaagcagtcgctgcagacgtcttccgcgccaacgtcgttgttgctgaaaacatctcgacagcggagcggccgtatatcgaggatacctgggcgtcgttgagcatcggctcgggacctgagcagctgcgtttcgacgttcttggctcttgcgagcgttgccaaatggtctgcgtggaccaatataccgggcagcggggcgacgagccttatgcaacactggctaaaactaggaaaatcgatcgaaaaatcttgtttgggagacatatttcacctgttggcaggcccaaggatgcagaaaatgggtgtttgggaacgattatggttggtgatgctgttacgccatcgtatgacaatgaatcatgacgctgtttgggttgcacgcgtattggctgttctagaatattatacccggtttgtagcatttgcatctggcatgagttatgaatactaaaggtcgatataccctgtcaccgaggtagttaagaggcttttgtatcgaattggatcggtgtcttgcacacgaagtatggactcaaaacaaatatctattggtacagtacgcatgagcaaatgtagaaagaagaattgcatacccccggttccataccatccaaaagcttgccccaccgagctgtacaagctaaggaccagagaacaacaaccgtagatagtacatatagcgcagaaacccatccaaaaggcagagatatgaaatacttcacctcttgggccacttcttccaaccacgaccatgacctctctgtacgaatagagtaagcccattagcaagccactcagcagctcagaagagcaacaaatcaacgctagactcacctgcttccacaaccggatcatctccggcatctccatcatcgccttcctcctatcctcaagtcgtccttccatcgtcctctcccacttgtgacccttgactttctgtccaatacccgtacccttaacctgcaatccacgctccgcgcgtctcgtctccttgtactcagtactcttcttccccggtggtagcagtgcctcaacattatacttgatagccaacttcaccagatccgcctgctgccgcagcccataccgcggtccgatccatttccccgtgcgaaagttcttgcgaggcaggaacggattcgggtaatcagggttcgaccataagagggcccgcgagggagagatggcactcgggtcagggcgttcgtggcccttggcgtctcggttaggagtatagggtgatgggagggccccggtctcggatgctggtggtggtgtcgttgttgggtcggggggtggtgcagccgccgcggagtagtgctggggagggtagcgggcgaaaaagttgcggaggcgggtagggagtttggcgattaggccagaactggctggctggagggtggacattgtgaaaagcgagagagtaattgtgtgccagtacacgcttgaaatgtacggcgtgtttggtgtcatcaatcgccggggaactggacgatactgagagc

SEQ ID NO: 1350 - DNA, 2650 bp, Emericella nidulans
ccctatggggagtgggtcttaatagtggcggtcatggcccttttttgccaccaaataaaggccgaaggaattgttaagcagccagttgggcatcgattgagaaaattagtccaatgtcggcaaaatgccttcctccgatgaatcgaacgcctaaaggcgaggccttgatcattgccgattccgagtagcttcccgcgcaattccttctttaggcgcagcagatattccattcaaccaaagacccatcgcgggtcgattagttgatcactgctgtctattgcgagcaagcagctcactgaacgtgatgctttgcttttggtgttggaggggagctggggaatgcgcggtctctgtttacaaggacgcctaacacctgggcgccaagcaagagaacaacggcggccgagcttaggttggtgcttggataaacattccaggcccactcctgcaccagccacagtgcatacacaagaattgggtggtatccagcctgccagaggaggaaaggagtcgcccaagaaagataggcgaagaattggtaatgtaacgaccttgcgcacagcaagccaacggacagggatgtcaatagtgcggacataataaaagacggatgaagtgctatcccgcggtgttgtccagtcaagaatctgcccgcgaaatctggcaagctagtaccagatgggttcagaaagcaggtgaaacccaacacaaccaaaatgagcaaatgcagaactatcaggcccgcccaaaagcctttggagagaaagatatcctcccccacaaacctccaattcaccgtccacttaaacataaattgccttccaaattcgaacgcgcgctcaaaatagccactggggttcgtcttcaggaacggtatcgcaaggagaatctagccctgtcagtcctttgtgcgcagaatactccaccaagaacatgtcacagacctgaatgcccaaagccaacccagccagcctaatacatcgtccaatatccaagctcaacgcgagcaccaccataaccgcgggaaccagcagaatcaaggtcatcttaacacctagcccaagcgaccaaagcacaaccgcgggagtccatttccggtttatgaagagccaaatagagccccacatagccagcgccgcaagcccatcgttaaaaagccgtagcatgtaaacgctatgcaaacgtttggataaaaccaatagaggaaacaagtatggcggagctccgactcgcctatagcacgccatgacaaccgtaagacatatcaggtataggaatgcgaatatgatttggccaaagacaatgtcccttccttcgtcggttagatggtggaagagcgagtagctgtagacgtgcgcggctgggtagacaagcgggccggtagaacccttgattagagtgtagtcgcgttctccggaaagatacagtttgacctgttgcatgtacgttgtccaatcaatttcggtatctagtaatgaggctgttaggttggctaactagaatggcatatgcgatggagctgcgcaacttacaggggactttccatataatgaaggcgcacagaagcccatcggcgatgttgagaatgggggcaatccatttcgtgtgctttggatttgagcacagaccgctcacaaggtctgtcaatgccattgtagttgatgaagaagaagagcttcgtcacaatggtcggagtatcggagtatgctggcctcaacttcgagccaaccggctagcgggcgctattgttaagtgaccccattcggcttagcgccacactggagcggtccaagcgcatgtcatacaagattttcgacgatgatttcttgagcaggcagagtcgagtcatcacttgtatacagaatgatcattttagctgttacatataagacctctctaagcatcgatcccaccatatggaaacaggccatagtgtatatgtacaaagggtatatcgctggtttggttttttgcaccgtccgcttgatgggtttaccggtgctatttcgtaggcccaatcgaggtcgtcgaaagatagtcattggcctgtcatagcatctcctccagtctgtcacactctaatatgcatccaaattattggcctggctgccctccaacatccacctgtcgtctttctccttgcgcatctaaccctttcgagaaacccagcaagttccctatgatccccgtaggtttgggtactgggcattcacgtccaggagtggcatattgctttgcctcctcttccaattgcagaaacgtggtaacttcttcgtccgccgtggttgttggcttctgtggaagcacgttccctccttgtgcgctcatttcggcatccctacgtctcctccgtcgtactcggtgaatttgctgtccatcgggaccaataatcatctcagagtcggcaaatgtggtgcgcggggccgggcaagggaataaatgtgggatgccgacgaccacaagggacgcgaggagtgtgccggcgaagaggccggttgtcgaccgcgaccgcggatgaagatggggtggcatgtccgtagaggctgagttgatcgaattcgagaggcactccgtgtattcagaacggtcacgtcggcattggatggtcgtttagtctatgtgggctgatccctttagtagggttaattcg

SEQ ID NO: 1351 - DNA, 2403 bp, Emericella nidulans
acatattcgacacgtacatacaccatatgaggagctacttcgctcaggatgcctcgactagaggctcgcaataaggttcgtgaccaggtacaaacgatcctcgcagcctgggtaggggagagcaaaggcgcagaaccacagccaacaatactcagtttacggaagagaaaggagtaagttgtggcgctggatggtcctttttctattattacctgcgtgccaaagttatctcgaaaaccatgtcataccacgttaaccatcgatctcacggaatgcatacgacgtacccgtgcgtcaattgctacggcgcatgccttcttgtcgagggttttttctggaagcggtcagagatgttgaataatgatggcatgagttacgagaaatgcgattgtattttagcatgcatagactatcaacattgatgttgtccacgactgtccctctcccgccggtgcggtcatcaaacacattcctgcaatagctaacagtagacgaaatactcatcacccacctacttataatcgtaatagaggaccgcaaccaagcatatgggttatcctggattggatagctgaggtcagagaccttttattattgtgtatagcctgtctactccgtagaacgaagtggtgttgtacctacaattatgctcattacatactgtcataacataatatattctcatgacatcttgaaaaaaagatacctctaaatatcaaagtaaagccgattaccaaatacttcgtttatggcttctctggatatagatttccgctctgcgtattgcctaaatcgttagggttccaaaaggccaccttatcatgaaacaaaccttgcaaacgcagaagatatcaaaacccataagaatgagtcttagaattattaataaatgtttgtagtaaaagaagggagagcgcttacatcaatgaggttctgagcatactccccaaagcggacattttagggctagccctattattcaattcaatcggagatttcccccaagctccgaggatgagctgcggcaaccaccggcgacgaccatcgcatacatctcgtcgcaatggacatttccgatcttatcgagcccccgcagaagcgcctcaagactgaggatatctccagcgcagacgaggttgttcttcccgctggcggaatcacgccgcagaccgacaacgaaatcgacgagcagttatcgaaggagattgaagttggcatcactgagtttgtcagcgctgataatgagggtttcgcggggattttgaagaaaaggtattcttaactgatacggttggggtttgatctgagtgctgactattgccagatacacagatttccttgtgaacgagatcctgccctcggggaaagttctgcatctgacgaataccactgcacctaataccaatgatgaggcgactccagtccaggcagataagaagccggccgaagataagccaaaagagcccgaaactcccgcagagaagttgcctgctccagttgagtttcaattagcggaggaagatgaggcgcttctggacactttattcggcacccaaaacaccaagaaaattgtcgccctccataagaaggcactggcaaatccaaagactaagccaagcgatctgggacgattgaacacagtcgttgtcaacgaccgcgatcagcgcatcaaaatgcaccaggcaattcgtcgcatcttcaattcgcagattgaatcttcaacagacagtgaaggaatgatggttatctcagtcgctgccaaccgcaacaagaagaatccacagggaggtggaggcgggcgtgagaggccgcgcgtgaattgggacgaactgggcggacagtatctgcactttactatttacaaggagaacaaggacaccatggaggtcatctcgttcatcgcccgccaactgaagatgaatccgaagagcttccagttcgcggggaccaaagatcgccgcggagtaaccgtgcagagggcatgcgcttatcgcttgcaagccgatcgcctcgcgaagctcaatcgaacgctccgcaatgccgtcgttggcgacttcgaataccaacctcacggcctcgagctcggcgacctctatgggaacgagttcgtcgtgactctccgcgagtgcgaggttcctggcatcaacatccaagaccccgcatcagccgtagccaagacaaaggagctcgtcaacacttcactcaagaacctctaccaaagaggttacttcaactactacggcctacaacgtttcggctctttcgcaacccgcactgacacagtgggcgtgaagatactgcaggacgacttcaagggcgcctgcgacgctatcctcgactacagcccacacatcctcgccgcggcacaagcagaattaggccagggcgaagcgaagggccaca

SEQ ID NO: 1352 - DNA, 1015 bp, Emericella nidulans
aaggctgagacagcgaagcacgcggctccaaagacgggaactcgacaggtaatagggtgtcgatatcgtcttcttcctcgtcctcactggcggattcctcgtcttcgatcttcacacctcccacgtcggatgctgtttcatcctgttcaggattgatgttgctttcctcttcctggagagtctgttcgacttcttcatcgtcgtccgcagcttctttcgactttgcttcttcaaatttcagtccgcgcgaaaatccaggagctacctctaataaacccccctcagacgcgaagttaatgatgcgatccaggccggcctgttttccagcagacccagagggccctgctgtctgaacttcagcctccatctccgcgatcgcctcaacgccatccagaccccctggcgcgaacggaaagaaccctgcagcgccccgcacgaaatcagcccttcctgctggcctgcgtagcaaagacgtcgagttttttgcgttcgcgctgttagccggaaccgtcacttcatgatacccagtgacacgcccctctaggccttcgcggtcgaatcgaacgattgttcgggtttgtgtatcagcgatctcaaagagatccgtgtagtccgttgatacatcccatctcctagtttcccgttagcacactgcagagaggaagcagaaccataggtaagattatatagattataacaacatcaaaggtcatcaaccctacctctgcaggcggtttaaccactcggagctaaaccgaggggatggggttagaaactcgttctctagatcgcgtcgcagttccgcggcggatgggcgagctctgcgcttgcgtgcgcggttctgatacgtcccattcccttcagcggcaatgagctcatcaaaagcctttccgccaatattctgcgagcccagatcgagctgggctaaggttgaactgtatgattccatctaagctcgatattgcttgtaacagggctcctgaaaatcgtgtatcctatagactaggatgcacgc

SEQ ID NO: 1353 - DNA, 2460 bp, Emericella nidulans
atcagcccagtctgccgccgcaggtcattcctcccaactacataagtaccttgagacgtcggcatacctcttccattctttcttttctgacctccagtagctacttaaaccttgcagcgctatcatcatagaaatctaaaaccccatctatacaacaactcttataacaagtctggatctgcctcctcatcctcttcgccatgcctggatctgaagccagcgacgaattcggcgacgatgtgagtctagctctttcctcgtttattctcctatgtgctttcatcacgtctgcttcagaactgttcgctaacgctgatatcacgtacgataggactacatcgttgatattgactgcattcaagctcatggtactcgtccgacttgctcttctctttaaagattgaccatatacaggaattggcgctgcagatatcacaaagctgaaggcgaatggattcttcactattgctgtaattctcctgccagccctgttactgtcctgacgcttacttattgccatcgagtcgatccacggggcaacgaggaaaactctattgaagatcaagggttttagtgagatcaaggtggaaaagatcaaagaggctatcaacaagtgtttggtaagattagagaaggggtcttcaatatctatttatgctaaccgtaatagccttcggcttcgggtttcataactgcaatggaactcagccatcaacgaaagagagttgtccgtatttccactggcagcaagcaatttgattcgatccttggagggtgtgtatctcacagctgtgagaagctagttttctgacaaactgcagtggtttccagagtatgagcatcagcgaagtattcggcgagttccgctgcggcaagacccaactctcccacaccatgtccgttgtcgcacagcttcccaaggacatgggcggtgcagagggaaaggtagcttacattgacacagaaggcacattccgtcctgagcgcattgggcagattgcagaacggtttggagttgatcctgactctgctaaagagaacattgcttatgcccgtgctttgaatagcgagcatcagctcgagttgctaaacactcttagcaaagagtttgttggtggggagtataggctgctgatcatcgacagcattatgaactgtttcagggttgatttctgtggacgtggagagctagcggatcgccaacagaagctcaatcagttcctgatgaagctcgctcatatggccgaaggtgagcccgtcactcatcgtcaaagaactcggctgatgttttgtaatagagttcaatgtgtgcgtcttaatggtaagcacgacactctgcatttagaacgtggctcacaccactgttaagacgaaccaagttcagagtgatcctggtgccagtgcgctcttctctggagctgatggccgtaagcctgtcggtgggcatgttcttgctcatgcttcaacgactcgagttctgcttcggaaaggtcgcggcgaggagcgcgtggcaaaaatccaggactcaccaggttagttgacttttcctagcaagtaatggatgcctactgaatatatacttcagactgtcctgagcgtgaggcgacatatctgatcaccaatggcggaattgacgatcccgacaaggtatagataacgaagatatggagtagtggaatggcaattgagaatatctaagatacctattcattgtcggagttaattgttgatgttgtcgagttagtggtacaactttatgatagcggtcgaatttacggagtacttctgcaccaccctaaccaatcaattctccactccgtaaaatttccgctaagtaacctctgcggacaaaactaatctcaacgcaacaacacttacgttcaatacaatatagtcattcgaagaagagcaaaatgaagaaaaatatcgagattgcaggctatatagccctgcccctcaacctcccaagcactggcgctttttcaacaactgcaacacactacctctacctccgcccgcatgaaccacgcatccccgacgctgatacaccccgttcgctcttcctcgtcaacatccccattgacacgacagaaacacatatacgccacttatttggcacgcaactttctgccggccgcgttgaacgcgtcgagtttgaggccgcacgtacagggaagaagcatggcgccgcgcaactggccctcgtgcaaggcacgaatgttgctaagagcaagaaacgtaagcgcgtgacggcggatgaactcgagaaccggttggataatatttcgcttccgtcgacatgggaccgtcagctgcagcgcagcggatcgcatgcggtagtggttttcgttgataaggctagtatggatgcgagcatgaaggcggcaaagaaagcagcacggaagtctaccactattacctggggcgaaggtattcggatgtatccccaagtaggccggt

SEQ ID NO: 1354 - DNA, 1979 bp, Emericella nidulans
tactggagatagtctgaaaatgagatggcgcgagcccttgataattaacggcgttggagaatactgaactcggcttgcagtgggtttatatgctttttctgaaccgcaggctgacactgtgtgtgcctcaagcaacatcctgcaacactgcagcggcaaggctggaccgcgccgccatttggaagcattgcgcttggggctcgattggttaaatgagaaccgccagaactgagtactaggtagtggctctggattgaagtccgcccgtactagagatttcaaggcatgctggagaggctgagtatatgcatggatggtatgcagtgaaatgacaggtaggaatgttacgacaactaaccctagcgcctaatcagccacagaatcagccacagaatcaggcaaggaaacaaactacgggcgctaattcatagattcataattatatgtgcatttactttgctgcctgattatagtatgtactatattcctggcttcagagccagagacgttgctcctggccttagcactcgtgaaattggcctacttcagtctacctacagggcctttgatagggaatactcgacgggccgcttaaaatatatagcgccactcttacacggtatcacctgaagcagaggcttcttggctggcaagtgataccaagtttggctaaataccagaaaggtgtaactggcaaagcgcttagagtatctatctcgaggcatctacctcaatcggaatcgtagcgcctaatcaagcgtaattaaaaataccatagtgatacttttaagccgaatggcgtccaaaaaccacttaattaaaaaaactagacatctgaggactgcgagtcatgacatggcaggctcaacggttcgaagtaatttcaaagtggagagtttgtgaatattaagtgaatagtcaagataagttaagtaccttcaacaagtagcatcattggtctagtggtagaattcatcgttgccatcgatgaggcccgtgttcgattcacggatgatgcatctttattttttttatattttggcctctcaacctccaactatttgccacaaacgccgattgggtagttctcatctttgcactaagcaatgatttacgctctacaaagatacatggacgggtgaatggaccgcagggataaccgaggccaatccccgctgtctcgtgctcgcgatgtccactgatgatgggcaatcttcagcagaactaagcagggttgagaaagtggctgaggacctgcttgagtggcgagacccaacgagtaagactcacaaatatacaccgcccttgtcacgcccagaaatgcgaaagccattatgtgtcgataaccactcttgtaaccaaaaaaagcccactactcctattagtccatatacaaccagtcccaaggggctcctacctgtcatcttacctccccaaaatacagaaccgcactctcctctgatccctagcctcgactctaccacccactactttacctcttaccacgcctcatcaaaaatcactcaaatctctaatcctccaaaactctctacttatatacggcacacctccaaagcacaaatatgtcctactaccatttaacttcaccactagcccaacccaaagaacaccctatacaatcttcccacctcaactccctctctcatataccaattaccctccccctccacatacctcattgattctatacacatcaccacaacccccacatatcatactcatatcacttctctcctgcccccatcttccctctactccaatctacacattctcacctattccaactacaaataccaacacatacccagccaaaccacaaccctaatcactttaatccttaaccttcaaaaacaccaacttaacaaccaccatcacaacttcataccatctatataatctctctccttcttctatccccccccatatattcacaccactatatctcacatcctccttac

SEQ ID NO: 1355 - DNA, 1760 bp, Emericella nidulans
ctcagttacaacttgcagcctagagttgatcaggacttctgccggagatatctccatacgtaccggaggccactgttcaggccaattttcccgcagagagatcgctgatcttcacccgcaattcttcaaagcttctactcagccgaatcagatcgacggcccgtgcctattctgtattctaccggtggttcagcctatattctgcagagcatatttggattggcggcacgatattgaagcttctggcaaagcttaaacgtatatgccaagactgtcaatatacttgagacacaaacccaaattagcctattcacggtgcgaaacaagacttctcacttgacacccgtctatgtttcatcctgacacatgcgtggattcaaattcgccatcgaaagaatggtagccattcaaaggcttcgtggattaaccggcagcctaaagaatattaaccctcaaacactccgtccccacagtcagcagtacccccaggtatcatatgatggacgtgactataaagcaacgtcccggcacgtctcaacacgtcccagtctgcctcaacacttcaacaaccggcaacatggtctccttctcatcccttctccttgcgtgctcagccgtcacggctttcgctgctccttctgaccagagtatcgctgagcgatctctgtccgagcgttctactcccagctccactggtacaagtggtggctactactactccttctggactgatggtggcggtgacgtgacctacaccaacggcgatggtggctcctacactgtcgaatggaccaacgtgggcaactttgtcggcggaaagggatggaacccaggcagctctcagtatggacgaccttatccttttccagcgactcagctaacaaattaggaccatctcctactccggctcctttaaccctagcggtaacggctacctctccgtctatgggtggacccagaacccgctgatcgagtactacattgtcgagtcctacggcgattacaacccaggcacggcaggaacacaccagggaactctcgagtcggacggctcgacctacgatatctacactgcgactcgtgagaacgcaccctcaattgagggtactgccagcttcacgcagttctggtctgttcgccagagcaagcgcacctcgggcagcgttaccagccagaaccactttgacgcatggtcgcagcttggcatgactcttggaactcacaactaccagattgtggctgttgagggatactagagcagtggatctgcttctattaccgtttcctaagcgtcatccagtcgcttttcgcttcagtcctatcaaacttgttgacaaggcgcgcgccttcaacttttcgttggggtccgatggacccagcacattttctcttcattgtactgttcaaattctattctgtctatcgttcatgtattttgtcaatcaatatcaataacaacctttgagaaatgccgctgctgctccagatactcataggcctcccttatctccgcaaacccaaaaacccggtcatcgaccacgggcttgatgagcttctcgtcaataagggcattcaattcccgaaattgctcccgcgtacccagcaggaatcccctcgtcgcacagagatatgtcagaccgtccatgattgatggtacctgagcattctcagatgcaccaagtaatccagccagggcaacaaggccatctgccttcacagctttcaatgattgggatacggtcgaatgcccgccgacgtca

SEQ ID NO: 1356 - DNA, 2844 bp, Emericella nidulans
tcagtctaaggtcgtccgacctatggactctgtcgctgcaatcgtcaaaggcgccgtgacagcgggtatcacagaacgagtggtcactcaccgtgttgcacgtcgacactatctgatggccactctccagcccttcaaggaaggataccaccccgagcagtaccgggttcccagtcttgatggccgtgaccgttgcaagtacacccggcaaatattcgtacagaagggcgagagagttaaaattggcgagccggtcaaggtcagttttttccgccaggttgcccccggagcaaccctcatgtatgaggatatcttgtacgcctgtgacgaggacgtttgtcccgagtacaccaaggatccgcgtaagtaccagctcctctcccaatttgctaggtagaaacttgcactaacgggccatcgctgcaggtatcaaggaggtcgtgactctgacatcagatctgtcacgcaagaatctcgagaccgactttgagcgcatggataccccccaaggcactttctaccgtgtatactttgacatctatctcacactcgacgggagtgagttcagtgccgagctggtctgccagggcgaggtcatgggacgatgccgcgcaaagttcagataagccaactttgcgccccaaaaaaaaatcaagtttcaggatcagcgaacaaaaacaaagagatgtttccacatggggccccttttcatctcttcctccatttcgttctcatttgggcgaagaaagaaagatgcggtgaagaccgcaaaaggtggcatccagctgtcccagttataactcaagactaaatcccccatacagtgcacgagtttgtttgtctggtcagccataccgcactgacggcgtttgagttttgctatatttaaaacttttaacatctgtggataccagcggtaccattcttgagcaccattcttatctgttcttttcccaccatccccccttttcaccaatctccctttggttttgtttacctcgaattccatgtcaagttccttcagcaaagccaagccaagcctctagctctctcctgtctgtctcaccttcccattagtggcgggggtagagatggtattcaaattttatattttcctatctagctttccctccgtctatcatccatcccctggctggcggattcattgacgattttttttattcttttttttattcttttccttttccttttttttttgctttttcatttctggatacctttgcctacctagttaggttaaccgccatacagttatacctcttacatagctatgatcaccgtctcatgatatcattcactttcctatatgtttgtttgcttcatccggtcttttagggagtccttcgttcaacgcattgatagatacaaaggcagatagcttgacgaaactactgaaagtacagtataccgatgcggaatggtcacttatttgtatagaaaaacccgtgaggtccgctcaacgtacggagtaagctgagcacatctgtcggctgctgtcaagatcaaagtcgatcgatgggaatctggtcgtgcaatggatcagtagacgtgtccacggacggaaaattgtgtagaatggatagattgacatatggatgttgcagccaaatcgaatagcaatttaagcgtaacttagccttattattggaaggcaaccgagacagggcactcctgcactccatgttagacctctggattactgagcacttcgaaattgaagattcctaccgtttccgcaaacacggtttggcggtactcgccgtatttccatcccgacgatcaaaggtgacgaatgcatcgcggaaggaagtaagaaaaagaaaagagagccttctgcagctctgatgaaagcttctgagtggctaaactatgggatataatcttgacccagagccttgttttagactgccattttgcttttattgctcctttggtgcggtcgaattggtttatattgtgagttgccttttcatttatttttcacagagctgtggcactagtatagccagggactactagcctatgcctgtaacgatgtagcatggcctacatctgctcgggaaggagtaacgccgatggggtaagtataggcacttcagattctgtactctgctccatattcactcttccgcagccttcgatctctgatgtattatcttgccatatgcacgtgggtcaaaaacctggtctgtgactccggtcggctcacactgacctcacagacaaggcaggtggaaggagagtaagcagtctgacacattccacatggcctcaacctgcagatacccaggcatccactttcgaggaagaaccccctgtcgattcaagggcacagccacagcctcccgtcgattgtctcgtgtcgtgcaagagtcccataggctcgaggcgcaaatgcggagaagaatccttgcaattgcatcacctcgcatcagctcaaggaggcgcgtccgtgctgagagatccttgctcagctccctcagatctgattggattccgaagccgggcaaaggacgacagcctggtgcttgccccttcgtgagttatatctcgtaccaccgcttaagccaaactaacccaacatgagaaagagcccgtgtgtctgccagtgctctggagtagtgccgtttggctgcagagctgtaaatccccctgccctactcgatcacatcgaacctagaggtgtgttccgtgcgcattgaggggctgagcgagtaaatcgcggggtcatgtcggctcagtttgacctgagatccatgtacagatactcgattgtatcaatcattgacgtggttgttgcaatgccgtcacctcaagcagggg

SEQ ID NO: 1357 - DNA, 2371 bp, Emericella nidulans
aacacgtcgcatattaccggctgcagtactcagagagcgccaacctactcgatctgctgatcgggcagatcatagaccccgagcgctaccaggggtccgatccaagaggaacagttcaccgcatgggagagttcgtcgttctgttcggatggaagatgctctcggtttgcatgaccgctgagggctttcggcgtgcggtgcgagagatccgacaccgcgagatctggggggagctcctggacaagatccgcgtgaatcaatggagccttgaagtgtttgcgcggtcccgcaatctcgactggcgcggacagctgctcaagtacgcgcacttgggcattccccggctcgatgcagagttacgttcccatcggaagatgtggtcacagcacccgcatcatgtcgtgcagtcgatcgacaagaagctccgacgaccctggttcaagggcgagatccagattcacgtcgacaaacccgtctttgaccccgactcagagaactggaaggccaaaggacaaacgacagacccgacgctgcgcagacctgaagacggcgactgcgatctctgcgggctgggttcctgcgactgcgagatcgatttctccgcggggagtctggttgagctcgttgagcggccgctgacggggacgggcgttcggacgctgacgagcttcagggagggcgatatcctcggccagtttatcggtatttatcggtgagatccagccgacggactatgacggtgatgaagtctatgcactgacccatgtatcgaaggtggatatggaggagccgcttgcgattatttcgccaaagaagtatgggaactggacgaggtatatggcgcattcgtgtaatgcgtcatgtgagtttcgcgcaaggaccgttggcaaacatactgtgatgaccgtagaagcgaaaaggaatatcgttgctggcgaagatatcacggttaactatggggccgagtactgggagaacaagcaatgcatgtgtggggaggtggattgtttgagtaaggaggctgttgggaaagaatagtgtttattctctataccaaatcagcctgttttcgtttccccccttattcctcttctatgcttctctatttgtttttactatacattaccctagcctctagtaacagacctatagcatgatattctagagcaaggggcgtgatcaggctactctgtatactaaccccgcatttcggcaatccccgctccatgtccacccccagagtctcgtctcgtctcctcctcctctacacctcccctatccttcgttactcctgaaacttgacacatcactggtcttactcctactatccttatcggcttgcttctactgagcatccattagttgtgctggcattgcttccttcagctcttgatcagtatccgcccagagtgcggagtatactgtatctccatcccttgttgcacacaacgagaaacactgggcgccgcagtggattatccaggtaattatccaggtccaatatcgttcataagtctgtcagtaggaaagtactatggaacggacctccaagcaataacacaatgtttcgagccatgtattgccccagccgtgtcctgtgcggcagaacaccgagactagccgaccggtccctcttgcagtcgctgtcattgactcgacgcggtttacttacacaaagctatgcgcgcggtccaacagaggtatgtactgaaactgggattccgactttccgactctatgctcctgctgacacttccagcctccgctattcgaaaccacaattggagagcactttgctaaaatcgtccaacagtatggagacaggacagcgtaagtcagtcttgtttcgagtcaaacagccagactaacgagctagtgttgtttccaaacatcaaaataacagggtcacctactctggcctcgacgctaagagtaatgcactcgcacgaggactgcaatccgtgggcgtcaagaagggagaccgtgttggagtgatgctggggaactcgatggaacatgcgactgtatgtcatgcaatgatagctcgatgtggcagaagctgacgggaataggtgacctatgcactgttcaaactgggggcggtcctggtaggcacatcggctgaataattctagacgaaactgacatcccaggtgccaatcaacccctccttcaatgcaactcaggtcgtcgcggccctgagccatctagggacaagccacctgattataagcaccgagtccaatctgcccaggaagcaaccacgcagcaacatccctctcctccgccacctagtccaggacctctacgcgtccaagctcgagtccgccgtcgttccaacgctgcagaagatcatcctcgtcgacaactc

SEQ ID NO: 1358 - DNA, 2058 bp, Emericella nidulans
tatatcccggccatggaggcggtccgcgccgagtccgccaccgcattcgagcaggtaaacgcatatgtcgagtctaacacagagctcaaacaattcatcgcctccgacgcaaacactgtcctcggccaaagccgcgaggaagcattccgcacaacccgccaagccatcaacgagctggcagtcacaccagcgggcgggcccgacgcagcccttaacgcctcgtacctcctctccgaaatccgcaagaccctaccgcttgacacaatctgggccgtagaatccgtaaccctcacgcccattgtcgcagaccaaatcgcagctacactacccaacagctggattaactgcggcggcggggggctaggctggtccggcggtgccgcactaggtataaagctagcaacagatgcacaagccggcggaggcaacaagggcaaatttgtgtgccagattgtcggcgacgggacgtatctcttctccgttccgggatcagtatactggattgcaaggcggtacaatatccccgtgttgacgattgtgctgaacaacaaagggtggaatgcgccgagacgaagcatgctgcttgtgcacccaaatggggacgggtcgaaggcgacgaatgaggaactgaatatcagctttgcgcccacgccagattatgctgggattgcgagggctgcgtcaggggggcatatttgggccggtgttgcgggcagtgtgggcgagttggggaggttgttgccagaggctgtggagagtgtgaagaacggggttggggcggtgttggaggcgcagttggatgggactgagggaaagtatgttaggaagtagagaagcgattggtggttcaaggtgtagattcaaggactcgaatgctacaactatagatgccaacgattcaagtcagtagatgtttttgcgtatttacatcagtcgttaaacgtctagcttcctgctagtgagacttcactgtcagcgcaccacacgaatttgacctctgcctgagccattacaggccaacaaagccagctccatcattttcgcatgcgggcattttcatgccatgcattccggtgtatttagggctctgaggctccttccatccttccaaagctttggcttcggtgatcttatagacttccacccccaagggacgggtggtagcccccatatcttccttgtcatcccagccccaattcgagaggtcacctatcaaaacaaatattagtggggttcaataccaggaagcaaagtgaaattagcatacctcctggacaagcagacaaggcgcagagaacatcaacctcagcgaagaactcaaagtactcgcctggcttcgcgggcgatgtctccatgaagtacctcccctcttcatccaacccggtcacctggaagacattgagaacatcatgcacgtccagttcagtcaatccgtacggcgtgaccgcacgagtaaggttcgagtgacaatggaagtcgaaagactctccacccatcaaaaggttgacgtacgggtcacaccttgtccccaacccatcgtgcacacgtcctccccactgcgaagtgccgaaacccttgccctctttccgcttcccgtcaacatccagtacctcatgtagctgcccgccagcgagtgaatctccggtgatcgtcacgagggggcgcaggtacggcaagttcgaccagagtcggtcccctacagagacgtgagaggcatggatctgacgcgtgcgcgctgcccatagtcgctcccgcgggttgttggcattccagatgttgaggtcgcctacttgaggaccgttcggcgtcgttagacggcagatgtgcccagcgggctctatccaagcctgacctgagcatggtcgaatggtgaatgacttctcgagctcccgtttggcggggtccgatgcagtttcagagatgcttctgtagacctgcgttgttccatgaacggtcgagtccgtgggagctgtgtatgcaggaggaggccggcgtggagtagtcattttgggatcgcgcagtggtgcaattgtgctgcagaagtcagaagaggaatgt

SEQ ID NO: 1359 - DNA, 1069 bp, Emericella nidulans
agggggccaagtaataaagagatacctgataaggaaagaaaaaggtccagatggtgccagggaagggagaaatgtagaaagatctatcggagcgacgggaaaaagtcgacaagaaacgggagctcagactgggaccaggaccccccagtgaaaaaaaataaatagcccccccaggttctgaaggttccgtccagaccccgaccgcaatattcgtggccagctccgattgttcttgaatcctcttggtatacggggacactgtccaattattaatgacaactgagatagcacaccgtgaagagaactgtggctgaaaagcgactcggcgagtggcagaagctggttctagaggcgaatacaggcccagctagtgagcttatgggaaagccatggaagaccggtggaagctcattatactgaggagctggggtgaatagtgggaattgtgggccagactgagtgagctcttgaggaaagtcaaggagtcaagaacagagtttgcttgcgcagccgctgaggtgagccttggaattggtgaggtgatcacggtgggtcacttgcttgtgcatccaacctgtttgcaaagtccagactctggcttcaaggccgctacggcttcgatcccgtccatgtgacctcaaaaggaatatccattttggcagcttaagctcgggccctttccgacagggatatcgagaatcttcttctaattatcctaattatcacgcaacagttcgatgccatgctccgtcctctgctatcgtcgcgtttcagccggtcgaatgccactttctgggcccttgggcggtcctttgcatctcggggtgcagatgtttcaagcgatgagttggctgtagctagagaatggctctccaaattcaactccacaaccatcccccgtcatgtcggtgaagtctcctttagccgttctgggggccccggcggccagaacgtaaacaagtgtgtccccgcactcgacgcagcaggaggacaagggtctcgctctaacgcagtgctcggacagggtcaattccaagcgacgctgaaagtgccgcttgattccttgttg

SEQ ID NO: 1360 - DNA, 3728 bp, Emericella nidulans
tcatcggtctgagaggaaaccgcgccattggctctgtgaaacataaatagtattggagttcgcattttttggacggaggaagagaagctggcggttatgtttgttgaaccggacttgcaagttttgtttctgtgtccattcgagagcggcgctgcgcgccttgtaatttacctgtgatagtggcagatcaatttcgagagggtccaggagggtatggtcatattcgagatttaggttgaggtcatcattcatcgggtcatattcaggattgcctggtagcagacggcgggggccccagcagccttttttgtaggtgaagacagctgatcccatcgggagcgttgcaggaagagcataatgccagatttgaaggcggatttccggtggaaggagcggaaacaggtaaaactcggaattccccatcaggatcaattttctttgagcgatggaggaagtaagctaatgtggggacctggagaatggctactgacaggagacaacgtgggaagtgttggatatctcattcggcgctaggtcagctgactatatatgacccgctagctgcacggcttcagccccacccatacaactttgtaggggccgtggcaggagtatcgctagctccacgctaaacctgagtttgtttagcgaactcccgatgcaagccccataggccggtcaacacatcacctaatctgttctgatggtcaatgggaaaagggcagaataaagctgtatcaacaacacgaacgtagcctactaaagagcagatgccatatgacgattgcttctcactatcttgacgacaataggtaactcttcaacaacgtacaatacctaaagtggtcaatcaggggtcagagatcagaccacctccttaacaatctaacccttatttctgtgcactataggatctctagcttcctgtatagatagcctgatcaggacctgcttactaggatatatttagtagggtcagcttccccgggaagcagacctgtttgttatgggtcctttgcccatacgaggaccttagaccttagtgactcggccaaggccttcgctgtcctgaaggcggtgagcgacctacaagacttcctcacaacaatccttctttctcatttcttctttagcgattccttcttgtacgtacggcacgtctagataggaagatccatctaaatacgtcccttaacacacagctctagtaaaattgcttctatttaaaccaggccttacctagagtcgatttgcggagtcatatatgctagacaaaataaagtacttttgcacagtctgtataggtcttgagctgtgggaccctggtttcaggtaaatggcgtcgaggtgtgtaatatcccggatatcggattcaagcactactcaaaggagactgagtctgtattgcctagacagataggctcctgggtctcctgatcatagaagtagtctattagactgtgtctgaacgccttttggaactctcgttctcgaaccttaaaatcctccttttaattactccaacaaagagaaaaccctgagctaatgaactgcaaggctctgcctttaggatgcattattatgcggctgtaatccccaccggtcgtcttcttggagctttgatttcactgagagctgggctaatcaggtttcagtattcctattataatgctcaattctagcatatcacggtactaggagtttatgggactaccaacaaatagaaaccagtatgttatgcctggctgcatccgccacatctccgaaaggaggctctataaggaaagtaatgcccttcccttcgtcgcattttttaaatcccaacacaaacatagtacccgagccacaaattgctacaagcagcatcaacatgcgtattccacagccggaactgctcgaaggtgattccagcgcccgtgtagattgaccgtcaggctctccctgctctcaatcaaataataggatttgcagttgtatacaataacccggcatctggggcgtcggtccggtgggcacctcggactcatccgtggtaccaggaccagtgggttcagtggtcgatgcactggggacgtgcacgcagatgtagtaatccagccagaggtttgtgcagtctatgtactattagaaaagacagtggaatagagaaaagaaagcaaactgaccattgttgactgcactattccagctcttcagctggtccatggtgatgctgtgcttggcggcgatagtcagacattggtctccggctgagatctggtagaacccgtcgcagttttctgcaattccaggcatggtaggggagttgctaggggaagtaatagtagtagtggctgctgtcgtgcttgttgtagtggtgcggattgacgtcgacgtcgacgttgtcgttgtcagcgtggtgctaggttcgtaagtgtcttcagtgacagtgccaattatacagtaggacctgctcaggtcgaggcctgggcaactgatatccggattcaattgctgaagggcgtcaacggtgagatcccagctgctggcaaggctcgagcatgtggcacctggatcaggaagtgtggagtaaacgcattcgactacaaagtaagagagtgagggggagagggccgtggccatggcaggagcaaggccggcagcaacaatgtttgcaagatgcattgcaattgacttgactatatagagcaaagatgtgggcaatgtaggagaaaaattcattgaggattaatttagctatttatatagctttgacgggctgggttcttcccacgctacaggcgccaaaatcatagagctttgcttatggcttgcttctagctgctggttaccttgtttatactatctacttgtcgagatgtacttcatttacttttaatacttctcgtggaatagtcagtacttacaatgtcacctccaagtcaactgctacatcccagccatgcctcatgagctacgcgtactagtttgtaaaaaagagtggaggctccaagaataatcactctgtgtttaggctccgaatcagccgtttgttgtcagggggaacctatattgtgtcatttttctgtcctcagtacagatagaatactcctagaggccccaaaccaagagtcccaaagagcaaatataagatgcaaaacagttcaatcacagaattaccaggctcattgttaagggacgtatttagatggatcttcctatctagacgtgccgtacgtacaagaaggaatcgctaaagaagaaatgagaaaaaaggattgttgttgcaaggaagtcttgtaggtggctcaccgccttcaggacagcgcatgccttgcccgagtcactaaggtctaaggtccttgtataggcaaaggacccataacagccttcctctatatacctatagtatagttatataattatatcccctagtacaggccagagctccttctaagtagtagtagcaagtctatcctccctaggggcagataggggtagggcatagagagtagcctagcagtgcttttttgttggtaggtatagtaagcctaggggcttatttaggggtccctcttttatctaatttagaagcagggcccccttttctaagaggtgattaaaaaaggcatctgccttgccctgtagagtaataatctatacttcttatatatttagaaaaggagtagtaagctagtctagatattatatttatttagcaagtttaaatataattatagatactgagc

SEQ ID NO: 1361 - DNA, 4356 bp, Emericella nidulans
ccgaaagcagcagtgatacattacgtactggtcgcatgcccgcctccagtcaacggcattatgccagttccaccactccagcaccgttcaactccaactccctgattaatgaatgaacttcactctctgttctatggaatctgaaagcagtcaaatctcttccgttccagtgttttccctccgatattatcatagtttcatctctcccctcccttttgagccattccagctgcttaccgcctaaacccaagccgtttctatctccgctcttgacctatcccctcttgcttcttacctggtcagataaccacaatggctacttcggtagcgccgtccgaagaccagagtcgtctcctggaggaggcattgggggtggtgcgccagcaatcgagtatgatgcgaaaatgcctcgagacgccaggcaaactgatggatgcgctcaaatgcgggtgagttcgagcttcagctagcagtggactatgctgcgacgacgcgagatactgctcaatatatacaaaaacggcaatactgatattgcggtatcatttctagatcgacattggtctctgaactccgaacaccgagtctagggcccaagcaatactacgaactgtacatggctgtctttgatgcactgcgccacctctccgtctacctgaaagagaaccacccggtcaatcacctcgcggacctgtacgaattggttcagtatgccggaaatattgttccgcggctctacctcatgataaccgttggtaccgtctatatgtctgtggaggatgcccctgtcaaagagatcatgaaggacatgatggagatgagccgaggcgtgcaacacccaatccgtgggctatttttgaggtattacctttccggtcaggcgagagactacctaccaacgggaaccggtaacgggcctgaagggaacatccaggactcgattaactttgtcttgaccaattttgtggaaatgaataaattatgggtgagacttcagcaccagggtccctcgcgagagcgggagaagcggatgcaggagcgtcgggagctggagttgttggttggtagtaacgtcgttcgcctgagccaattggtggatttggacacgtacaagtctgggattctgcaggcgctattagaacaagtcgttcagtgccgggatgttttggcgcaggagtatttactggaaggtgagggtgactgggtgaagaggcgtgcggagtgctaatgctgcgactatagtgattacgaaggtgtttcccgatgagttccatttacatacgctcgacctattactttcagctatcgcgcggttaaatccgcatgtggatctgaagaagattgtgatagggctcatggaccgcttatcctcctatgcggctcgagaggccgagacctctatgaatgcggagacgaggaagcaaaaggaagaggaagccgtcacgaagcttctcgaaaatctcaaggtctccgaggcgtcccaggagaaaccgaaggaggatgccacccctacccaggagaatggcgtcgagcagacaccaacggaaagcgaggagcaaacgaaaccagccgatgaggttacggcaaatgggcgcgacgaggaccagaagcccacctcgcctcaagatatcaaattgtatgacatattttacgagcaggtggtcagccttatcaaatcccgtggtcttccaattcaagatacgatggcactcctcgtttcactcgtcaacctcgcgctcaacacgtaccctgaacgtttggaatatgttgatcaaatccttcagtttgctaccaaggagacagccgagtacacagaccatgcagacttacacgccgcaccgacacaacagaaccttttgcacctcctcattgctccgctccgctcatacgtttctgttttcacagccctggctctgccacattacctcccccttttgtcttcccagtcataccctacacgacgatctgttgcgggcgaaatcgcccgcactcttcttaaggaccgaacattaatcactactactgagaacttggaccgcgtattacaggccctcagggtactaattaaagaaggtgtgcagcaaggaggttatcctgggtcacaacgacgaggcgagtcagacgagacaattgaggaacaagggtggttggccagattggttcacttactgcaggcgccagaaaatgacacccaacttaaggtaatcggcttctgtcattagtttctagctgctgctaattacgtctagcttctccaagcgactcgaaaagcgtatctagacggcaacgagaggatacgctacacctttcccgcaattgttagctcctcgatccgtctggcacggaaactcaaatctcgcgagcattacgatgacaattggcaatcacaatcgtcagcgctataccgcttcatgcatcagtgcgtcaacaatttataccaacgcgtcaaccccggatgcgccgatcttgcactgcgcctattcgtaatgtgcggtgaagtagccgatcagacaggcttcgaagaattcagctacgagttcttcgcccaagcttttaccatttacgaggattccatcagcgattcccgcgcccaatttcaagccgtctgcatcatcgccggcgccctccacggcacccgaggcttctccaaagaaaactatgacaccctcatcacgaaggccgcccttcacggtagtaaacttctcaaaaaacccgatcaatgtcgcgcagtatacctagctagtcatctctggtgggtcatcgaaaacccgcacagaggcgaagaggaccccaagaacgtacgtcgtccacagccccctgattgccatcctactgtgctaaacgagaccagctttaccgcgacggcaaacgcgtccttgaatgcttacagcgcgccctccgcgtcgcagacgcctgcatggacaccgccgtctcagtggagctcttcgtcgagattctcaaccgctacgtctactacttcgaccagcagaacgaaaccgtgacgacaaagtacctcaatggcctgatcgagctcatccactcgaatctccaaacagaccaggacgagccgaatccggcgctcgagaaccccaaaagacatttttaccgcacgctcgagtatatccgcgcgagggagtttgagggcgtggttacggatcccagatcttagacttgaatcttggatgtttcaagtaaactgcgacataggcatgccatcggtggtaaatatatgtcaattacggttgtatctgttatagtgagcgagctcgatgcttgaggcgagcattttatacagtgctgctggcctatactgccttacaacaatcaccctcccctaacctgttaggcttagtgcgtttgttttgatctgtatgctgatatatgtatgtaagaaagattcccttcgtttgccgttgagcatttctctcaataccatgacacagtctttttcgcgccctccgttgttccttctagggctgttatatcaatgatgtacttctaaaaggtggcgttagtaccatttgtatccgctatttagggtctgtctgactccctaactgaagcgtaaattgagaagcagatacagtacgttcaaggcatttttctctcaggagacatagcaaaagcactattagcaaggcggatgaaggtctgaattcccatagtaaaggaaaggatgatagacggggcccctatgtacttccttccaaagcaagtcatggatgtgtactacctcttcagggacgggcgactggtaacatggaacctctgtgtggatgccatttaaactttaaactacaagagtaccgtaaggccctttactcgcacttaccatactagttgaacaagctcctggaaagtcgggacaggagttaatttgggcggatgtcaatagacgagcgaagtcggtggggttttatcgtgtctccattaaaagtggtttgggtgagaagtaccctaggaacaccactcgttacctaccgaagtcgagagataagatggggacttcgatataaattcgtacttgagtgttccgttcaggtgatgggtgtttcaggctcgaccgtgtaatgaatttttcctccaccctactgcgatactacctggtacatatgggatagcattacgagaattacatatggagtcaaaacgaaggtaagtaaaccgtgatacccacgagatatgaaccccgagttgtgtatgcattgttcgagaataaaacgagcaggaaccatgtatgccatgttttggctctgtggcctagcatacgtaagggtaaaaagaatacatgatatgacggcaatgtccatggatagtttaagggagaaatgtagaacaacagcaatgaagttgttg

SEQ ID NO: 1362 - DNA, 1947 bp, Emericella nidulans
gtgggaagtaccgattagaaccccaagataagccgtcactagatggagagtcgaaatgtgatctatgtctgccattacactcccggcactcgtaagcaccgccgcaagaccaacaaccgagtgcaaagcagctacggtttgcggaagtccagttggtgtgatacggcgcccaatcaatgcccctgctgccgtcagtgatatgatgatacggtagtggagctgacctaccaacgatggcacccacgcttgcaacgccagcaaattgggtcaatacttcggtggagaacccgacagctgccaaagacgccaaaataccggccgcgacaccaagtatgccaaagatgttccctcggcgggcggtctgctgggaagcaaggcctgaaatggaactgatacacaggatgctgctgaccaggtatccggcctgcacgagcccggccataccggtgctggcggctgctacgaatccgccaccaaatacaacggccggaattgcatacagccagggatactctggcgggtcggttggccgtttgaacatgtctagcatgcgcttcgtgataacgaagccgccggatacattcatgaatgctaggagaactgagattgaccccaaaagttctggaatcgtcgtaggaagatagccaccacccatgatgaagaaaccaccaacaccgaccataccagatattgcgttagtcacgctcatcaagggagagtgaagagcgggacgcgaccccagacagcacggtagccaacaagtccagccagaccgaacgtcagcatgttgctcataaaaaccggtccagttgccttgcccaacgcgagcgctgttcccatgcctgcggttgtggttgctacctcacgtgaaaccttctgccatggggtcagggccaactcaggctttgctgccgacggcgccgctgcttcgacctttggaggaggaggtggtgcaggccgaggagccggaggcaggatttctcccttcagagtaacgatcgaacctcgaacaacttcgtcggacaagtcaattccaaaagccttctcctgaggagccatggagagaaggaatttcgtgatattattggagtacaaagtcgacgactgggttggcaatcgggaggggaagtcggtatagcctgcaggtgtcattaagggttcctcactgtgaatgaatctagaaaactaaccaataacggtaacatcattgtaggtggttagttgccccggaacagttacttcgcaattgccgccagcttcagctgcaagatcaacaatgacggatccgggtttcattgcagcaaccatctgccatggtcaggttagtccttcaagtttgagccttttatgtttgggatattacctccttggtgatcagtttcggtgccggctttccagggataagagcagtggttatgattatatccacctcgcgactctggtccatgaagagcttcatctctgcttcgatgaactccttggacatttcctttgcataaccgccctggccagcgccgtcttcctggacatcgacctcgatgaactctgcacccagagactggacttgctcgcgaacggcaggtcgcgtatcgaatccgcgcacgatggcgccgaggcgacgagctgacgcaatagcactcaaccctgcgacaccggctccgacgactaaaaccttgctgggcggaatcttgcctgcagcagtgacttggcccgtcagaaagcgaccaaaatggttcgacgcttccaaaacagccttgtacccagcaatgttggccatggaactgcattcatgtaggcgggtcgtgctatgtggatagatgccgtacctgagagcatcgaaaacctgcgcgcgtgaaatccgagggatcatgccataagcgaactgttcgcgccgcgagcgcaagcttgccacaagctgcttttctgggcggatacagaacaggagat

SEQ ID NO: 1363 - DNA, 5975 bp, Emericella nidulans
aacgtcatcccaatttcgaattatcaggttcgaacctatggtaggtggcccacctgactcatttgacgttctctgacaccatatgcagccgatactgtcgtcaaggttccgcagatggcggaatcaattacagagggtacattgaagcaattctcaaaacgtaggttattctaatctgtggccgaacctcgctgaactctcatgatagaggtcggagactatgtcgagcgggatgaagagattgcgacaattgaaactgacaaggtatattttggtttatatggacttgccgtgtgtcgcaattcaagtcacttacacgctttagattgatgtatcggttaatgcgccggagtccggagtcatcaaggagctgctcgtgaacgaggaagatacggttacagtcggacaggatctggtgaagctggaagccggtggtactccggaaaagaaatcagaggaagcgactgagaagcccaaggaacctgcctctaccggctctgaggctgaaaagccaaaggaaccagaatccgcaccatcttcttctgctcctgagaagagcacctcatcaacaaaggctcctcaggctgaaacttccaagccgacacaggaagtggcatccaagtctcgaccaacggaggaggcaaagcccgcactaggaaaccgtgaggagagaagggtgagtaacgtttcggattcgcgcttaatgcacggctggtgctaacgaccatccttgaaaaggtcaaaatgaaccggatgagactaaggatcgcggaacgtttgaagcaatcccagaacaccgctgcttccctgactaccttcaatgaggtcgacatgtcttctttgatggagtttcggaagctgtacacggatgagattcttaagaaaacaggagtcaagctggggttcatgagtgccttctctcgtgcttgagttctggctatgaaggatgttcccgccgttaacgcttccattgaaggccccaatggtggtgataccattgtttaccgcgattatgtggacatcagcgtcgctgttgccacggagaaaggcctagtgacacccgtggtccgcaacgctgagactatggatctcgttggtattgagaagtctattgcagatcttggcaagaaggttggcctagatgagcctcatttaggagatcataactgacgccattaggcacgtgacaacaaactgactattgaagatatggctggaggcacctttaccatcagcaatgtgagactcttatatttccttatcgagcaagccatgtactaatcggcatttagggtggcgtttttggatctctcatgggcacgcctattatcaaccttccacaaactggtaagttatgtgtccacgactactagtacaatcatcaaactaacccgctccagctgttctcggtctgcatgccattaaggacaaacccgtggccatcggcggcaaggttgagattcgtccggtatgtaaaatcctgctaaagcgcgcttggttcttgttgttaacctacctatcagatgatgtatcttgccctcacttatgaccatcgacttctggatggcagggaggccgtcactttcctagttaaggtatcttttacctcaccttttcgtgttctttctgtggaacaatttgactgacgatatcgacaggtaaaggagtatattgaagaccctcgccgcatgcttttgggttagacgaactgtgccgttctcttttaatttgttctgtaaaatatcaatccaatatgtgcgatatatcagtgctaggtttcagctgtagatttcgaggccgggctaggctctctctaatccctggtctttgttatatttattactgagacaaaagtgcaatttgtttttataccatgcctatccttcgcttcagctgttgcgtttcgttccggttcaagccctcgagtcgccctctttcgagctgtatgagtatgggcggcgctaatagttgcatgacggaaaggagactattaacgacagctgtttggctgctctcgttacgaatgtgactcgcaacctccatcgcgtgtagagctagcatgtcttcttttttggcgttacatgtagacacgaatgtgcttgccatctccgccagttccgctggccctggataagatgcctgactcaacacccgagcaatttcaaatacctgggcctttatctgaagatccactggtagctcttttatcggcggaagcactgatcgcaaagctaaatttccgggctttagccaacctggatgattatgggtttgcttaatgtctgttacttaccccgtagagtatcttcgagccaggacatatcccactcgcctgtgttaccctgtgccacgtccatggctgcgtgtatagccaagcaaatgatatagtcgaaaatgagaacattgacttcgtcattggtgtcttcgtctgttctcgtttcatccatacttgttccatccattctagctcctacccggtacttcgatattgtttttatcgtctgacaggtatgctatggatattggccttgagctccaagcagacttggcactaggtgaaattttgggcgtgatggcgtaggatgtaggtaaatgtgcttgtagaccacatgtatgggctggagaaaccacttttgttgtcaaaaattgatactcgtatatactgttacagaaatatatgttatgaaacatcaaaaacatcaatcagttccccacgcaagctgagtacatacacccacctaagaataaaagaacatataacacaaatacccacaggccgatgacagagacagcacacctgacaatatgaaacaatatgaagcagcactgaaaacccctacccaagtggggagctgtgcatgagtatagagcacaaccacacgtgacctattgatgcgccaatggcgtcatgcaagcctgaaaccaccatagccacaagtactacgaactcccaagacagaacagaaacaaagctgaaagattgttctgcatgccacaacattttaggctgatatcactagcactaaaacaaacgaccagaagatatacaacgatggcgtggtactgttccggatcaacaaactcagaactgattgagaacctatgcagagaaggactgataaagaacgagagagttaaacaagcaatgatggcagtgagcatagcttcctccagctaccccagcagctcaaaaacccgcacctatcccaaacattacccgaactagcaatccatcaatgtttctgcactgctttggcttatggatttaacgcatcacgcctccacttccatgcatctctaaccaagggaacaaggtcgaccgcggtcattatgcacctgctagaccgtactcagactcgccgcagccgatcggccatggagcgacaatttccgctccccatatgcatggacatgcgtgcgagtatcttatcaactaccttcgacctggcgcccatgtcctagacattggctctggctctggttatctaacccatgtatttgccaaccttgtcgtggatacgtcatcgagcgatggcccaaaaggacaagtcatcggcgtcgaccacatacaagaactcgtaaacctggcacacgacaatatgatgaagtcagaggatggaagaaaactgctagaaaatggaggcgtgaagtttgtcaaggccgatggcgccgtggatggctagatggcgcgccatatgatgcgatccacgttggcgcagcagcacaagagctacaccctctgctaatcgagcagctgcgagcgcccggacgtatgttcatacccgtcaatgccgaggacgaccaagggaccctgttcagtaccgcattcggcggtgggcagtatatatgggtagtggacaagaagaaagatggcactatacacaaagagaaagtgtttcaagttagctacgtccctctcactgacccaccaaagcattgaagacctgagttctgcgatatgctatggaattttctggtagcagcaatgcctgcagctatgccactgaagcccctcgcagagctggaagcgatacggcgcaaaaggtgacaattaataaaatgagcactcccagaaccaccgcccaaaacatatggatgtgtcggatttcattgcgtagaaaaacaaaacagagctagttttaatggggtcatggttgatgcgtgtgaatcatggttaaattaatagccaatcaagattgctagaatgggaaaccacctgggaaattaaactgcccagaggagaatttaaactgcgggctaccctgctggaaaaagaattgatgacctccaccaaacgggcttccgtggaaattctgcctctgcgattctggatcattgggatcgacgccactgtcatactgtgccctaagttcaggatcagaaaggacttcgtaagcctcgttgataccagccatcctcttctcagcctcttcttttgtgataccctgagaccctgccttatcaggatgatgctgttttaccagctgtcggtaggctcgcttgatagccttttcgtccgcgtctttggatacaccgagaactttatagtagtccttttgcttggaacgcttctgtaagatcatagccttttggaggagagtttggacctccttcgattgagggtgatgttccttggccgtgctgaggtaacggatagcatcctcgaatctatcctcatccagggcatgttgagcattgaacaagagcgctggcaaagaatgggggtccaatgcaagggcttcggagcagaacgtggacgcgcgtttgggcatatgtgccttatcaaaagaaaattagcaaggtctgtacgtctacatgctgctcctactttcatggctcacgtacctctttatatgcttcacaggttttctcgaccaaggatgcataaagtacaccttgggagtcagaaaagatgtaccccgcctctttggcttgccctacatctccacgaacatcatcgacaagaccgggctgaccgtcagcacctaccagaaaattcaaagcattattaaacttccgtgctgctagagtatcctgcaattttcggaggcgtttatccagctgcttctctcgccggtaaagcttgttgcacggtttcgaatccggatctgaatgtaagcatttgcgtatctgtaagagtcctcgttcgacatctccgagagtgtaaaagagcatagatgagatctgcaagtgcgggtctattaagcctggggaaatctgcaaagtatgtgtaagatcgctaattccttcctcgagctcgcctttttcgaagcgacaatgtgcccggctccgccgtagggtgagagacgcactggccttcgcgatagcggtggtcgcctcactcacgcaggcttcccatgcgcctttcttctccgcatccagtgctcgaatggtggcgtctcgcgcattctgaaattcttcatattcgggtgtgttcttctttccggccttctcaagatcatttaaagcgccagaccagtcggccgtattgactctgagacgagccctttgtagaagagcgccctcaaaattcggtttcagctggagaacacggtcaaaatcatcttgggcttgcgcccggcgtcccagagataagtaggccgcgccacgctggaagacagtgaggtagtttgtgggatcccgggagatcgctgcatccagatacagtaaagcgtctcgaggcgaaccactcgagagatgtgcttttgctgaagcgatcaaggatgacatcggagtattgggtgagattggtgactctaaaccggcgccgaagcccccaggcacacaggcgaggaaagctgttatcgcgcaaagtggaagaagcatcttcggtggtcggagtggtccaaaggaatgaaggtccgcaaaactatcttctgtacggaaaatggttcaaacaaggaaatgcggttttcaagggtgtttatcgttatagctcttgtagcctttaagatactcagagtatcttacatgat

SEQ ID NO: 1364 - DNA, 5679 bp, Emericella nidulans
aagttttctcccaaaactcggctatggtatcggttatgccagcggaatataagccacgcttcgacaggctatactttcctgtggtcggcccgcagttggagttcaattcggggtcgcaggacaagtcggcggacggagtcatacaaatttgaggagcaaaagcgggaggacagccacatgcaccgccacgatgtgcacccctcatcaaccatcaaaaggcggtcggtcaccagccacagccagccaatgctctgcagagctgggaaacgaccaacagccccgtcgtcactctcacaacaatatcccatccagtatcccgctcttcgctctccatacttcacccttagcgactctgctcccatccccctctgacctagagaatttttaatttgataattactgaggttggtttctgtcacgctcaatcccgccgtcgaggtgtgctcctggttcctcgaggctcctgcggcggcccaaaccccacgaagcctcgccccggggacctagtccacagtccactatcccctctactgccacaacctcaaggttcgataaccctggctaatttgactgtatgcaggtccttgacttgctttcgtttgtgcggtagaccttcgttctctaattcccccggaaggaaaagttgatcgctctgttcgcgtgatatcaattgtctcagggaggactcggaccggtcacatccttgccctctggttatcttttaattggaaaatatattaagttatacaccaaagccgcgatggagggccagggtgaaaatgatgagctctatcctatcgctgttctcattgatgagctgaaggtatcaaacattcctcttggttacggcatcttcttcgctcaagaaccgtcagtcctgacttaccgcactttcagcacgatgatgtcctcctccgcctcaatgcaattcaccgtctttcaactattgcgttagctctggggcctgaaagaactcgcgatgagctagtccctttcctcgatggttagtatctttatacagacgagaaccggtgtcacggttaagagctcagtattgacttttgcaattcagattctgtcgaagatgaggatgaagttttgactgcattaagtgaagaactcggttctttcatagagtatgttggtggcccagaatatggccacgtactgctctcccccttggaaaatctagcggccattgaggagccgctagtgagagaaaaggcaagtcgaggtcaagctatacaggttttacgtgttcagtctaacgtcctttaggctgttgaatcactaaacaaaatcggcgagcagctctccgaaaagcagatcgaagaatatttcgtcccaatggtacagcgcttatcgaaagccgactggtttacttctaaagtgtcagccactggactctactgcgtcccttacaggaagtcgtcctcttccctgcaacagaccctgcgccaatttttcgccggccttgttcgcgatgagaccccgatggtcagacgctcagcaggcaacaatctagcgaaatttgtgaaagagatgacgactccgattgtcatcgacgaaatgatacccctttttcaatacttagctagtgacgatcaggacagcgtgcgtctacttactgtagacattctcattgccattgccgaagagatacccaaggagcagcaacctagccacggcgtgttgttgacgtccctgcggagtttgttcgaagataagagctggagggtcagatacatggttgccgacagatatgaaaaggtatcttgcggatttctcgccgagtccttttttgaactgtctgacgagtcccatagatcgcgaaagcagtgcatgaagaggttgtcactcgggacatggtgccgtcattcgttaaacttttgaaagacactgaggccgaagtccgcactgctgttgccgggcagataccaggtatatccacgccaagcacctcattatagccagaccaagcttactaaccgctaattaggcttctgttccttgattgacagggaaactctgcttaatgagatcatgaccagcgttgaggatcttgtttcagacccctctcaacatgtgcgggcagccttgggaacgcaaatcagtgggcttgcgcccattcttgggaaggaagagtaagtggcttgcaaatttaccaagttgcgcgttgagcggaggtgctaactagatcgttgcaggaccatctcccaccttctacccatgttcctccagatgctcaaagatgagttcccagacgtgcgactgcatatcatttccaaactggagttggttaacaatggtaagttgccagcaaatttgtaacagttcatatagtttctaaccataacagttattggtatcgaactcctatctcagtccctcctccctgccattgtacaattggccgaggataaacaatggagagttcgtctagccattatcgagtacattccccttctcgctagccagcttggagtgaaattctttgatgaacaactcagcgacctttgcatgggctggcttggtgacactgttttctctattcgtgaggctgccacgcagaacctgaggaagttaaccgaagtgtttggggtcgattgggccaaggagtccatcatcccgaaagttatggcaatgggccaacatcctaactacctctacagaatgacaacgtgtttcgcgatttctgtatgcacactataacattgttggtgaaaactctgctaattatttttatccagacgcttgcacccgttgtcaccctggaaatcatcgaaaattcagtgctcccaatccttgaaagactcacttcagacgatattcccaacattcggttcaatgtcgcaaagtcttatgccgtcttgatcgacacgttgcgacgtcttccggctcaaggcactctgaccgacctcgagaaggaaggcaaaaccgaggctccttcgccaaggggtcaagagctcatccagcagagtgtccttccaagtctggagaaactccaaggcgatgatgatgttgatgttcggtactttgcgacaactgccgctggcggccacgaggaggttatgcaaacctcaccgtaggttgacacactagggcttgaagcccactctgcagctatatgtaaagcaccttactaagtgtgagcggaaaagatcatggggcgctcataccttggggggaattgtcaatttagttaacttagaagtagtcaggacaactggctaggatgagattctcatggcgttctcaatgtagattttggcccatccgattaatcccatgggtaaaccacgcttatacgcttaaccgcaaatgatatcatgtgatttgcgctacaagtcctagattattaattccattcggccaattcgatgtctcagtccaccggacagctgtgatcatctcaacttttcctgcgcgcagagcgctggctaagcaacgctttccggcgatatgtcttcttcgtggccttggcattttgttgcgatctcggattcagaaaagcaacaccgccgcgagcttctcagtctccgagggaattacgcccagctgtcgattgtgcttgcggttgtccttttccgagtctatattgcgctgcgtcctcttgaccagcaacaccagaggtccaacagacgctctcgacaaaacgcttggctcgacgcgccgttgtttagtggatgggttgagacgcggagacagtattcagtctgcttgctttggcttacttggcttctctgtctctctgtgtggaagaccggtgagggtaggacagttgaaacgactttgaatacgcgggactaactgctctcatcagactatctgcatctcaccaaagcgttaggccatgtcggtctgtcccagctgccgctacaagtggctatgtcaccggtcttttacgtgtcatcaacaccaagagcttcatccctgctgtccatcctgactgctgttccgcaaccaaccgtgacagcttaccatcgtctctttgctcgcgtggtcatttctccactactcatcggccacgcaattttgtattgcgcgttctttttgcagtcgagccaccctggattcagctctttattcttcaaacgtattttagacttggatgtccagttgggcatcgttgcaataactgccgctgccgctattacagtgctcgcgcgaccgcaggggaaagcgggcgggatatggcagggtaccgttaaaaatagacgacgtgctttctacgctgtgcatctttcgttggtggtcttgctgtgtgttgcggcgtatttccatgttgcgcaggcgaaagcatttatacttgaatcactggtggttttcgttgttcacttgggatgttgttattgcacagcaaggtagaagtcaaaccgcggctaatataaaggcagcatggagtgtttatagaaacgttgaggtctgagctcgctgttggtattcttgaggcaaacttcacaaaccccggagtctagcttacaatgacagattggaaccagagaaacttaatacaattagctaaagacgggaatagtcttagggacataacaagggattggttggtaattgggaactgaggcgcttagtgcgattgaaattacatcacacgtggggaactgttttggatttatctcattgttgacatttggcctggcaaccgattcatctcacactttatgattcgtgagctcttaaatgagcatgtcaagttctcacaattcattacaggactatgaggctattccaccgatataattactatggcaacgcgatctcaccggctgctgggcgtgctggtgacgagtcttctcgtgtgcctctcactcatctttttagaaagccccagctccttcagcaatcggaatatcgctccttccccaccatctacctctcttacccccttcctacagccgagtgagcctttagacgatactattgaccgtttcccgagcgatatccacccggtaactgccctcgtcgaagatgcagagcaacgattcaacaagctcttggaacgccaatccagaaccttaagcgatgctgttaaggaataccgccggcgctataacatgcaccctccacctcattttgataaatggttcagctttgctcgatcaaaaggcgtggaactcattgacgagtatgacaccatctaccactctttgctgccattctgggccctcacaccgcagactattcgcgctcgcgcccgtgaggctctgggatatgataatggtttgttcggcgttctcatcagagatggcaaggtatcgctggctgaagggctagatggagaacatgagtggcagcgtgaggcgacgcttggtatgatgaagaactttattcggtatttgccggacatggacctggccttcaacgcccatgatgaaccaagggttattgtgccgagcgaggatcttcaaaggctagtagcgatagccaagaatagcgtcattccgaatgcttttaaggcaaaatcgctggtgaacgaatggtcggctcggcccgaggacctgaacaaaggagaccgcattgatgaagtgcgtacaactcgtttcaacaaaatctctcatcagcccgcttggactagctcaaggatatcatgtcccgtcgatagccctgttcgatccctagatgaaaactcgccggatgacacaactggatatgcttcttggg

SEQ ID NO: 1365 - DNA, 2151 bp, Emericella nidulans
tcatacttgatgcacgtatccaaaactataacgctgcatctttgctgaacttgaaaaatgactcactcttccacaagcagcccatcagtcaacgcatctatgctctgtacactcgtcaatcggatttatgaaatctgagcctgcgtctgcaagctggaacttccgcagacattgataagccccgataccggtgggggaattggtcattttcccctcattcaccgcctcagaaaatttcgtctactgtccaatgaacgaagtgaccttaatccgctatgccgcttccggcatggttgattaagaggggctagtgcggcgaaaggtgtacagctaatttttctgctccgaatttttcttctctttttcttcttctttcttttctttgggaaaggaagaccttctccatcagcagaacgtttctatcgtcgatctgttgattatactctccgttcttttgatctatatctgcgtgtcctgatagagaccgtagatttttctatctttaatatgccaattgccaacggtgacgctcttgggagagctatgaaggccgaattccaggaccacaccaaggccttggaggtcttggagaaggagtacccgatcaaggatggtcttgatgtcgacactctgcttgattctgacaagcacggtgcgctgacctacaatgacttcctcattcttccgggatatatcggtaagccgcgcgctggtctcctaaaccacggtccgtgactgaacttcgatggcaaggttttcctgcttccgatgttactctggacacgccagtcaccaagcgtgtcacattgaaggctccccttctttcctcgcctatggacacggtgaccgaacataacatggccatccacatggctcttctgggtggcttgggtgtcatccaccacaactgctctccggaggaccaggctgagatggtccggaaggttaagcgttacgagaacggattcatcttggatcccgttgtgctttctcccagggcgactgtccgagaggcgaaggagctgaaggcgaaatggggattcggcggcttcccagttactggtaagttctactttgcttctcttctccctcttttcgtgatgattcccatctatctcttatataactttcgttccactgaagcgacgagagttgcaatgtagagaaaaagattttatctgatttctatataattgcatttctggctcaaacacttaactggcaaatcagttatgctgactgattttgttctcagaaaatggaactctccgctcaaagcttgttggtattgtcagcactcgcgacatccagttccacaacaacctcgacgactctgtcactgccatcatgtcgaccgacctcgtcaccgcacctgctggcaccaccttggctgaggctaacgaggtccttcgtagctccaagaagggaaagctgcccatcgtcgatgagaacggcagcctcgtctctcttctctctcgcagtgatctgatgaagaaccttcactaccctcttgcttctaagttgcccgcctctaagcagctgatctgtgctgctgctattggcacccgcgaggaggacaagcaccgactgaagctcctcgtcgaagctggtcttgacattgtcatcctcgacagcagtcaaggcaacagtatgtatcagatcgagatgatcaaatacattaagaagacgtaccctgaaattgatgtcattggcggaaacgtcgtgactcgggaccaagccgcggctctgatcgctgctggtgttgatggcctgagaattggcatgggcagcggcagtgcttgtatcacacaggaggtcatggctgtcggccgtccccaggctctctccgttcgccgcgtcacccaatttgcggctcgctttggcgtcccatgtatcgctgacggtgggatccagaatgttggtcacattgtcaagggtctcgctatgggcgccactaccgtcatgatgggcggtctcctcgccggtaccaccgagtctcccggtgagtactttgtcagcaacgaaggccagctcgtgaaagcctaccgtggtatgggcagtattgcgccatggaggataagaaggctggcggcaacggcaaggacagcaaggcgagtaacgctggaaccgcccgctacttctccgagaagg

SEQ ID NO: 1366 - DNA, 649 bp, Emericella nidulans
ccacggtgaaggtcttgttctgatcagcgagactgattgctgcataggttcctgctgctcctccgccgatgatggcaaagtcccgctcgatgacgtcctctgcagcatatgccgacgggtcgaattgctgagggcggacacaggcaacgagggccccggcaacgaaaagaaaggcagtcaacatgttgatacgatgaatggaactgatcaaagctggcactacaggtgctgcgagcgccttctatactaacatcctgggcctctgacttactttcctccgcaagaaactccggtgtcaggccagggggcggagggagtatcgatacagcccccaagtggagcttgcttgcaagtcggtaaatcgacttgtaaaccggtcccaattgctaagaatctggctgagttggacctttgaacaatctgtcgcggtttcgataatttgaccgaccagagcccagcgggcggcttggctaagccctaaaacctgccccaacccgtggtttaacaagtctagtaacagggaccttttcttgcaactaacaatattctcttggcttaataggtttcaataataatcttctataaatatgcgtggttcacaaactactacagtagttcaactttcgtatatcttggatttgttaacaag

SEQ ID NO: 1367 - DNA, 787 bp, Emericella nidulans
atgttcatgtatcatacacatacgatttaggtgacactatagaatactaggatccaaggagatctgtaaaggagctgtaaagagagctgcaaaaactcaatggcaggatataactatggataagcgtcatattgctcctcaaacatttgtttatatcggtggtaacatgtacagcattctacctaccactggggtgagcagatagtaaacaagactgactcccaatttgtttgtcccaacttctcaagcatagcccgcaaaagagctgtgcgagatccgttggagtgatgggctcgtggcatggcttcgtcattaagagtgtacggcatcataactaggccgaggtatgcctgagaaaatggcttggtgttttgctacaaaagtcggtccaaccggtactctgcattcatattcctatatgggtgagtacgttgaactataggtctttcttctatatcgtagcatggtttgagctgccgcttgtcagggtacatacgtacatgatcttccagctaggtcggtagccttctctatccctctctctgttttggtttatccctctaccgctctttggtcactgaatatagggtaatacaaaggctaagtgcctgagcaggtagcctcaactgcacgccaaccgatatttaccccgttgccaatatcttcgcttgcagtccacttttgcccgccattatctccagaacccggcactgcatcagggaaaaggtagtctattatttcttctaaaggtcatagctgttgtccctattgagatctgctgcagttc

SEQ ID NO: 1368 - DNA, 5964 bp, Emericella nidulans
agggtgtacactagcagcgacttggtacaagggtcgggatcacaatcgtccccctgtgcgagaagccaagcaagagcgatttgcgccggcttgacacttcgctcagctctttgggaatgggcactcgccacgctctccagccccttcacaagcttcaatattgccggaaaattgctctcggcgtacttggggtatatccggcgtagatcgccctcggggatagatgtgtaggaggtaaattgaccagacagaatcccgcgtccgatggggctgaacgcgatgacagtcacgccaagctcacgggctgtttgtaggacatctgactcagatgattcgatgtccagtgtgaataggctgtattcgacctgcagcgcagcgatggggtgcaccgcgtgcgcccggcggagggttgacgccgagatgtctgagaggccgaggtgccggatttttccttgtctttatcccgtctcatgagtcgctttctttaaattgatgatacattgaggtctgacaaaaggggatgcatacttctttaaatcaaccatagcctccaccgtcctctcaaccggcgtgaccccatccacgcgatgacagtaataaagatcaatagtattgacaccgagcctcttcaggctcctctcgcacgcctcttttacataatcaggatcagagcgaaatctatgcatcccgtcagcttgccgctggaggccgaactttgttgcgatgaagacatcatcccgcttggccgggtcggatcgtttcacccattcgctgacgaggtcctctgcatcgccgtagatgtctgcaaggtcccagaagcgaaggccggccgcgtatgcgttatccagaagggatagtctggattcaggggacccggctggtccgtagaagccgctgaggctgccaaagccaaggcccatgcagggtacttgcggagcgtcggggccggagcctagagagcgagtctggagggacatattctagaatgcggatgcgagagcgatatgttatgttgagtctggtaagaaaccttggggatccgttgtttatatggattggaaatagactgagccagcgatggtaagctttaccagtttgggttcccgacatgggtcaaccctaggtccagacacaatacgggcacgcagtcatcgcatcgagtgacctataaatatgagcccttacacggtaacttcattgttactgttggtgctttgcagatcaaaactattacggccggatacagcatagtatttcaattggtgtcttcttctgaggccacaccaccgctccctccagcatacatctcccagaactattgatatattttcactttctttacctttttccaccttagagcagtctctttatattattagtcgttagcaagtttccatggtgagcccagctcttacctagcctcattcgtccagtcgaacaaattggagcatgaaaagatcagttaagatctgatagctacggaatttatccttggccagttaacgtgcggccatggccgttagttgacgttgacaagtccccatagattgactcaaaggtggtggtagttctcctttggctgacctttcccaagacttttgcagcctcgagtcttgaagcatgcagctcagagattgcagagacatttatcgtaccattaggtatgaccagctcgtatagggctggtgcccactacgtactttacaccatgcatagcgaaaccaaagtcatactggcgcttctggcctacgctattcattcagtcagacgtacagtgcactgaacaggcagtgcggatgatgattgatgcccatagccctgacccaactgtctcacccgtctcccgattctcctgggtcactttcagtgccctaactctcattagcagccggatctggtctctcttcgtctctatgaaccaatccgccaggcacgcagtaaagttggccagcgtcactgatcaatactatagataaaaatatagatagattgattgaaaagtgaaaaataaaaataaagacctaaaagagaggtttacattcaaatagaagatttaagaggaatcgcccgctcttcaatcgccgttgccaatcagacaccctcgttgccttactaaatctaagctcatgctaagattggagagctcttgaacattaattatctataatattatgatattggcctattgaaaagtttggtgctttggaagatattgatgccttggaggtcatcaggttatcagtagaatttgacctattgctaccagcaatgcccgggtctaggagttcagaaagaaaacgcagaccacggcacctatatttcctttcaccagcttgcaataggtatgtttgatcgcataacttggttctggtcctggcttctccagcttcaatgagttggaacggggtggcaatattggctttgtaatacttgtctgccgaattggtgggatcccgatcccggtgggatagtatcaaacacgcccaagacagagcgatgctccatatcacaaccatacagccagactggacatcaaaatgcccgaccctcacgagcgatttgaatgccatcatcctggttgcacatcgagctacctgcgcaaggagcatctgcatcgccatcaggcccagcacactggccgagtcacctctccatgcccattctgcagccggacctttgcacgaaggtagacgcgccactaacctcattaagcattgtcatatgactccggggatttactgatatttggtctagggacactcttaggcgccatgtccggcgcgaccatgcgaactcccaatctcagctagactcggctcgtgcaatacgagcttgtcaagtgtgtcgtggcgcaaagttacgctgtagaggcggatttccctgcactcggtgtcgggcgaagggggttcaatgtgtctttgagcatccagcggccaagtttggggttgaggacgagcctgagcctgggcctggacccaacgccgacgctgatctcgatgcgacggcgtcacaatccaatccgtcacggcatcaaggtaatgctcaagctgatccacagaatcgacagggccagacggatggcgagagccctagtcttggtcctggtctggttgttgcacagtctgcggacagagataagacccagcactgggtagatctctactttacacggttccatccccactggcctatcctgcaccgggccacgtttgacgttgcccacgagccgcccttcttagttcagactgtagtaatggttggactctgggttagcggaacgttgcggggaaggcgagctgcaacggagcttcacaataaactgggactctctattctcgagcagagggtgaagcgacatacttgacttgaactcgtttgcaacggactgactgacgatatatacagagcaactgggcccgaacatacccctcacgagacgaagctggagaagggtgtgaactcgaaacgggggacggcaaccctacctcccagtggccgatcgcaacgtatcaaggcatcctaatctacctgatcttctcgctggttctgtacggcacagaccatgcctcattcgaactcagcttaactttccgtatgagcccgtctgaccattccctcctctcgtccgtggtcaaaacatgtcttgaaaacaacatcttccattatcctcgtatgctgcagcggtatgtgggcgttgaggatattacctgtatctgggttggagtagaggagaacaaacggttaggactggcgcagtatagggtttgttgcatgtgtgctggtgagaccgggcgaaaggcatccgtacgtccagatggtgaccatggccggctgctacgcctgtgcgacttggacttccctcctcctgatgaagagtatctgtggggggccggctcgaacgaggaattgtcgagactacttcgacatcggaacgggactccagaacagcatcagacggacgatgggcgtgaggggtcgttaataacaggggaccaaaagagctggatatctagtcatatactatgtcaatgtagctcgacgatcccagtaaagggctcgcggtttgctacatgacgaacatattagctggaaccctcggtatcccaccggaatcccaccattccaccactttgctatactcttatagtattccccacaggcttgcttacagatcgacctagtaatggatccataattgaatccagttacggaccaaaggaaccaatcataagtccattacagatcaattgcattgggcaggcaacccctcccccgcacttaaaatacctcccgaacccccagctcctgcagaaacaccatcctctctttccttcactttctcgtttactctcttctctcgcctctccttccaatttgtccacctgctcatcctcaacatgtccacccagtcgttccgccagatcatcggcctcccgccgtcaaccgccacaaccaccgactcaacgctcattatcatcgacgcccagaacgagtacgcccagggccacctcaaggttcaagatgtcgacaagagccgcaaggtaattgctgatctgctctcccggtaccgcgccgccggtacgacacagtcgaatatcgtccatgtcgtccaccagacgcctcccggcgcaccggttttcaccccggacacgcccctagcggaggagtttgccgagctgaagcccgaaagtggcgaaaaagtgattttcaagaatttcccgtcctcttttgcgcagaccgatctccacgagtacctgcggtctctgggagatgtagggaagaagattgtccttgtcgggtatatggcgcacgtctgcgtttcgaccacggccagggcgggtgcggaactggggtatgaggtgctggttgtgagagacggggttggggacagagcgattcccggcgttgaggcggatgttcttgtagatgtggcgctaaaggaggtcggggatgcgtttgggacagtggttacgtctggggagattaaagggtagggttctgtggatggatgcgcaatagtgggttggaacatggatgtagtgactggttgtaatgctgcaaggcgaactcatagtatataatatatagtatatccagaaacatagtttgcccctattgcaccttgacccttatactgtctgcagacgttctccctaccttgaactgctagtaaattataagagatatctatggatccatgaagatgtcaaaattaagatcactgttgttgacatacaagtttgtgcctgtacagctgcttacgattggataatcttggacatgtaggtgtctagcgtcattatggcattaacttgtgcgaggggaatatggatagagggttatatcctaccttgatctatattgctagactataagcctgtggatctgcccgaccaggcagattattagggatacagcagctgctatatttcaagcggtttataagctcttgtccatgcatgatctctagcattcaggagaatctcgaaccactccaccatgtccgcgggacccttcagcctttgagatatataatcataaagtctcgcaatgactggacgatgattagttctcacttgtcttttcttttatattctttggggtgccgtggcgagaatacagaagcaactgtggtagaaggatatctatgctctcggaaacatggactgacgatcgtacccacacagtcttaaaactacaatagcagattcaatgttcactggggcagagaagcacaagtatgttggattcaccggtgtgcgggctgtgcggcaaaactggccagttgagacacaatctattgcctagtacctaagaggcaaagtaagcctgccgctggcccaggctccagctggatgtgtaaattgaggaagtaccaaatttacggcaggcgaggctgtggtgcgcatagcgccagtacccaagtaggattttagaactagaatgcttcttctgatatcgcca

SEQ ID NO: 1369 - DNA, 3568 bp, Emericella nidulans
  unsure (1)..(3568): unsure at all n locations
ttcgcggtacgcataatacgactcactatagggatctactccgtcttgtaagtgcccctcacttttgaatgggcttcagcttggaactcgagtaactggtatccagttggtcttttggtctcaacggtatcccctggattgtctccgccgaaatcttccccggcgcgctgcgaaatctcacggggacatgggctgcgctggtgcaatggtatgcaattcccttcacctagtatccatatctaaatcagcaggttgatccaattcgttatcaccaaagctctcccgtacatcttcaatagccttgggtacgggacgtggttcttcttcgcctcctggatgctgctcgctatcatttggtcattcttttttctcccggaaaccaaggggaagactctcgatgaaatgcatacgatcttgtacgtttctctccgtcgaaatgtggtcttggctaatgaatcagcggccattctctcgccgaagagcagggtaagggtgaggttcgagataacactactaaaagtgatcgggaggctgtctagtccagtagttctagaggactattggctggatgattcctctgatgatttttgattggtggtgaaaatgtnggatgtttaatgccaatgtactgggagagaacatgccgatagtacataccgctgtgttgtatatcgaagacggctgatttatatatcttagtctttcaaaagacggcactcacacaatcacacttcgatgattcaataactgccgatagcatttaatgaagtatcaattcagcgtaccattcttccgagacaccataattgactatctggccactgggtgaagatgaacatcgatgacctctcttattaatacccatattggagcagaatctggactgccagattagggattcattacgagcttgcacccagtgagttatcagcactcagtctcgtcttgtatggtttttccagtctttctactgactccggacaaaaggcttgagggggaaaattgactttgctgcatccactccgtcgtaaacatactcccaccgcgacttgagtctctcaggggtttcccacgccaactctgggtcccggagccacagccgcaccaggtgccgcctcttctcgtcagaatcagtgaagcccgcgcgtgcatggaagatcgacaggttattgatgacctggatatcgcccttgtggaaatcaagcgcaactgccgacttctcggccaaatagtgcagcgcgtccaacgcctctgcctgggcttccgtgatcggaggtagtgtcgcagcgcgaggtttaccccagtaccccgtgaaccctcgccgggcatactgaatgatcagtcgctctggagagctcgatgtctggggctgatagtatagcaatgggcggctaacgacatcgccgccctgctcggcgacccagggctcggcaagagtgtggatgagatcgggcctggtgcgcgccagctcgttgtatacgtgccagctgctggatagatagctctggccgccctctgctgcttcttgaagtgcgaacagagtaatcacatcccctgcgtcggtatggaagacttgcttctcggtcgtatacgccggggctttgatcgtcttggtgtcgaccttgcggctgagatcggtgatatgggccagcaccacgtcggctttccctgccagttgttgtcctggcggccgcggactggggcgatatacgaggcgattccagcgtagatgatgaagttctcttcccgcgtgtactggtcgaccgggaccccgcgaatgaccttgaacccgcggccgagatggatctcgcgtgagatcaggcgcaggctattgtgcagcttgtacagcgggaatgtctcttggttgacaaggccgatgggcaggttgagggctagcttgttagttttgctgtgcttgcttatggggtttcactcacttttgaaatgaaggagagcctggtcgacttccttcaaatcatcttcggtgagatgataattccagtcatatacttccccaacagtttttccatcccaggctaaatccgactttagttcctgcgggaatccctctggcaatgtccgtggaagattctcctctctctggcgccgttcagcacgagcggcgtacttcacgggatccggcaggtactgaatatcaggctggccgtcaggaccaacaggaacgggcggaatgacaacagacattgtttcgacgctatttcagggtgatgacctgggatatgtgaaggaggaccgttgctcccctcccctctcatctcatatgatgctcggccgaacgcaatcgctgtcggtgatggcgttagcaacaccgccagttagcaggacatctaatcaaaaacaggctaagcatctgccaagagtggatcaaagtgtctcggagtatatggattatattgctggtggtgcccatgccctcatctaagcgtatatcgcaccatgtcgatgtaacctcgcctttttttctcatgataaaaggcagcacctctagcccaacaagcggtgaccgactctaagtaataactcttaaaagagtgattgagacaatgcagctttcttcgtataaagagactgctgttggcgaagcagtggacaaggacaacaatgcgccggctgagaacttagaagggcagatccaggtccatgatgatgtggaatatgtcaaggggcaccctgtgatccgcactggtcagcactcagattccctcttctataatcctgctcgccggaattatgctgatctctacaggtgccgatatctcacggttcatcgtttcagaccgcgacgatggcgatccagccctgacctttcgctctatcgtcctgggcactgtctttacagccctctcgagcgttatcaccatcctctacgtcttcaagccgtaccaagttcaggtctcagctgtgttcttgcaacgtaggcttctacgcttttagtctctgaccatggcctaaccctagcagtgcttgttttcatcttcggcaaggcatgggccatctttacgccccgacccgagcgagtcaaatggcgctggctacaaagcgttctgcgattcatgagctttggacaggattttgggatcaaagagcacgtcgttgcagccctgatcgcatcgtctggcaacaacggtctctctggtgtcgaagtccgcgccgtcgagagactgttctatggtctacacatctcggcgtccacggctgtcctgagcacattctccatcgctctctgtggctttgtcctcgcaggagtcctccgtcctctcattgtctatccggctgagatggtctactggtcgactctgccgcaggtggtcctttaccagaatctgcacttcaatccacgcaacaacaagcgccggctgatcaagtttggttgggctctagggattgcggccgtctgggagcttttcccggcgtacatgatgacatggcttggtgggttttcagtagtctgtcttgcatccctgcgagcgccgatgcatacaagaaaaatcataacgacgatctttggaggtgcctcttcgaacgagggtatgggactgctgaactt

SEQ ID NO: 1370 - DNA, 597 bp, Emericella nidulans
cacaaaacctaggctcatttctccgaggcatctcaaccatcagcaactggtgagaacaattgacaatttttcctaacttggtccttcacagagtcctgtttgtatgagggatattccttgatcaagggttgagtccacgcaacacagcagcagatagtcttcgagcctggctgacgggctaactggcttaacaggctcagccaaagctcgtccgcgatagtgcactgcagatattatttgtcgagtttgcacttggatgcccggtcttggcggctctgagaatatagggatgagccatgcgacctgcgatgtctatgctttattcttcatgactgttgaaaactgctgtcgagagggtctttctaaggtgaactaatccaaagttccgagcagcgagagcttcacctttccaggcaccgttataaggcttggcattgagctaataaggtcgttttgcatcacgaaactctcttccgcaaagaaattgctaagatattgcttttcaggactctggaagagagcgtaaagcaaactgaattgatgagcatgtaaagtattaggctactccctttcgaacgtggttgaaggatgttggga

SEQ ID NO: 1371 - DNA, 1543 bp, Emericella nidulans
atctgggggcgtggaatcggaccgctgtccctgtggtcatctcatgctgtagcaactcgccatcctgactgtcgaccacatatcggaaagtaccaaaaatactgtccgtgaccaacggcccggtcaatcagctcaaccgccccgtaatcatggccggcaaacgcgttatatagcagacgcaggatgctgagtgagcgcgcacggtcccactcgtatcgttactagatcatggtctgcacaatgctagcccttataatcttcctgtcaattgttttgggggtagggattgggttccttggctgaagcgcgacatcaataaagtagcctgattggacttcaatcatgcacgtgagttgctcgtcagcgctaggaatatgcctatcctgaattggttgatggagtgagattttagaggtaacctggcactcataacccggcagccaactaaatcagcctcagcgaatgcttcttgtgttcgtgatatggatccttgactgcaaggcgcagcgcggcccctaacgggggatcgatagatgcactaccgaggcgggatgggttaagcctttatctgtgtgagactgcgatttgacctacaactcagtttatttccttcttgttaacctaaaataaaggcttatcatgagtgctggagtcaagagtaaggtcttagaataatagatagaagagccttactagagagccttactagtcgtatcttatggctacaagatacacctgagagatatattactataaaaagaatatctatctaggtgaagcaacctaaggagcatataatagaggacataaatggtgttaaaatcatgacaattaacatgacagtcactgaaactaagctgctagcacgggcatggcgctttcaagatcggaaagaatgctgtgatgtgacctggaagccattattcggtctgtgcaagaacaagcagtgagctccaatacccttgatactggtgctttgatctagactttgtggattcatgcattcaatgcaggggtttgggcgcttaaacaggaagggctgaaattctcttaggtttggggttgatttatccgcaaaccgacacagaacaagaagaaatgtcactacgtggatgggcatctagtatgatcaggaacgcgtagtcttcaagtgatgaaggattcatagcttcatggcctcaaagtcaatgaatgtttaagggcagtctcgagggctcaattgtgtcaatctatgaacaaaggagaaaaaaaaaaaacaaaagcaattcaagctcattaaatagaccaagcacatctacagaaaaggaaatacagtgattttttgcaatacggcgggggtcagggctgcccatacgagctacgaggtgttgatggcttgggtccctgctacctctaccgagcccttgctttggctacaacagataaaagagcccgtctcaaatcgaactagttatagatcgggctagtgattgtcctgcatgtagtccagtggtgcgtcaccatgccattaaacatattattactcatagctagctttgatggt

SEQ ID NO: 1372 - DNA, 2992 bp, Emericella nidulans
ttctccggtgcgatctccgcaagatcctcgaggtgcggtctcgtacgtcaaccaatttaacggagacgagattacgtcgtggtttcaggtctcacgcggtgtgcgaatcgagttcaatcccgataacgagccgggcgacaggctcgtcaatgtaactattcagggagaggccatcgacgacgagcgtgactaccgcgtcgtgaccctggacttcttggccggcggtggagacagcatctttgtcgctacggacgatttcatcacgctggatacgcaggatgaggtgttgacgcagtacatcgtcgccggacgccgctctcacccgagcttgaggagcgagtggtcgagaatgacggccagggcgagaatgcggatgagagccagaacgacgaggtggatggaccttctgacgcagctggcatgctggctgttccggcctggaccgctcttgctggtattgctgtggcgataatggcgatgtagcccagcataaccatccggtatgtgagctaggtatgcccttcagtgctcttaccctgccaaatagtccatacaaacgttatatcgatgtaacgcatgcaacccatgtaagtctgttttaataaaagaggaacacccatgtcataacgaatcattcttaagcaagcatggtgattcatcatatgaacacagtcattctacattactagaaccatcaaataagcagcagcggggttgagcaaggtttcgaacaagacgctgagtgccagaactcagccagaagagtatgctgacagggaggaggtatatgtggtttccatgacacgggctgatgagaattccttccgtctcaggaaacaaaattgtcgttttccgagttgtatcgccaagaggcataaatatttccaagactaaaactactagcttcgccaggtcccagagagaaccaaagacctttttgaaatccaacagtcctggccatgccttgcatagtgtcatgaataccatggaaaggcaaatgcagcagtaagatgaacaattgacttccattattgaaactaaacctcttgccataatgctgttgattgcctactatatattgtgactgcttataccaccagatacgttacctggtgctgacacgatatatacctttcggctgaacgacaaatatgtacaacataattcatcgttctgtatatacagcttaagttcatcattcatgattttcatttgaggccccggagtctgtcaacttcaagcctattacagccttgcagattcagaacgtttagaaatctaccctggtgtaggtaggataaccttgggtccccaagaaccctcataccctacttacccttctgtatcccacagcccatctggattccatatgttggtacatcaagtacccaggcatctgagagcagagatattttgaattctatagaatcacgcagcaggctggtgatgaatcgtcaccgtagactctccagctgccatagtcaggcgcctctttggactccacaataatagcaccctcttctttctccagccccaggttgtcctccctgctatccttccaagcagctatagatacgatagaaagagtaaagtcgccctcctgctcaccgaagaaactactcaagagtcagtatcccagcacttactcaccaaaaaacacgaaccttcgcatcataatactgaacctcttaatagccttgcagtccaacggctcgacgtcatgcacttcttttcctctatacgtcggcctgaaatcctcccatttgaaagccactttgcccttgttataaccaggcctgaaatccgcctcccagctcaacccgctccgctcgcgtccgtcgtctctaggcgggagaagccccttctcatccttcacgatgagcgtgtacagtttcgtgtccgagttcgcagtgtcaatatccaattccacccccgagtatgaggatagatcccagcttcggtctccggtggtccgctgcgatgcgaagcgcggcaccgccgagggtgcgggtgtcgagatgaccgttaaatgtcgcggttttcccgtcgtgcgatggaattaaataggagtgcgaggaaccgccacggacgcggtcgtcggtggacgtccagtctgctgagagccaggggcttcttgtggtggtggttagctgattgagttgtatagaagaggatgattgatggattggggccaggcatactgaggacccccgaagaggtatttccgtgactcaaccattatacctcggttgtgaagccttttacagttatagaatcaagaaaagagaagcagaaatgctctggggtcattttgccaattggcacaaattgatcgggcagttgaggaatgacgtcgatgatccactctatatacggcgctttgctatacatacagggtacgccaggcagattaactagtgcggaatctctacgaccatttcctgctagacagaaaattaagaccggctgtctctgatccaaacgatgatatgactgacagggactatgcggtgtcccactctcccttcgttgcgggatcagtcaggtagaaccgcttgatcctcgagtgcaggatcatggcggaatccctgactgccggttccccaaaaaaagttcttggagattcaagctgcgcaatttcagctgatgggagctgctgcagtaatcaggtgcagtttaggctggtattggaccctcgctaccttacccggctgcgcgccccaacttgggggctatgtatgccgaatccgtatgtattgtggaggccaggacggcagcgaatcatatcaccgagtaccagtgatctggcgaatctacttactcctagagcactatcctgtgaagctgagtgtaactgtggccgtaggttttgtccatattgagcctttccatggaggactccgggagggcccaaagctcacgttcgcgatgaatctgatgagtgtaccttgtcattattggatatcggtggatgaatcatctggcagcaaca

SEQ ID NO: 1373 - DNA, 3310 bp, Emericella nidulans
attattcttttatctgactctcgctttattatccagtttaaggacgcagacgctgggggtcacgagggaacagagtcgccaaccggatatttggcaatccaagaaagaacataacaatacggttcaaacccaatccaccgccggcgtggggagggcagccctggcggaaagcagcaaggtagtcttcaaagccctcctggttggggttgacgcccttggcaatcatagaggcctccaactccttcacatcgtgaatacgctgggctccagacatgatttcctcgccacgcatgaagaagtcataggagttagagaagcggggatcttgggggcaggccttggtgtaaaaggggcggacagccatagggaacttgtccagcacatagaaatcggtgtcatacttttcgcggatgatctgtcccagctgtttctccatagcagtggtgaagtcgttctcgaagcgctcctgttctgacacatcaacgcctgcctccttgaggagcgccacaccgtccatatagttcagtcgcagggccttgccgtccttggggagcttgaaatcgcctgccttggggtaggacttctggataatggcaatttggtccgcatatcgctccttgagctgagaaaggatgaatacgaggagctgctcggcaaattcgagaacctcgtgatagtgagagctgaaagtcttctcaaaatcgagaccggtgaactaaacaacgaatcgtagtcagcttctctgtgtcaataaaacttttagtatggacgtacctcggtcaagtgtcggtgcgtgttgctctcctcggcgcggaacacaggagcaatctcgaaaacactctgcatgtcaccagcgatacacatctgcttgtacaattgtgggctttgggccaggtatgcgtttcgcttgaagtacttgacctcaaagacaccactgccaccttctgtggcagcaccaaccagcttcggtgtagagatccatcgggaaccacttttgatcatatactccgcaaacagctctgcaactccgctagagatccaggtaatagcctggctggttgccgtctgaagatctaggacacggttgtcaagacgagtcttgagggtgacaataggtgcaccatccgaatcaacctggaagccctcctcggtcgtctcagggagcggccgctccgcatccttgacctgcatgggaagttgttgagcggcttcggcaatcatgtaaaccttgcggatatggatctcgtggttactcaaagtggcggacgcgatcggaaccccgggcttcttaacaataccagtaacctggacgatagagttgacgttcaaaccactagtgtacttgaccatctgtcgcgagatgggttccgccgcagcaatgacagcctgcaccttcaatccctgctgacgaagcatcaggaatgccaatttggcactctgagcacgggcattgtccacacgagccacaaccgtgacttccttttcataatgttcgtcgttgatctgggagagttgcgtactgggaaggacgtccgcggtttcgggaatcggaccgtataaatcctttgcggtgtcgtttgcctcggcagcagcggcctgggctttttcttgagcagcgcgttgagctgccttctctgccttcgccttgtcctttgcaagcttcttcaacgcacttttgctgagcttgccttctccgccctcaccagcctccgcggcgggagtctcctcgggcttgggacgagcgggcaattcggaatcggccatgataatgtcgagaaggatgaaaagaaattagatgcccgtcgcagttctgatatcaagctgatggcaacttcgtagtcactcgtcggcgcctaggctttcgttgactcgagaggcagtacagctcttcaattggatcaccccgccagggcggggcctaaccctacgaggggctgctcacgtgttaaaaaaagagcagcctgaggcgacatcatatatatatgcttgcagctcagcatgtaaggacatcataacataaacaatgcaatgagagtgtgtgtagcttactaaaacacgctcttatggcaaacttataattttatagtggtgaaattctctgacaaagtctaaagtacaggttgtttattgtaaagtgtatactgccatctttggatactaaacataagtggtctgaataagttggctaggggtcaccagcacatggtgtatgacattactccaggcagcttgcaacctacttagtctgccaattggaatgctgtaggccccattcgacagctttctggacgttgtcggcaatagtcttcggggtccatgctggctcgccgcccatataaacgccagtccgcacgagtatagaatgccactcgctattgtgcgcgcttcggtacgagttggctccgcaaatatccgattccgggttgtctccaaccatataaacgttccgtaagggtcttgtcgtttcaaacgcaaacgctctggatcggttacgcaggagttgcttctccgcaaattcgtacgtcccttgcgacggtttaccaatgactgtcttctgaagctcaacgcctttattggagccaccggtgattgcactccacatgccttccaacgcttcgcggaaaccgccctgtccgagacgtggaaggctgtaagccgccgcccaccaaagatccggattagagaagtaaagaggcggttgcccatcctgctggtatccgcgattgggaagattggcgcgtccattcttgtctgatatagttcctaggactccttgcgatgacagcagaagatcaatgatgatatgtgcgtccaacgcccaatccctcggatcattaaagacgaagatagcgtcaattttaagccccattgttgggtcgccgggctctcccttatgaggtaggggtctggtgaaggtcttgtagtagtcgctgaacccttttgagaatggccaaatggatggattggccatgaagatgtcgccaggcgttacgacgttcttaaatccgtacttctctgccaccgcacgacagccatctccatctccaccaaccaccagtacacgtttgttctccagagcgggttgtgattccgtacctcgtaccatctccgcaaaaggcgagtggctttgaatgatcacatctgcatctaatggaacctggagtttctcgctgatttcagcaacgcgttccgtttcgtgtttcccgcctccatttgtcagaagaataaacggtattccctctttctttaaaagcgctaacgattcggcggcccctggaatgggagtagaggatcggagaaggacgccatc

SEQ ID NO: 1374 - DNA, 5578 bp, Emericella nidulans
tgtatcagaaatgcctgattgcggttaatactgacaaatggtgaccgtccgccggtagccgtgctctgacgtattcgagtatgccgagagtagccgcgcctgccctgtctcaaaagtacttaatcgctctcctccaatgctgaccagaggaaggaggggaaaagagtccctttaagatcggtttatgactgaaacagaactgataatcatgttgcagttactgttacctagatcctggccggctgcgctgttggctgctggcaccatcttggtatatactccagtttatattaccccgagacaacttgaggaatataccgctgactgagtcgaacatacagtctttcgtttggatcgcatattacagattcattcacccgctatcaagggtccctggaccgtttctcgcctcggtcacgcctctcgtccagctctaccacggcctgaaaggtgaccgacatctatggatctacgagctgcaccagcgctacggcgaccatgtccgtctggccccgaacttcgtctccattaacaacgtggaaggactccacaagatctacggtcatggaaacaagttccgcaaggcggacttctacaacggcttcctggctatcccgggcgtctacaacacgcacaatgccattgataagcttgtccatggcaggaagcggcgagtactgagccaggcgttctcggacactgcactcaaggggatggaggatgtcatgctccttcatgttcgccaactgtgttcgattctaggtcgagagcgaccaacttcgcggtctggggacaaggatggagctacttttaacatggccaattggttcgggtacttgacgtatgatgttatgggcgagctgtgctttggaaagagttttgatatgcttattgacggggcgaaaagaaggatgattcatctggtagatcgtgctgcgtataggcactatgtcgtatgttctgccctccctttgacggagtatcactaacaaaaccagtgcggtctttggatgcctctgcaccgctggcatctcgatcagattttcatccgccgtctgacgaatgaccggtggaacttcatcatggagtctcgccaggaagccaacattcgggccaaggaaaggacttcgctggggcaagacgcaaagaaggatttcttctactacctgctcaacgcccgcgatcccgagaccggaaaaggtctcgctactcaggaactctggggtgaagcgaacgttctgatgattgccggcagtgataccacctccactagtctctctgctgccatcttctacctggtccggaacccgcacgctctagagaaactgaaaaacgaagtccgctctcactttagcgacgtagaggagatcgtgaccggatctaagctcaatcagctgacatacttgaaagcctgcattgacgaggctatgcgtctcgcacccgcagtcccaggatccattccacgcgaagcatcggacccggttgtcaccgtggatggcctcgtcctcccagaagggaccggctgtggtactcctccgtactgcatccacagacgtccggactattaccgagaaccgctgagctacttgcctgaccgctggatcgaaggctctacctgcaagaccgccgacgcagcctggaccgtgacccgagaggaggtggacttggctaggaaagcgttctgcccattcagcattggccctcgcgggtgtattgggaagagtatggcactgatggagatgcgagtcaccctagccaggcttatgtacctgttcgacttcgaactggcagacgctacgggtgaggatgagaatgggcatttcaaaatggtagatcattttgttgtttccaagactgggcctaatgtgattgtaagaagaaggcaggcttgatattgttatttatgttcatatgtatatgattaatgcaattttgcagcggatcttcgttgttctcctcaccctaatatgtatgaagccacgccagcctttgacaactgtcatgcatgacaactttgctgctcatcaaatttacctactctgtaaccacagaatatcatcactcggtcactctgaggcacagctatgtgataggtactgagatcctagtacccgtccaaggccgaacgagctcaagactcaaaacaaccttgaccaccatcaaagacttgctgcccttaagctttaggcccattgaccaacaaacataaaattcagtggcagctacgcccacatccgatgtccccgacgtacctgctacccagtgactctgctactaaaagcggtactagcaccggcgcctagtgcgagcgagctgagggagcagaagctaccttccaaagttgatggccaaaacaaacgggcctgtctgttccaagctcacgcaaaagaacttaacgaggccaaatgggacccgcaacgcggcttcagatccacgttctaccggctcttttgctagcgaacccggctggagagtcgtgaatacggtgaaaagaaaaagccccagtagccagtcgatattccgcagaaaatcaatcaatgtcattggcgccaggcttgagggggcgtgggttttacttgtggagtctcaatatggaagtctagctggagaagggactagtgcaggctgtccaccctttcccgtatgctcacgaccaataggcccctggacgccatatctgggaagcggaggacggaagagctcttctgaccagaaatggcaaagaggcggaggggatccagaagactaatggtgatgataattatgaggctccacgatgagaaaatgatagattagaagggtccagaagctcacgctcccatatgttagcttgaacgaagtatccttcaagcaagctttgtgtctagctcagaatgaagaatatattagttgagtggaatcgcatcttagagtcaagtctcgagactgttcagtaattacttgcggacagaatcccgttaagtgctcacaagatcatcactgcgactgcaggcctcaagtgcggaccgattctaaatcgccctcagaactagctgacaagttcgcggacggaggctgagggcagacaaaagataacctcctcgactccgagcgcgaatcgcggcaatgcctgcatttgtctctcccgaagcctccggccccaagagctgaagattcttccctaccctcaatctatcgcttcagacacagccaaatatctgcttacatgggcttgaatagggattttgggacttgcaagagtactggactgtagatgatagttgcagactagacaaaaatgggaagagaattcaatgtcatcttcccataatcctcattaacggctcacacactaaagtgactgagtcgtgctagtagaactgtgccaaagtaccctgaaaggcatgatcaaccgcctcagccagatcattctggaagtatcccggataaatcttgtccctgagtgcagcttcgaaccggttcttctcgttgtaaaggttactaatcattccttgcgcaacgtatccaacgcctgcgtctctgaagacttgtgcctgctcatataccagttagcccatcatatacgtgagagacgaaacacagaggtgaagcatgtgaaccttatcgcgtccggccgcgagagttgcaagtaaccgcggatgaacctcgttgtatgcgtccagcgcacgctggctatcctctggagaaaggggatctagtgctgtaagggactgacgcgctgttgttgcagcggtgtgtgcgctgtagaggctgttcgcaacggggagagcaagcaaaacaccgccgttgtaggcgttgatggaccgctgcgcgctgtcgatccggtcgtttagttgctggaactgagcgagagcggcatctatgggtgattgcgcgatggcgagggagggaaggagagtataaaggatcaagatggcattaaagaccttcataatgaattgtgtcctatattgaatgataatagagaggttttgttgagagaaaggacggtttagcggatctatcaggttggttcaactcagccggaactcaggcaaggactttatagtgcctggccctatcagctcttattctgagtctcacgaggctttctcacttgtgctgaagctatatccgccagtacctgtgatttgacacccggcgcatcagcagacataaagtaagaaggccgaccatcagcaaaggtagactaaacctgcaaagcccagctgtcaatgggtcatcctcgagttcgtgtacgctcgctatttctgacgagtcgaacgctgccgctgcgaagcctcacgtaggtctcgccaattgttgcaactcgaagcaaacacgagagcaccaatgacattgtcctgcgctgcatggttcgccgtgttgcaatgcatgttgctgcaaacacggcacaaagcttctgccactgcatataatcgagctgcagggtgaacgaactcgtcacagcagcagcagtaggaggattctggtggctagctgaccacagactacagttccctgtaacacagagctttttgtaccccgcaaaggaagtgtttggtcttgtacagagactaggctgcctcgaatattcaaaataggtcttcgtcaatacaagttctctggggcatagagcttctatctatctgcaacaatcacttgaaagagacagccatatagcttccagaatggtaacattcgtacaaagccattttcttgcatctgattcccaggcatcggatggcgaacccatccttcatcaacgcgtctacccagatagcgaaggccacgaccagaacggggctgaagctggcagtggtggtgctgacaccagtggaaacaccgtgtccttcaactctgtccaaggatgccctccaattgccattgtaggcatggcgctccggcttcccggaggtgtcaagtcccccgatgaactctggcaattcctaatcgaaaaacgaaatggtgtttgtgaggttcccggaacccgctatactgttgattctttttacagtgagaccatggcccgttgtgtaaaaacgcgccatgggtactacctgcaagacgacccagcctgtttcgacgcgggcttcttctctatcaactcacacgaagcagggagaatggacccacagcaacgccagctccttgaggtagtttgggagtgcttggagagcgctggagagacgaattggcgcgggaaaaacatcggctgctatgttggtgtttacggcgaagactggctggacctggcaagcaaggacccgcagcatacagaccgatatcatatccttggaacggggcagtttgccttgtcgaaccggctttcttatgaatatgactttcaggggcctaggttagcaccgcgcccccccttttaattcgaactacactgacgaatcagcatgaccctccaaaccggctgctcagcgtccttggtaggtctccacgaggcgtgccaagcgctctactcacgagactgctgctctgccatcgtggcggggacaaatttgatgtttgcaccgacaatgacggctaccatgtctgataacactgtcatgtctccaactggaacttgccgcacgttcgacgaggc

SEQ ID NO: 1375 - DNA, 2541 bp, Emericella nidulans
accgacattttgctgcaaccactgcacactgccaagatcctgctggcctgcgatatactttgaaccgtactgagcttggatgtacgtgagaagctgtttggctcgaggagttgctgccttgtcgatattgtcataggatagtccagccaccagcgaagaaaggagaagagaaaggaaggaagttcgactgacaaacatactggaagccgcaggtctctgagtagaagaagaagaagactcaatcgatggatggttgttatgattgggatatggtgttccgatttataacttcgacatgctggaaggtttatgcagagaatacatggcttgacgcactactgccattttgagcatcctagacggcgtatcatgcgatatttcttaagatcttcatcccaacatgacatgtaattgatcacgccgcgtcatccaacggcctcgtcgataacctgacccagcaaggtgtttcataaagacgaactgagggtcttttagcacacgtctgtcgaagtgggacggtcccactggtaccggaggcaggcggaaatggatcgtctaaggaatgatcgtcgtgcttgtcgcgacaacagtgctatggacacagacaatgcccattgatgtgcagggtggaatggctttaaggcccacttctgatggttcatccaactaaccgagcagccagaacggacgtccattttactgtctcagataggcgtgtcttgttcaactataaacagaaccaagacggagcctgccctttatagaagtaatctgcatgggaacgaacgcgaggcgctggagcacaggctctagttcatcgttgtgcacctctagaagacgtttccatgacttaagggaaacgagcgtcgacccaaaatgggccgctgtatagaaatgccgctcaacaactagccaatccgcgtcaagacggcatacgcacaggtagatgggatcctaagacggccattagatgatatctacaatccggcagttttggtacgggcgacccccatcccgtagtttcgagtgatgtttttaataccccgtgattaactggagcctaacgaagctagccactggactgctcgagatgagatatcggaaagaatttttgaatgttttgtgcatgtaaagtcagatttcaggtgagatgacctgtatatggacatagaaaaaggagattgctgtaaaaacagctcaagtgagaaagaatctctgcccgagacatttgccattttgttggacagtcttcgccggacataagttccaatcagatattcaatatggtattagatatccagaataccaaggtcgtgtggctcatcattctctttctgccgatgtagtgaacatacagacccttgactgagccagacctagaggtaccatgttttcagaattccatccatatacggcgacacaacaagtttggaatactttgaacagaccgtttttcgcgacaggtcatccgtattatgtcctccacactctttgtgaactgttggtcgatcttgttctcaatcatacacctccaacggctcctcctcggagaaacgctatcaacgtgctttgtgggaaagcaagtatttctaactggcgtatcgacgcttgaagataatctggggggcatcttcgatgggtcctcaccttgcactatgctccttgggagcactacatttacgttcaggagggcggtatccagggacccagggcaagcacgtattggatcaatccacctccactggagatctgtctgacctccttgtagtgtgtgaactcccagcacccttctgagcgaaccttgtgggattcgactagtctttctttggcttcttttggagtaaataatttgttgattatcaagcgttacagcttcacgatatatactacatattaatactctggaagagattcattgacttacttcgtctggtgccagcaacaggatactataaagctgctttttgatcatcttaatttgatcctatgagaccaggatggcttgtatgcatttaagcaatgtattaagcagtgtattagcagtcttgcttcgtctaggattcatgctgtcaattttactggtttatttatcttaataggaccgtgacagtgatggacccagaagataaacttcgcacaattcggctgattgcattactttcaagctacattttatatacccatgttagtcactgccgctataggcgatggtcattttcttgggttgtctggatcatttatttaggtaaaattatttgcttaacccatggacgttcattgcccaggcaagtcttagttacacaattctcactcatctcagcgtaggctaagtgtctctcgcttctatatgcaacaacacaagctcgttgcactttatccgcgttgataacggtgtctttactacggctgagcggatgggaaccctggttttcacatcttatggtcatatgtgcttaattcagactacctaccatttctgatcatccttcaaaacttttagagttatttaatgccattaacaaacttgaaatcctcatatca

SEQ ID NO: 1376 - DNA, 2055 bp, Emericella nidulans
ttaacgcgtcgacactcactcggaggaacgacgtgccagggaaagacgaacagaaacctagtggctacataccctggctctcacgacatgggactctgcagccctgatggctgcccaaaaaagaaaaaaaccggcacaacgcaaaaacgctggattcccgaccagggtctgctagataactaaggtaatgttagcttgatctaacagggcttggacgaatgaaagcaacctacgtctgtagtatcccagctagcaatcaagaccaaggcgatgtcatcaacggggttgttcatgggtctgttggtcagtggtcaaaggttatttgctgcagtcgcccaaatttattaaccaaggcatgcttgccaacactggctttcattcactgaaggaatctcaggatagtgtacaggactcgcgacaaaagtaccactcttgcttgacaaaggaaatctagtatcgatcaaaaagcaaaacgcacagctcagagctagaacgaaagggaaaaaaaaagaaaataggcggaagaaaatcggccgcgaggccacaatctaatctgtcttggtatcaacccgtgcatcccaaaatctcaaacccattcccgtctatcccaaacgcccgtacaaagaaaacggtaaatcccaaaatgtcaaattccagaaaaacatcgcaagactttttggtgtcaaaactgatcatggcctcaactggttcgtgtcggtaaggtattaaacggagtagaagtagtaaatgaataaagtatcggtcgaagagaagaacggcacgattgtgtcgatcgaggagggtcgaacgtaagctccacttggagaaaatggcggtattaaagcgatctatgaagtccgaaacgaatagcggccgatgatgaacaaggtagtgttacaggaaactgcaaggcgaggttagccatgaaacaaatgtaccgcggccgcagctgcgagggccacttacagtgaaagatcgagttcataacagacacgtcaaactccagaggccaaggcgccattgaataaatccacaaacgactttccgcactggaaatgataaaaaatcgcaggatcatgtggttggcacatgcgaacgaagcccagacggttatttcggcggtggtggaggagcaccgggcttcttgactcccgtcgtatcgtaggccccccgtcccatattgcaggctgaaaggtctcgaagaatcatcttgagttctgcgcggacagccatgggtcagcttaggtggattcccaatggactggagggaataaaacgagcaggggaggatgcagtgcttatgaaccaggacgccgagagcggatgactcactgtttaaataaagacaaaatagatctcactcagcaataataataatattccagaaaacacaattcagccggtggctgtggcctagtcggtgttggacaactgactggatgggtcgactagcgggtgaggtctcaagattccaggcaatgttgcagctgcaagtgagatccgatcctttaaagtgccaggtccacaaccccaatctcaaggcagggtgacgcagtgacgaagcacgacgagcaggtagggcaggaatgcgacaaagtacccgcggagtggacaaaggattgcgagggatagtgcggcgcacggaatcagagcaccaatgcgtccgagtccaagtctctgaagtctttcaggtctttcaagtctttctgatttgctggtctctggagcgctcgatacggctgctctaggatcagatatttccgctgggttgctgggtcgaagtagcggcgcagggggtgcaaatatagtatgcgatgaagatggccggcggattgcagcaaggaggaaagggagcgagtgccgcggaagtggcccgtctggtccggcgaggagaaactctgactagagagatagcaagagggaggactcaagggaggaggccggtcacgcaataggcaatggagagggcctggagagcgaggatgagggaatggcggccgaagaagagtgagcgcgaggagagtccgtcaaggaatgggttatggtgaggaattt

SEQ ID NO: 1377 - DNA, 2268 bp, Emericella nidulans
ggcgcgccgataacgacgcgggtgtagctgtagcatctgtacttgtaccagtaatagcagtggcaggggtagagctagaggcattagcccccttcttcaacgctcgatcagtatgtcccaagtcccgtccaggatcaatgacattgcggacgcgggacttgagttcttttacttctgctcgtcgtcagtggacatcaatttacgtctacatctcagtcgaggccaagggtaacgtaccgggaaatccgccatctctcttccgatcccaaaggatcgtgccctctttgctgaagtgggactcagactcatagttggactgcgaatctgatgttgtgctggtgctggcggatatagaagggaagatggtcacagtgaatatcccccctgtgcgtggaatcagcgcaatctcgccaatgtctgtgttgaaagtagagaggagttcttgggcaaactgtccatatgagatcagccattgtttctttgagttggcttgtttggggttgaagttctgatatcgacgccgggcgtgagggtaggtatcatacataagcagctctcaacatccatttgcactgcgtgcagtactgaattgttattctgggtttggaatattttgcttctggagactgagttggtgggtttgtttcgatgggggcggttggttcagtcattttctttgcattcgctcagagagtacggatatcaggacgaaatggcggaatgttgtaacaagtattaaatacgctggaaattttgaggttcaagtaaaggtatattacaaagtcttgataaagcctgatagtttgataatgaagagactctgttgcaccatagaagtcagaccccgcgatcgtgaacccgcaagaacgtcactggccatctgccatccgtttccacctgcgctcccgacctattctcataacacccaatgccattcccaacaacaacaatgaaactgaaatccaaacaagggaactcaagaagaagaaagctgtttaggggccctcggcaggatcgatgcctatggaattgaacctgcagaccgtcgtgacactgatcgagccatcgcgcccctctatcgagaccccgcgctcgttcggttcataacctccatctccgtacccgaagtatacgactcgcatatggactgctcttttgactgctacgtcatagttatggattacatagacggcgatctcttgtgaagaggaggagcaagagcaggaggggctatatcacagctgcacgggtactcggcatagctacgcgctatcaatgacgattccgtggctctctcgatagggcggctgtgagtatcccggtactcacggttgaactgggatatctagtccatatgaggatggaagggcgtttcataggggcatcgtgcggtcgctgaagctcgcgaaaaagccttaggtgaggcagacggggcttgtgcggccgcttcctgtggattaagggaccggatgacgcatggggatctgacctccacgaatatcttgatatgggatggagggtttgagggttactgatcgagaaatggctttgctttccccgaatgctggaggtatacgaaggcgaagtgctatctggattgggatggtcagtggtacattggggtatgccttcctggccgtggagaacgcgatctatgatagttaacccctttctggaaggaatggattccgcagccgctagcacactgttactttgagggttgtaaggtgctgtgtacacagttcgaaaaggccgagttagtgggttcctgcggagtccaggtttggcattttatgaaggagactctggacgacactgtgagaggactcatatggaaggtattggcccgaatggctgcctctcctggtcccagaatcggttgggtattacttctatccacgtctggaatgccctcccaacgctaaattcccaactcgctactatgcctttcagatattctctacctttcctagtcattccttctctgatacgtcattattacgcacctacacttattccctacacggcagcagcagcaatggagagtgattcggttatacatatttcgagttatcactcacgccgcaaaattatcttccggcaacaagtccgccttcataccgcgaggaaaccgtgctctaccgtccagatacagacttctgtcgactagaatttactccttcaagaaccagaccagaatccagagagttgcagctcgccattgcaagaagcagtgaattcatatggattttggtctattaagaggca

SEQ ID NO: 1378 - DNA, 5950 bp, Emericella nidulans
gaggcctggcagattttgccgtacaccatcgtagtttcgacaggggtctgaataggtaacggggtgggtttttccccgaaggaggttttaaactcgggacccaacaagttttgttttacaatttcccggttaaaaggggtccagggttttttttcaaggcaggggaaaacgaaatatgtttcgacccggttagataaaaggttgaggtcttcacccggtaaaggatgtccctcagacggtcagatccttttaaaacaaatattttcaagtatttcccctaatgaaggccacaaaactggggccgtctattattcccaattggtcccacctgaaccctcgtaattactttgaatggaccacccctggtcaactatgagcattgagcgaatatttcctcaggtagtatcggtaaggcattttaaattaggagattggtgtagcgggacatccattgactacttagtaatgcactgttgtcgccgcataggtagtcatgtgcgagaaagttcaaactgtcgagcagaaacaacgtcatgattaggagaatatgctgttatattaaactctttgacgaatgtgactcgaaatcatataatgagagcggttatgacggtcgaattattgttatcggaatgtatccttaggtcgcgtgtagctttatcctttccaagaactttgcatgcttggacccaaaaatagcttcgctgtgctccagttgaaccgttaaaggcactaatacccctcaccgaggattacacaagacttagagttttcgcgaatatgctggccattggtcttctcatctagcccattttcgatccctgggttttatacttgagtccttgaagacaaatatatcattatctcttactatagtattttagattgtttcgtgaagcaggctaagcaatctcttgataaaaaaggatcaagtatagggtgagtataaatatgaaaaatgagtaaattatcttgagcagatcagcctttagagggcaagcagatcacctgactcatatggctctctctctaaaagcggcaatatccggcggagcaggcgctgattgtagttttctgcgctgtagaagtgcctagcactgctcataatttggatgacgggatggaaattgatatctatattcgaagccctagagatggttgagattgtgtcattagtcagtgcggctgatttcatgttctccaacctgtcttcaaacactgaggaacaaagctggggtgcgacaggctcgaattgcttgcatgaaagcgcccccctactacacaatacccgattagtcgagatctaaacagtccttgtttgtaactgagacgaatgtgttatctaataatacttgaattccatcagggaagtttcagggttataaacaattgtaagatttgatggaaagcagtacgctgcaaatccgcaaggactgtaattgcgggcgaacgggcttaccacaagacacactcatagctgcagtatctaagacgaaacccgcaaaatggaagagaaggagatgtaataatgtgcaagtcgtaatatgaaaggaaatggcaatactcaggcagaacaagtaaggagtaggggagacattaagtgtatggggaatcaaaacgtactacaaaatggaaagaggcaacagaagaaaatggatcataaaatctccagatcttcaaactccacgaccaagtagtcgccagtagcaggcgcactagagctcgaccctgttcgatgcgtcctaccccaaaccgtactgcttctctgaatatttgccggccgactcgcatacacacccacatatatgaatttgtcctcgaccccataaaaaaaccaggtaacctcgcgcatcttcttccacgtttcggccacttgacctggcgtcatcgcatacggcgagaccgaaggaacctgataccaaacccagagtgaatggccgacgcgttcgagcttgaggcgcacagaatggatggcagacggccctcgatctgcggcgctgagtggcgcgagggaccagtcagctccgtctgccgttgcgctgacagatgaaacgttgaccgtgccagatgcaaattccatgcctgccttgacccacttacacggctggggattcggtgacgcacccccaaaacggcgcgtccgcgatgacgcgtggtaccgtgacgaaatagactggggtgcgcccccggcgaaaatgaccaatcctccctgatcccattccatctcaaagtccgccgtcaccgtgacctcggcaactaggaacggatttcgtaatgacgtaaacacaatgggtgctgtcgatgtatccccgttgggcggttttctccagaggtcggtattgggccctgctctcagggtgaaatattccatgcattgcggaagcgtgaagtctgccggcaaattcaatgctgtaaacgacgagccactgggaggcatcttgaccactctaagacaagctcgcctttccgtcgtgcgcgagtctctcctctacttctgcgagtgctgctcggtggccgagtatattaaatggctgagcgcatcaaaaattgcctcccttgtgacttgtgctcttgttaccccaagaactctgggtcgaatacaaaacgcctgaactgtcccaaatcgactgagcgatgccgcgaggactaacaaggaaggacagggcaggttgccgacgaccttttccttgtgcgcgcagcgcgaagtaagggagtcccaacaataatcctccactcggagtcctcagtatgctgtggcgtcctgcgtcagcgaggtgatggctcttttggcaaggcaggagcccgcaactagtgagtccgaagtcgaatccgagccaggtgattgatgaagaaatttgactagaagaaaaagaaaataacgtcacgaactgctcaaacccgggatcgtggtgtagaagtcgccgaaaacggacgtgggtagttgcgaaccacaaacaagccgcaggatcctatatcgagccaggccgcgaaatgtgacgaaaccccgaggggagaacctggccgtgggccgcgtcacagtcatgttggctccttatcaattatacgtctcggtccggggcgccactttgagtccttatgatacgctgaaccagcccgctggaatgggagggagaatccgagttcccgggttcgcaagagagacccatcatggtggcttaccgttccctccacttgtgctgtttttctttttcttcgttaggttggagtcttttcatttgcttttcctcagaactggccttgatttgctccccgactgtgcgtctgtgcagcagtggcgggattactgtccagactacattcccgaaggcaaaccaattgaagtcgagtccacgcaagaggaacgggaacagtggcaagcttcgaagccagcaactgaaacatatttagactgtcgatggtctgacgagagacaccagtggattactcgacagacgattggacgcatcgtcagctgaaaaccgccttgggtccctgaaccccgtgactttcaattgccaactcaccgcctttggggggctttggccgcctcagtcgggcttctactccccatcccaccatcttgtcacagctgaatcacatcctgcagccctgttattgatccgggatcgcaatctacagaagatagcctattttggagactcctattggctgcctggtgtactacgaaactgactatctctttgctccgcggactacgataggctgtgtctgccgtcctgttgatggtggcgggcgtgtccgtccacctaggcacctacctgttccctgccatctataaaggatgaaggatgaaccttacacagccccggccctgcaccctggtccatgaaccgcgtcctatcgaggtccacaaatgaatactctatgtggatatcccttcctttggtgaccaattaataatcacccgtaataccacgtcaactcctgccccatactctctctaacgacgtgaaaaaccccattttttttttaaaatttacccagcatttccaggtttcacttaaccttgcattacttatacatgcagtgcttatacttgcaactcacgagggtggctaggcattgatgcagactagctttctattcagtacggcaggaagctcgatcatccaagtgttatatatgcacaacttctgtcttaacacgaaataaccgcatcctgccgcgggacgcctcactcatgctaataccttaatctattcgaggcgtccccccttgaagtggtcagcagctctcgctattgatccctcctctggtgccttccgtctctcccatccgcctgattcgcagccccctcttcctggtgtctggatccttagctggacccttggtaagatctaggataaggtcttgaacagtggggattactagctcttgcagcctcaatctagcactaatcttccggcgccgtccgcttcatctagcccggtgataccctcgggatggtcaaagccgtaacatgctatttctcgtgctatagatgctaatttcggtgccaagtatgaacccgacagtcgttgcaggtcgtaatctctgtttttgagcaccagctgaggcttctttcttaggctaccactctccgtgcttgaaggtttgtgtcagtgagaaacaagggtctttccttttcatcctttagtgtccccgttgaaggttggcttttcatgcagtgggcatgcagagtttcggtcataaaagctatctactaggcttggaacgactgatttagacatggcccaaagtcgtatgggatactcaacatatcgggtccgacttttttggaagaacggctgcagctcctcaagatggacaattgcgttatttcctaggtgttatagcagcggcacaaatttcgacactttgtcacttggctgcttgtagctttcctgcttgataccgctcatcagtgattttgaatgcacgcattaccctaggggttccccttcttgcgccgattgctcgttctaggtatagctccctcatggtaaattcctgatgacttactacatgagactcgagagtccatacggccagattgagaaccttcaatcttgctcctgtcgaagatgattctgacacaggcgcaaggaggtgacaatcataagagcataggttgataagctgatgaacgcaggcaatcgtggaaagcagagacaagcccaagtttaccctccaaattcacccgaacctcgatgacctgcttccttgtgtattagcccttgggatgggactcgtattgcgctaggttcctgataatgataccactatggcatcaactcaaacctcgtgctcctgtatctatcctctgtcattgtgtacttctccgaaatgtccactgcattttgctaaatcactcacccaggcagcgctgacagcaccgtctccgtggtgcgtttctgagcagtccttggacgggatccgattcccgtctccgtccctggaccttaccatgagcggaaatttcgaagtataatcctggcccaggcgttaaatgtcacgcgataacgctgtgcaacacctggagcaatatacccatcgcattccgatcatacctaattggatcatcaatgagattctaataatttcaggtttatattgcctggactaggctcaaagtacgcctggtacgctagtcatttgtgacgattctggtggccctctatcgagctctctgctcggtaatgtgactttcaatcacaaatttggtgaaacattgcttatcgggaagagctaatgtgttggatgagcagacaatctgatctgatacagcctagagtgctggttttgcgggcgtcaccgatctaccctccaagacaccccggctagctaggccaatgagaagccacttctgatacagcactgatgcaccaagaaggtaattggctgtgacaggtaacatatggatgactacctgttgctttggtgggcgctt

SEQ ID NO: 1379 - DNA, 2751 bp, Emericella nidulans
agcgcgagtactgctcgtagttccacatagtgagagcatcgtaaaacgggctaatcgtaatatacaagcttggcttgtgctgttggttagtgctgtactacctacagggcgactgggccagtaactgaggtgtaccgaggctggttgagttggtacgatgcacatgaatgccctattctagaaatctccggcttagttattgaacattgagcgttttatgcaccagcttgccgtccttaggcttccaatttgcgagattcggccggaccaggacacagctcgtatccgcgccaagtcataaaaagcgcgggtttgttccaagagagatcttaatatcattgagcacataggcggcggcctcggtgcccgaacgcctcaggatccaggaccgtcgactctgtgctccgcagggctttccccattgtagtgcttcgtcctatcctgcgggggaacttttccagacagaagcctgatggttctgttccagaactgcggtattttctatttatttgtttcataagtataatgctctgatcccattcgctagattcagtctggatatcctgaaccttcttggcaagcatcgaaagacatcatagagcagacttagaacagggtatataataggcggggtctctttgctttttccaggaccaaaccaccaagcctcatattgacgataaaccttgagttgaactcggttgtgtacattttcaagccttttatttatatacctaactactataacccttcaaaacgactgccggccagccgtctcttaacaaagatgcattgggtctctggtacatggctctgggccaagcacaagtatgtccattgactgagccacctctatagtcctttcctaccaatatactaatgcgctgcaacagagcgtcccgttcgacctcgtcaggagcacctatctacttggaacaatcgaagggcacaagcgagcgtcggaatcgcccacgaacctggtccctcccaacaaacccgccagacgacacttccacagcaagctctcggagccgtggtagcagttacagccagagccacggctacagccacggtcatacacacagcctccaccgcgtcgagacgtacaaccaggcccagtacaacaatcccttggcggtcgcacaactgcgctgcattcgctgcgagcggtcttcgctcgcgcgaataccactaccgacacttcgatgatccggtcaaatacccctctgtcgggatctgctcaagacagagaacaagatgtgcgagggcgaaatccgatccggtgccgctggcggcaatggatccccctgcgacggcggtggcacctgtttttgatatccctgaattgccagatacgtccacgtccaggcccaagaccgcgtctggggagatcgaaccagataggtattatgggttgtctacgaatttgatgaaaataaaaagtttgggttgaacctagtgcgtgttgttgcttagcttgtaggggtgtaggtagaatagaagcgggggaggggtattgtctcaggtccagctgtgagataaggaattgatactcgggttttgatctgagctgtcttcctacccacctttgtatgggctatttgactaaggaggggccataacacgataagcgcgactcggttttggacgctgccacaaagcacgagctcccaaggggtctgggcttgtgaggggcttgggaaagcccctgagaaaacacctcgtcgaatttatcctgctcagcttgcgcaatcctgctgaagatgcccgggaaaaagaggtcatgagtccttttcgcccgagttgcgcgattctacagcaatacagccctgggcagagtgtcttctgcttttggaaagacatcaacactaggtatcagctactgagctgaaccatggaatcctcagacgtccgctcagatttaggtgaaacagtacttttgtatcctaaagaacaggagatcgggctaggggacaaaagacgggatgggcccaaaagctagccccttaaacttagccaaaccagatgtgttttgtgttgcgtggttcatgtattggtatgcattctgaaggctggtcataaggtaaatactctgcgacgaaacgtagtaatatgttatttgcctgtgttgataaggaacattgctcttatatgcattatattttcggtattgaacgggaaacttaggagatggaactgacaatggaccaagggctgataattagggccaatgatcccattcgtagtaataattctgcagaaaaagcatgcagtcataagccctttacccctctatcgtgggccaaacttcaagataatcagcgacggtatagcctaccaattccattttctatcaacaggatcaacttagcacgctagcaaaggaacaaatgcacaatgtacctggaccttcctcagtctacattggtttgttggaccagcactatggggtgctaatcgccagattcacccagattgaccgctttgaatgttgcttgatgccgggactatgttgatgaagactttttacgagggtttagcactaacagccggcgaggtagaaaagcaatttgaccaccagtcgtggagcgagttattgacttttccgggttgaaagactgttaagctaataatttgaaaataaaagcttggcctatgggaaaactttagccctgggttggttttacgtaaccggaatttccaccaattccatttttcctggtaacggggggggggatcccataaaatttc

SEQ ID NO: 1380 - DNA, 2030 bp, Emericella nidulans
gtcttgtcaatcatcaggtcactctgggaacctgcggctgagtcctaactccatctgaaaattcgatggccaaggtaacagcaccacgagtgacgatcttcctattcctagattatggaacattggcaatgatctcacttggatagatttcatttttttttgatatcaaacaattactgagatggaaaatcatgaattcatcggtttgcagctggagaaagagatgaagcgggaaggtgaatatagcttcaccttcggaaccggactaatgaggacccttggtttgactcaaaactagtattcaacctcgaatcgagatgattataacagatcaacgccgtccgcattccacacccgcacatagtccacctccattgccacctcctccccatcgaccgtattctcgtctggatacccaggccagtttccaccaacggcaacattcagcagcagaaaatgacccttgtgcgctatagttctccaaacagtctcatgaccaacatcagcaccagaaacacgatggacctgttcgccgtctagaaccaggtcaatgtcttcttctgccacccttcaccttgcccagacccagctccaagcagggacgcgcctgatcggtcaacctcgagcccaacaacgtgccagtcacacccgctccaactgacgccgctattacccaaaccattatactcattgcagggaccgccctcgtttgaatcgactccacaatgcagtgtgttatagactgtgggctcaccgttgatgacctccatgatatcccactctgacgccatcggccagtttgttggatttcccctgaaggattcccccaatgcccagaaggcaggccagatccccttttgctgagagcttggagcgcatcccgtgcgcaggcgagactcgatgtagagctttccgcctgaagcggcggcgaaggatgtggtccttgtttcgatgcgggcgctagtccactgcccttcctcgccggtaccattgtttccggagaaacgcgggataatttgaagcgtgttctgtggcgttatgcgaatatttcgcggtgaggtggtgtacgattgcagctcattgtttccccatgctggggcgccgccgggataggaggttccagtgtcgaagagccagactgacgaggagggcaggtgtcctgagtctgagtccgaactggattgtgatgaagaggagaattcgtcatgccaagttagggtatatcctaggatgggaggcacgatttcggaatgtgaatcggagcctggacctgagccggggtctagcaaaccagggaggatatcatgaaggatgtcgggaaaatccgatacgccttgtacattagggttggcaagcgggactgcatttgcccttaaaagaagagggacgatagtgagtaatcgcctcatcataaaactgtgtatagcgagaatcatatactgactgccccaggtctacacaatcttccgtgcgaggtggggatccagtacttaagactgcaaaaggggcacacattctctaagcagcataatgatggcctggccatgtttgcttttgtgggactgcgtacctgcagtggtttgtccttacaggcgaccagggtcttttacgagcgccgatcaaatccagacacgatgatcatcggaatatactcagaatgattggtgtgacttgactttgagcccttgttcgatcaatcacagagccacacttcagactattctctgggcaactagtccagccccgtatatagacagtatagtattgcacacaatttcaaaaggtatgtacagacttaaatcagttaagagccgtaacattcccaatccactcatgcagcaccccagcaatgacatcggagttcttctccaggaactgcaaatgcgcatttccatggattccccacttgcccagctccaaatgctgcacgttgctcaccccggcttgcttcaaaaacttaataaagcagtagtcatacgtcgcgtgatacgacgcctcgccggtgtcaatgagaatcggcaccttggcaa

SEQ ID NO: 1381 - DNA, 1228 bp, Emericella nidulans
taccacttgctgcaacagtctcgcggagcacggcttatggctgggtaagataagagacctatcctgttaccccctattggtgaagctccatcttctaatcactgcgtattggattattagagtcatcatgaatgccaatatagcaggaatctacggagcacagatattccgctctgacgataagccgctttatcgacgtgggtttggcgttgccttaagggactgtgtgagttcaacaagctgtattcggttgcctgatgattattcgcgatgaaaagctgatatggaaatgtcaggtgaaagctcattctatgcaccagtgcacagggtgaggtcgctggctgctgagccgcgtgatatatatgcagcctagcagtgatgcccgaccccagaggacctaacccctcaatatactaagtaattaaggatcgtcaacaaggaagagaatcaatcgtcatatggcatccgatccttagtaggctacgtccgtgtagttgatacagcttccttctgccctttcccctctgagcattcacaacaaaagcaaactttggtgatattgatttatctctctgctttggttaattcaattcatatcttcgagttagccatgatcgaaacaaacttttaattttcataattgttacctgtgcggcagtattggtgagaagcagaggtagtgaaaaagtgaggaaacgtgcaggcagcgtactaccacccgttgggagcgtcatccattcagaaaagaataaccactatgtacgaaaattagacttagttatatttatttatttgtgaaaatagtcttccaagacatctcaaaaggcagacctcacccaacagccatgggtcatggagtcaagctcactctgtggggaaagcgacattataaatcctaccatgtctctatactctgatatccctcctcctactctcagtcatttacgccccccctgggtttaacggcctacttaagtttccctaggcagaggaatgtatgacacaagcagaggctcttgagtacaagtcgcacctttgctacgccaaccaacgggagaaatgttagaatgggccaattttgctctattatgcagtgacagacatgccaatctactgactgcggttatgacgctgcattacacaaaatagggtcggtatccaaaaaccaaagccttccttctggttgatcctagccttccaagaacttttccccttggattccgaacca

SEQ ID NO: 1382 - DNA, 2850 bp, Emericella nidulans
tgtatcgtccgaggcaaagaggtttgatgcggacgtggtgtcgagttgttgatcttcatgtatcgtacgggacgcatctgtggagccagcagtcaatgccaagatataatatttccaatctgaaaattcctccatctatccccaacttctgccagctctcccaagctcttctccatatccttcccagcttaccattccttgtctctacctcactgccctttgctatctctaattaggcaacatgtcatcgggagctgccaataaccctgaccccaacgcagataatgctctccttcgccgcccatatgacccaacaatacaagggactgctggccagtttctcaacaagttcaccatccctgtgtctggtttccaggatgagcagactggtcattcttacgctgtagtccgtctcactgccaagggtaaccgggctctgttttatctctgccacaacaatgtgcagagagaggtgtggcgatttccttcgtacgagttcgttgttcgtgttggcgctctcacggagaagcaagtaggcttacccccagttcggaccagactgctcacccttaccagttcagactgaccatggctaggtccgcactgcgcggccatcgtacgtcaatgccattttgattgcttcacgtggtatcaagactcgcgagccttgctctatgaacactcgctctgtctttggggagcatgtacgaatcccaggctattggaatggtgcttgtgctggttgcaaatggaaggatggcggggctcgttgtgacttttatgcagatcgtgagcccaagtacgtgccgctcagtgttgcggagctcccacgtgctccaattgaggagctagaggactgatcttgtgcgtacgatctggttctgccagtgtttgttcttctcttcgtgggctctgtgtcgggctggtcttctttctattgttcttgttgtaattcatagtcttgtacggccttagtttcttccagcgcatgggctggctcccatgtagggttagcccatccagtctatttaagcaggtactcccagcggtctcctcttcctatcttcttccaccgtttgtctagtacggagtggacatagtactcttcctcatcatccactaagatcggcggtagttgagagtcgtcctgtatttgcgaggggagatggtcgttatttgcaagtcgtacgagatcaacgtggaatactgggtgtattcctggtggggtattcaactggatgcctatcagctttgtgactctatattttgcatttttccagtccagtttgttgcagggtctctccgtacgaatattccggagattcagccatactttgtcaccaagcttgtaggttggtgctcgggctctttttttgtttgcctgactttcagcttcctgttgtgcataagctagagatgcttgtgtacagtccatggcttctttaatcatacgagcaatgttctctccaatctagatagggctctgattagcagattgttctggcaggttctcagtaaaattgaatagtgagaggtcgtagccatgagttagaaaaaggagacaccccaatagcagaacttgtacgggcatttttagccaattctgcaatagggataagcttatcccagtcttcctggtttatagcaaacgtacaagcggagatagattcatctgttcagtggctccgtctgtctggagatgaaaggctgttatcttgggaagttgttttggccatggattcaagaataacttctttttgttaaccagtcagtcagaactagaatcactgtacagccattgctacttggcaggtcagtaataaagtccaatttaatatgttgccatgggcgttctgggattggtagtggcttgagaagtcctgtctttggctctttccatgtttttgctcgtccacaggcgtcgcagttccgtatgaattggcgcaaatctttggacatattcagccagaagtaggctcggctcacgaccagataggtctgttctcgtccggagtggccggtcagagtagagtcgtggcccgtctggatcaggccgtacgcaatggctcgttgtggaggacccatctccgtcctcggaataggaggttatcttgtgcatcaacgttttctgattcttctggctcctctcaaatgttgtcacccatctgtgcagcagtcactgtcggacgtgggcgtaagggaggcaatagatcacatgctcggacgaggtgtccctcacttccgcagctgaggcatgttccttcctcacgacgtctttggagcttggagttggagacaaattgagctcgccggctggttgctagtagctcaggggcgttgttggacggtagcaacagtaggctctcaatccataggcccatcagtggtgattcgagcaggcgaaggttgataattgcggctcgtacgtgcccttgtcattcgcttcgcacgttgtaagtcacggttgactcgacgtaattggttgcaatagccgtcgtacgagtcagcttgttctctcccaccatggcttgaaggagtggcaggctgatagccgtttccaggagagacttcttctggtcatcatgccaatctatgccacctgcataatagggcttcgttgaactcgtccaggaactcatacaggtctctgttgttctggcgcatggtgttcattcgtacaagtgctctccgctgtcggtatgcatccaggtatgctttagccgttgtctccataaagccttcgttcgtgattgggggttggttggcttccatccaagaaagcccccacagactgccttcccatcaggaagcattggccttcgaagcactgtcagcatagcagtttccttc

SEQ ID NO: 1383 - DNA, 1470 bp, Emericella nidulans
tcccaaattttgactgtcatgtcatctgatgctgaagctagcaggcgcgagtcatggggaatacaactgatctgacccaattatcatgactttcaaggttgttttggagaggaactattgctgtatcccaaatcttgactgtcatgtcatctgatgtgaagcaataaggcgggagtcgtgggagaatacaactgatcggacccaatcattgtgaccttcgagcgtgcgctggagggaacccgttgctgcatgccagatcttgacagttctgtcatctgatgctgaggcaagaaggcgcgagtcgggggagaatgaaactgagttgacacaatcatcgtgaccttcgaggacgttttggagagaacctgttcttgtatcccagatcttgacatttccgccatctgatgcagaagctagacggcgcgaatcatgagcgaatgaaactgccataacactatcttcatgatcctcaaaggtgtgtcgaagaagacccgtggttgtttcccagatcctgactgtcctgtcatttgacccagaagctataaggcgcgagtcatgggagaatacaactgatctgaccgaatcattgtgacctttgagcatgcgctggagagtacccgttgctgtatcccagatcttaacagttccgtcatctgatgctgaggctagaagacgtgagtcatgggagaatacaaccgatttgacccattcattgtgaccttcgagcgtgttttggagaaaacttgttgctgtatcccagatcttaacagttccgtcacctgaagcagaagctagaaggcgcgaatcgtgagagaatgaaactgagccgaccgcgcgatcgtggccttctagcgtctgtaagcatagactccaatggctttccacaatgggtccagtttctatccaatccggtgtctccttcgcaaacagcttacgtactaaactgagccggactgaataataaagctgatgcgtacacctggagtggagcacactttattccagatatgttccaaagagcaaaccgatttgaggtctccacgacgtctaataaatcgatatcaggagatcttttctattattgtcagccacagtttgatactggggacttaaaatgatacttacttcgatgaaacgctttacctctgctcgacgataatgcggacgccggtattgtattaggcctagcccccgagcccagagagttatggccttcgagggaggtgccaactaacttgcaacaatagggtccaatctgtttttagggcaaggggctttccaaaatacccaaaaaggttgatcggtgcaccgaatttgccggcccccggggtgttttggtgggaactttcttaattaaacccgtattaaatgctcttccttatggggaaaatattgtgcctctaaaccgggagaggtggtaataaatattttcccgccaaattttttggcaccttatataatctggggggc

SEQ ID NO: 1384 - DNA, 1958 bp, Emericella nidulans
atctaaatgagttttcctactattgtactcttatataaaggattcatgacgtgacaaagaaaccggttaaccctgtgcctgttgtagggttcggggtgaaatggtttccaacaactttcctccattctctagaggcttacaaaatagtaaaacatatgtggttaatggagtgtctctgaatctgacgcctccaaggtccttatttgccccagtagcctgccgagctcctaacccaacagctgatgacatcttgcctaagattatacactattgaggttagaagacacggctgaaagaccgcttgtgtagagattatcggcactcaaccagttcgatagtatcacgattgctggatgacaagccgttcctcgttcgcgatcgctttgcctcgtagcccgacagctcgcttccaaagtatgcgaatgatacgcagtccgcgtacaacaagcagcagagctttggctgctctgcgtgccgtcctatggcgatgccttatcaagcaccgtcaagacatagtaaccttcgctgcaaggcaaagaagtgcggcaagagtctcaacggcagatccaaaacaagctcgcactcccgaagaaggggtccttaagcgacactggccatgggatacctctcggtatgctccagtagctggtaaaccctgacgtgatgtgaagcttgcagattggagagcctctgccccaggcggccgcttagttattagaggccgactcacctgttatggtagagttgacgaactgggtacagcaacagttagagatcgaggcagtgtcttagagaccggagctgctagggcacgcattatgcgaaactcttctgtcaagttggcttgataggacactttctaatggggtccagtcgcccaaagccctacttcttgaggacttactatcgactatttcaaactgtagaagtatgcatgtagtcttatagattaattgatactgagtgttcctgaattcagtgcccgtggactcttaatccgccggcggtatatacacgtcgaattctttctcacaaaaatgccctcctccaatcactgcctttctaagaagaccactttgctcccgtactccgtatcaaatgtgtactgcagacccaggttcataagggtcgcaccagtatatgtcttatccccatcgacagtgtagctcgcctccggatcaaggccctggagcctgacccagggcgctgcgtgattgacgtttggcgacagctggaagtagaagagtacagcctggcttccatcttcagccacaaacagtgccgccggccactggctctcctcaggcaaacgcaggcggtagagatccccgttcaggaccagaggattcaccttctctgccatttgaataagttcagggacgtctggatcatcctgaagtgtggcgggatccaactccagtccgaacgacccgcccatcattgcgacgtgcgctctgaactccagtggcaccgtgcggcccgtctggtgattcgggacggcggagagatgtgcacccatggcggaaggtggataggccagactcgtgccgaattggatagtgactcggtccacgccgtcggtgttatccgacgtccagatttgcgggaagtaatgcaaaacacccgcgtcgaagcggcccccaccagaggcacatccctcccatagcacatcggggaatcgcgctgtcaaggtgtcaaagactcggtatacacccagcatatactcgtggtcggtactaggagacggggcctcgtggatgccgcggttgttatcccacttgatgtaggagatgtccgcgctgttgagcaagtctgtcatgaaatcgatgatatattcttggacttcggggagcgccaggttcaagacgagctggttgcgtctctccgtgcgtgcgtaggcgccacggtgcagggcccagtcggggtgctcccggtagaggctcgagttagggttgaca

SEQ ID NO: 1385 - DNA, 1530 bp, Emericella nidulans
atgtcgggaagaacgggtaagtttacagtactccgtggtctcggttctatggagatgggagtaggtacgaaggatgagggctctgctgattgatggttgatcttagtcgcggcgaggttgttagggtcaaggcgcatgggggtccgattgatattgaaggaattgtggtggccaaggtaaacgagaagctgcagctcgagaagatagatgtttggtttgatccgatggagatgttcaggcaaatttcacgggatgagcaacgtgaggaactgagtcgaggcgattctgctgccgctgcgcctggagatcttgctggtgcttgtccggtcatgcgggctggcaatgaataagtaacagagatgtggtgactgcagaaacgtttgtgtctatcttcgataaattcctgtttgatccggaagaatatgtaagtacatgctaggtgcattcctaataaaaataggaaggagtatgtaacccaagaaccaatttccagtatgagtatagggcttctgggcttagcctaaaacgccagtgtatgccgatattcccatatctcaaacaatgtttcaaaccatacctcattatattaattcaaacatgcacaacatgagcgagtttgaagtgagcttgcatctttaaagtcatgcacgcaccgcctgaaactaaatgttcataatatgagctttgggcactgaaccaatggaacttgtattagatccatactgatggttcgcaagaggaaatccaatggaaggtcacaggactccacaagtcagactgtactaatatgaagctcagaagactcaagatccaagtgcaatcacgtatagaccagaggcaggtataaccctacagtaaacgtcgcccagccacccagctgcaaagttgtggtcgagatcaaccatctgcgccgatattatgatacacagaatgtatacaagacctcatccagattacttcttcgcagtgaacagtcttcaacctaaatccggggcctggtccgcggcgcctctacagtattccttccagtcccggcacaagacgggtgcttccaggctcataaacgacgtcgttgcgaggagaagagaaggttttcgattaatttggagaaggggaattcgcgaagctgaatcgctcgaacgacttgacagcattatgaggcatattgcttcagtttcgtcgagacctcgtaaccctgtattagtggaggatgcctgccatagtacgtgtactgtgacctgcctcagtatcgcccaagtatcaggagatattggtgctcttccacgtggttgctttgcttcggatatcagcctctgtagatggagcgccagaaggctgttcttttaccttgacaatctcaacaggatgagttacaatagtctcgctgggtatgttgagagacaagaccgcggtaacgtttgcatcaggtgatcgtggagggtgtgatagttttagcgctccacattgatggcacaggcgtagagcacaggatggtgctcttgtattgaccagttgttacggtactgatct

SEQ ID NO: 1386 - DNA, 647 bp, Emericella nidulans
tttggtttctggagcctactcgtactgaggaaccatgcctcaagcacccaagccggcgactactgagtagagtcaccttactctcaatactaggtcacgtcttgatttgctcttatcaatatttgcccgagtcaattaagataagaaaacaatagatagcttcagcgcctccaacttatcagcacggcgagcggggcactgtatggatgccgatgcgttaaagtcggtccttgcccttattatatagccccttttcaccctcgagctcaaccaacgtccgtttagctgcatattctggtcccagtgaggcagaatgacagcaacgcgacacgtagcccgcccgatcccagccatccctctcgccaacttcaactcccgcatcgacgagatcacccgcgagcttgtctccgcctgagaacgtcggactctttactatcaccgaccatggcatctcgaacgagcagataaaatccatgttcgctctcgctgagtcttttttcccactacccgattccgtcaaagcaacggtcccctggaaccccaacaacgtcggctgggagaagaagggccaggtccggccgtggaatgagaaaacccgaccagaaggagtcatacaagctgcagtttgcgcagaatgggacggtctg

SEQ ID NO: 1387 - DNA, 3233 bp, Emericella nidulans
gcttcgaatgcgacttgtcgttcttgctgctcgatgccgattcttgggatttcaatcgggaatattctttatatttggcagctggattggggcgccgttagtggtcttatagacgtgaagcaggctctgaacgcgcaatgcgacgtaccaatttcaggaactttcttgatgtctcctcgttctgccttcttgcctccattggcggctgcaaatccccgctcccactccttcagttcggcgcgcaggatagccgcttggtttgagatctctgacacggtaacagtggccatcacggcatattggatcaccgatgtaaagtgaggagatgaatttaatcgtaatttgaattaggtgaatggcaaagggtggtggtggcagtaagagttcttctgatattcgtcgcgtggaaatcaattaacgcgtgacgcggtgcggctgcagcacaaccgcgggctgccaaacggacgctccctacaccccacgttgtgggctgtacaatctcctccgtacacagaggacttattcctttgcttagagactcgaaaaattaaattgccacgaacataaagccatgccaaagcaagaaaagtttgtttcgctgagggttgcgaatcttggctactgggctgttatatatttcatctaccatgcgggctaacaacaatggaacccattaaatgcaccattagtctgaatttgagacaagaaacaggctcaactatatttcgactgtcgctcaagagctgcaactcctccgcagatgcagctatcatctacaatgtgtccttttgggtattcccacctgattacttcactacgcgacttccgttcaggtcggatgaaacgatatgggcttgaaccgctgtgacaaggttgaggaaacctcccattcaagcagcatgcgtattgtgcattgctcaatctatcagcgctcatatcagcaagcaccgtgggaacgccctcggatagagcaacttgaaacgacgctcgacgttatatcctccatataccaggaccgtaatatgttcaaaggtatgttcagagagaatgtcgaacagcatgaactctacactggaattcctcgatatactggcaaaaccaccaggatagccaaccgacgtcgtgaccagaatgacgttctcatctctcaatgctttaagaacagacaagatcaccccgtggatcgttatgagccgagcctgaagggatgacgactattgcttcttgtgctctcctctattgagtacgacctccttccaccatttgaggagtatgcggctctcctcccgtcttttcccacggtgggtaaagcttcgataaacctgacgtactgacaagttacttgggggtacccaagcccggtattccacgtggttgagtacagatctccattcgctgaggctggttatgaatgggacagcttgccacaggaagctccgattgcgctgattgctgcttcgaagtctcttgtatggcatcagactagaagagctccttccaaaggaagtttcgcggtaaagagtcgagtcgaaagacatatccgtaataaaacaccatgctcgcgagcggtacaagcgaattcccggtgctgatgactttcccgggccgtattccatttggtgcactgatacgtcgtaatcaaggcatcgagaccggtggctcgatatacataatagccttttccttctccttgcgaggggtcagaagagcctgaagacatttgcgctggtcctgtagtggccaaggagggaggtactcaacttctagactgctgatcagggctcacaaccataggctcgacaatggacagctttacggtgcgcatgttaccctgtgaaagttagctgccgtgggagctgtttctgccgagatatcgcacgaataagaccaattggttagaagaaatcttgggtaccatcctcttgagaaatgttaagcaggttacattcttatggcgggtgacatcgtttctttggtaagttatagtgtggctgaaaagaaagtacaccatgggcttggggctattttgatgaaagctcgccacgtctgcatccagttcagtcgttaatacatatctgcacttgacagattactttattggaagtagatctatcattttgttccttgacacctttcgaaagcgacatgtgcaaagggcctagtactactccagatgaatcctagtactgaagaacagctgctcttgttagagatgtttgtagatgtttgtacaacagtaatcaagctaccatttacacctttcctgctgagatagatatcagaagtgacgccaatcagctaggcgtctgaatctcaactacaaatacgagatgtctgcacaattgcaaaggccacgacaaggaggtttttagcctaactatctcgtttaggccatcagcaattgccttaatcagcttgtcatatgccctctcctgtattccagatccttcttcatcagatcgacgaactggtacgcagcattactggtagaggagatctacatgcacagctaccagctgcacaagaagaatagtgagctgccgctcggtgcaacttcaatagcctttcctggcgtgtatgttgagacctaagcctctatactcaggtgaaatatatgaactggcacagcagtgtttcaatgctccagtccgccatgaccgtgattcactctgcgcgcgaacgtccgcaaagacgttgtgtttgagtgagccagccggcgtatcccgagtacggtatccagcattgaattataggagaccccgacggaatattctgacgcttaagtcttctgaggcagcgctagaatggtctgaccaagagatccttgacaatattgcagcgttcttagcgcttctaatgaccacacctacaggacagtcagcgcatgtcacaaacgtactgtcaagatccaggcaatttgactactagcttgcgttagacatatgagccgtctttgctctgtgaactcattggacatgatgtagtcgtcaggcctgcactctgttatccatattgcgtatcaagtcatccgccggcttgctttggccgcctccctggctaggaatacctggtaattcttaaacaacactgggtgcagccagtgctttgtccagcactaaatatggcacttcaagctggaaatgagcattctagcaccgctgctgggtttacaagaaactcggtcgagatcctagtattctatagtgtcacctaaatcgtatgtgtatatcata

SEQ ID NO: 1388 - DNA, 5266 bp, Emericella nidulans
aacacctggaacgaggccttttaacgtgattcttgggactatttttaatttctccatttttcaggctccaccgaggctcaaggtacaggtgaccaagggaattgggcaaaagaagaccgcattctgcagctggtcaagtggatttattggatggccatcttttattgaaacattattactgccttttgctggggatagtctgtcactggaggaccaagcgatcagccaactccaggtcggcattgcatctcagctggcaaaactcgctcccggattagctgacgaggacgaagacatgccggaatcagccgaggacgatgaggaggaggacgagtttgagatgctccgcgcgaagaagcgcgaagaacagaaggccgctgaggcctggcacgtcgccatttctgcatcgccggccacggctggaatcatatttaaatattcccgcaacatattctctggcaaaccagccaccgatgctgctctctctcagtggagctctgagaagcactactcattgccaccagcgaacgagccgcgctccgtacggcttgaaattactagtaccgttgatatgaacctgtcgcttagatggagtgtgcacggttctcgacaggttagcgaattgacccgcgtgggcttcggagtcagtttacaacctcagggcctaataatgtcgctttcctgggccaggcttgggcagagaataagacttccaattgccatttgcccgattgatagtgtcaatgcggactcggccactctggcagttctcctcccgtggttaacatactgcgcggttgagtttggatttatacggcccagggaacgacggaatcgccggaagctaattgctaaacgacagaagaaactcaggaaacttgttcctcagaagaggttggaaagcacacaagccatcgaactcatggcagatcaagtgcggcgacggcaggataaggagtacagtagagggggtcttgtcattaccaaagcagaatacgggcattatccttcaaagcggaatgccgacaaaggcgccaaggagcccgaggtgacagatgttactatccctgtggctgcgttggtggatcatggccagctcatcatctctaagaagacggctaaggtgcgtttttaccactttctctccagttcttgactcttgtcagaatactgactttcagacagttccagattcttggcttccatgacccggcgcctctactgccgaaaacactgaagatatggtaccaataccatgggaaagaacattatgccgaggccacggatgcagagggcgtcacttgccccatgcgctctcatctgcttgcggcttgaagcctttgggagaaattaaaccagtcttgcttgcccaagactacgcatatcggctgggtacagcgacctctgtataagatctcctctacaatacggctattaggcaaactcctctcctctttgtatcatctgcttcgattttggaccatatactcgtcactgtgggagatttgaagttttttttagatgtattagcgacctgttcttgcatagatataatgttttgagacatcgacgatatacctctttcttgctcgctcaataacatcgtatacacttagttattccagtcggtcgatcagatctatgcacgaccctagcgggcacaaagccctcccgtcaggatgttatctaatcgtagggtgcgcgggtgagaccattcgcgcacccgaccgccccccaatgaaaaaagcatcgagcagtcgtcattccatcgaaagaagttccttttacctctcacccagttttcataatcttatatccacaatgacatccattgcggagggactcttcaaatcgctaccgaaaccaaaatacacaggtgaagaagaggagttgccacagcatggccagcgaggaccgcgcatagtcgggccgggccagcttgacgatacacagattgttctccgagtcagtatccgcctattgttcttgctaagttacagtgctaatacttgctgctaacagaggaccggtccgcctccgtacggcaaccgagcaggatggcgtcctcgagcgcccgaagatttcggcgacggtggcgcgttccccgagattctcgttgcgcagtaccccctagacatgggccggaagggaacgcaatcaaaatcgaatgcgcttgctgtgcaagtagacgcggaaggaaaggtcaagtatgacgctatcgcacgccgcggacacagcgacgaccggatcgtacacgcttcgttcaaggatttaatccctctccgacaacgggtggatatgggcgaggtatctctggacaggccgtcggaggaagaggttcaggcgcagatggagaagacaaaaaacgcgcttgctagcttggtgtcgggggctgtggctgcacagaagcctaagaacgtgaagggtggtagccgggcagagcccacgtttgtacgatacacgccggcaaatcaaatgggtgatacaagtcggaaaaatgatcggattatgaaaattgtcgagcgccagcaagaccctatggagcctccgaagttcaagcacaagaagatcccgcgtggaccaccgtcgcctcctccgccgattatgcactcgccgccgcgtaaactgacggcggaggatcaggaagcttggaagattccgcctcctgtgtcgaattggaagaatcctaagggttatacggtgccgttggacaagcggttggctgctgatggacgcgggctacaggatgtttcgattaatgataagtttgcgcagtttgcggaagcactatttacggctgatcgacatgcccgtgaggaggtccgactccgcgcccagatgcaacagaggttggcggagaaggagaaggcacagaaggaagagcatctccgtgctctagcccagaaggcacgcgaagagagaagcagagcgcagtctcgtgcctcacactccccaagccgcggccgtagccgtagccgcagctactccgatgcgtcatcgcgatcccgcacacccagcgaagacgaagaagccgcccgagagcgtgaacgcatccgtcgtgaacgacgtcaagacgccgaacgccagctccgtcaatcacgcatgggcaccgagcgacgtattcaagcaatggcccgcgaacaaaatcgcgacatttcagaaaaggtagccctcggtctagcaaagccaacgcagtcgtccgaaaccatgtgggattcccgcctcttcaaccagaccagcgggctgagcaccggattcaacgaagacaacccctacgacaagccgctgtttgccgcgcaggacgccataaacagcatctaccgtcccaagccgcaggccgactttgatgacgaggccgacgcggagggcgaaatgagcaagattcagaaatcgaaccgctttgaggtcctggggagggctaaggagggatttaggggtgctgcagatgcagaggttggtttgctcctctctcttaatgacaacttcctatcaccacagaacaagcgcttatcatttcgtgtctacaggaacgaagcggcccggtccagttcgaaaaggatacagccgacccctttggcatcgacagcatgattgcggatgtcactgggggtgctggcggagcaggtcaaaagcgctacggtatccaggaagctgagcctgattctaggggttcgaaacgggcgagggttgatgaagagaattagattagtgtttacttgcgatctacctgcatagctggtggtttacatacatagggtttccacagtactttttcatcttgtctcataaatgggaggatactctaacggtcaggccaatgttggtgtgggaactaatacccgattgaataaatatcaaaatcaatatcagatataatctaacaaacgacatcctgtatgctgcggacacttggcgtcggtagtgtcagatgtcgtcgctgccactggtcaatgaacttcgcactcggaattcgcctcgccttgcatgcatgggttgagtttactgtacagagattaggcgcgttcccgtctgccgtccggcatggtctttgcattagtctagtttcgaaaggcaccgttgcaggatttatcagacagatagaagatcccccattggcgctgccacctcgatagggacaccatattgcgcatgcccagtttgataatgacttttctttctgcgggtctggtgagcttgtgtggcatgcgacgggaggtttgcagatcgaggtgacaaaagttcactgcgtggcgcggtaggtaccttttatgatgtgaggacgtcctgaagctccctcgtatttttactgccctcatcctctttttatacgagcaatgtagaactgtgagagaatctaggtaatcgggtcttactctgacccaccaattcagcttttcccaagagttgcagtactacgtagtacgtgccttaggacatgttggagataggttccaacaccagaatacctaaaggaaaatctcctagatattcggggactatcaattcattttttgggttgcatagggtaattcgttaccgtcggtctaggcatctctttttatcatccggctgcatgcagtgggcgggagctgcaggtatggtgccggtcatgcccgtcggatacttcgaactagatatgtagacactgatatgtagacagcagagtaggtataacgatgcccattatctgaaaacgggacgtgaagctgttggttgatcgcagggcttatgaaatgcaaagggaaaatgtattaatcccaaagaatctttctgcatgaatactcatatactatcgtgaattatgaactagaaacgtgatcagctttagcccgatagggcagggtcagcaggtaacaccctcgtaggcgcaaaggctgagctgagccaggaagccacagtgcgaagaaggaacctttgaatggttgatcctgggtcgtttcgatgattgacttcaaaacccatgtcgaggatcagggcgcctcctcatcctggtactatggcgtacattttttgggatgcactacaaggactgtcatccaacagcttgactgattggacggcgagcgaacgacaggatggtcacttgtttgctagtttgcctgggttatgggtgaagcaggagtgaatcccgtggtcaagggcagaggagaagttcgcccaccagccagggtctggaatttgcaacacctagggcacaagcctggctctcagatcactttcgaacaaggtcatgagagatccaggcctccaaggtttcctgggtttt

SEQ ID NO: 1389 - DNA, 1344 bp, Emericella nidulans
tgcagcatgatagaggttcctctggcacaatcatcggcagaacttaacttttcaggatgatggctcaacccatccttgcacggaacaaagatcatgctagtcggaaccctctttgaggtaaacacgctatcatgcccagcaccactcataattgttctgacgagagacttcgggtccgcaacaccagcatcagccgtgaccgcctccgcagactgctgcacacactcgatgcaatcagggtggaagttgacggcgggcgaatcgaagtccaacgtccactccacacggcaaggcttgccgatgccctttccttcctctgcagcaattgcgtcaaaatccttgcgcagctgggcttcaacgacctcgacaagttcggtcttcggaccccggagatcgagactaaagcttacggtgccgggaacggtatttacgctgccgggtttggcttcaatgatgcccacgcttgccaagcagccttgcgaggcggcaacttcgcgggcgcgcaccatcatgcgcgcgaacgcatagagcgcgtcggcgcggtgctcaaatgcagtggtgcctgtgtgcgtgtccctgccgaagatgttaaggcggaaccaccggtatgcttggacagctgttacgacgccgatctgctggcctgcagtgatcagatgaggaccttgttcgatgtgcagctcaaagtgggcggccatgggagtctctttgtatgagcacggaacgcttcctagatagtcgatcttctcgagtgctgacttcatggactccggagcaggaggctggcaggatggaggggagggcgacaggaaggcacttctttataccccatgtgctttctcaggaggaatgcattctgcccatactccagaggagaccatactgatagggaaccgggcgccctcctcgctgcagacatatgagccatgttcgcagtagcaatttgagatggctatgctaagtacaactcacttacttcaaggggtcagttttacaacacgagcttttgtcggttcatatagcgttactgatgcaaatcccgtttggttctttttgctccctttatttgatttgctttaagctccttctcttcgctttttctatctcttgtttatcccttacatctttctttctgttgctttctccttcattctctacctctctattcaaattctttcttttttttttctcaaactttatctccacatcatcttactcatctatttttctatttcattactttttttttatctctatcttttctttcttttttcatccccctcttctctctagttatatctttcttcttttattcatctatcacatttttctttctacatttga

SEQ ID NO: 1390 - DNA, 991 bp, Emericella nidulans
ttatctctatatattagttaatatacccccccccctaattctcactaactataagactttttaagagagataattatactgcaagtagaagctgtgctaggtagaaaatagttaatatttatagagaaagaccatgctgacctatattaataatctatttctttaatattcaccccctcacacctattaattctctataattagcaactaagtcttctaggaagctgttctattaagccaggttattaaagttcttaataacatgtcaaatacctttgcagcagcagtttttgatttaaaaggcctgatttataagtattaatagctagctttatatacacttcttttaaaagctcagccattattttgtgattaaataataaactagtaaaggggtagctatattatttggcagtaactgcacagctcagtagtagattatattaactattctagattattaatctttaagaatttaaggtatttatcttagatactatagatatagtacagctggctttacaagtaagataaaggattatcctatttattttatagtaatttttttaagcttttaataaatttagctgttacagaatcttcttcaagctctttattaaggtcaggaatctgctattttaaattagtattctctgcttctaggactgctattatatagcaaagagctttatagctttataaatactagttaaaaatatagttataagccttttatatatacttctactccttgttatatctagtaatctgcttgtagttaagctttttatattagacaggttctttaatattctaggggcgaattagagatataagtagttatataaatatattatagttaatttagctattttaggagtttaagtagttctagttttaattcaagctttagtttaggattttgagtattatattatattattaagcttcctgccagggccgccaagtcaggatttaagaaacttaaaaa

SEQ ID NO: 1391 - DNA, 641 bp, Emericella nidulans
tatgtatatacacatacgatttaggtgacactatagaatactaggatcttggtcatccagctgacgcgaataaaggagaatttctcgccccgcacaagcgcgatgatgcgacccaggtacatgtagatactcgcggcgaaaagcgcgggtgcaaccaacagcagcacgctctgcattatataaggccccagcgtccagtcaggtgtctgggcagatgatatcgctcggccgatatatcctataaactcaactgctccagttagagagtgcttgacagaacactgggagggcgctgacagtatcctccgagcaccatcggtatgaaaaaccgcgtcctcgtccggaagaggtagtaactatgaattcctgtcacgatgccgtagagaacgatgaaaatggcggccgctgccgtggaggggtcatagaggtaggctttccagccctcgaaaccgcccgacatcttggacgtttagtatatacagccggtaaagaaaatggcagaattgaaagaacctgactattgaatcgttccgagattgactctttataattgcgttccacttcgttgctactccgtctcgtctccatagtagaacgtaacacctcgtacttcgtaactttatccgaattcggtataatta

SEQ ID NO: 1392 - DNA, 1262 bp, Emericella nidulans
ggagggggattccttggggtggggttacgcaagtccgggaatttaggtattgtggattcctgcccggattgttggtttcatgttttagccttgttgtggaagagggtttccggtttgtggggttcgggttattgtaaagggggttaatgggattcgagtcttggaacagcgatttagaaagcattgtattgaaggggagaggtgatttagtgtttgctcttgggtgtgggtatgcgattaggagaaagagtgattgtaattagtggaaggcgctaagttcttgcaagtttgcttaaaggatccccgccgtggttagggaagatatatatatatatatattaacaaaggagtagtagctagcttggcgggggatggacgccttatgatgtaaatctttgaagcagcgtgaacgatgtttgtagataacccaagacctcagaatatggcgacacgacggccgaattctctcacagaaatcttcctctaagctgccatactcatttaattatcttctcctgagagttggtatacctgtccatctgcaccatgaaactattcttgaatgcgtggacattattaacggccaaccccaagtgcgttgccgggccagctcaactacaattactttcgtttacaccatccatgaacgcaaacccaaataaacagctgtcgacttcttggataactgtctcgattgactataatagtgacttcagttgtttatttgtttatagtacaagtaccataaacaatccttgcttgatcatttctctgtagcggagttagggcaagcatgtcttgttcgggtaattgcgacactgttagcccggatctacccgttctgatttaagcttccagagtccataggcagaacccactaagctctttgctgcctgcacccactctgtataaagtcgtcgtttctgtatgtcacttcagcaacgtgcaagatggccggtatcacctcactccctaccgaaatcatcaggcacattttctcctatgccgaccaagaatcacaaaaagcgctccggctgacaacccgccggttaggggccatcggtcaacagagcgtctttcagaccctcagcgtctgtcccacagaggggagctacggccgcctggagagcattctcagaagggcggatctcgttccatatatcaataagatatatctgaatacgtatgatccacgaaatgtgacttatttaaccctgttctacaaggacaatgactaatgccagcatagcctcctgaatctc

SEQ ID NO: 1393 - DNA, 1866 bp, Emericella nidulans
taatatgaaaaaatagaagataatataagaaaattatagattaaaaaatgattattattaagtaacatataaaaaaaaatatagaatattataaaaaaaagaaaagtaaaaaagaagataataagaaagattaatagctaaagaaaatataaaaaataaataaaataaaaattaacgggagttaggtggagtatattttagcaggaacaattaaatgtgatcgtcagagctatgtctcggtaggactgttttttggcctttattggcagttaagttgcatattggaccatctgagatttggatgggagtgtgcgatgtactcaggccagccagagtagttagaaagcgggcctccgcctaacgtccatcttgttcacaatcatcacgatttcagaccacgagttcatccacagaacatggctctccccaaactcgccattctcgacgactaccaaggcatcgcgggcccgcacttcgcccacctcgaaaacagagtcgcgatcacacacttcccgcagaccctcgaccctcgcaatgcagcccagcagtctgaattggtgaaccgactccgcgattacgagatcatcctcgctatgcgcgaacgaacgcccctcagcagagagacgctctcgcagctcccgaatctgaaactgcttctcactacaggcacgcggaaccgcgccatcgatactgcctactgcgccgagcggggtattcctgtcgcgggcaccgaaacgcgcgggcccggcgtgcactctacggttcagcatacatgggctctgatcctggcgctcgcgcgccacgtcgcgagagatgatgcggcgctgaagagcgatcgagactactggcagggatcgctgggaatgacgttatcggggaaaacgctgggtctagtggggttgggaaagctgggctcggccgttggacgcattgcgatcgtggcatttggtatgaaagtgattgcatggtcggcgaacctgacccaggagaaggccgacgagcaggcagaggctgccgggctcgagaaaggcagttttgtctgcgttgaagacaagcaggagtttttcgcacgggcggatgtggtgagtgtgcattatgtgctgtcggagcggagccggggcgtcgtcgggacgcccgagctacggcggatgaagaagcatgccttgctggtcaataccagccgcgggccgctgatcgatcaggccgcgctgctggactgcgtcgaacacggcgggattggaggcgttgcattggacgtcttcgagacggagccgcttccggcggacagcgtatggcgggggagacagtgggggaccgacggacggagcgaagtgctcctgacgccgcatatgggatacggtgacgagcagatccacggatggtatgactaggtaaattccatccaaaaggcctggctgaaaggccagggtcctaataaggggtttttatgtacctattttccgattggaacacacatcctcggcccttttttttaaggttctccggcctttaatgtaatgccccaaagtttaacacacgagtggggggttgggtccccccttgcccctttccccccttttcttccaacaaaccttattcaatccaggtgaccgtttgaaatcaacgaaagttgatgggggaggctacaactataccctagttggggacaatggaatacctgccaagagatgccgattgtccgcacctcgtggttgattgggaacgggtccaacgggggtctttcccctcaagggtagtttttgtccctttgaaccttgccaaattcccacctgtttgccccccggcttttttttccagggggaggccccgggtttcccccgattagagttttcaagtccaggcccc

SEQ ID NO: 1394 - DNA, 3573 bp, Emericella nidulans
caatagaaaagttgtcttgttcaccactccacttcctacaatgcttgataatgagatcctgctatcagctggagataagacgtgatccatatcggaatatgccggatcaatatttctccgatcacgtttcccgtacaatggtgcagagccaatcgtcctgtaatggcgtggcgaaaaactcaatgtgagtgattcagtcggcatatctagaggctgctgaaggttgctcaatcccatcaccaggatggaccttgcttcagcgccccgtggggagagcccgccgttgaaggctccgctggtggagatagaagccgcggaggtggaaagaagcctcccgcaagagaacgccgctccggaggaaaagggttcaaactcgcagtccgagtacgagtctgacagcgatgcgctggatgatgagtgggagactcagtccctttacgaggatgccatccagatgattcgcgatgaccaacttcgcgacggaagtaagtagccagacatatgccctagccgaagcccaaatcactggctgaccacgtaccttgaattagcaatacccggagcttgtaccctagaggaggctattgagtttcggaagaggctgcatgaagttggcaaagcgcaatttgtggaggagacgattgctcgcgacacggtgaccgcgaagaagctttgtactgcctttgggattcttcctccatcttttctcgaaggtgcaccggacgaggcttatcatccgttacttgcgatcgccatctctcgggagttcgcgagacgtcaaaaattgccacaatacaactcggttgatgatgccgtaaaacttctcaaggagtcaaagaatattattgtcctgacgggtgcaggtgtaagtgcggcgcttaacttctgaagtatcctatgtactgatggcagcagatttcaacgagtcttggaattccggactttagatccaaggacactggcctttactcaaagctggaaaatcttggcttaaatgatcctcaagaagtctttgatattcgcatcttccgcgaggacccgggtattttttattcgattgcgaaggatatccttccgactgagaagaagttttcaccaactcatgggtttatccggttgcttcaggataaaggaaaactgcttaccaactacacccaaaatatcgacaatatcgaggccaacgcaggcgtgttccctgaaaacattgtacagtgccacggctcttttgccacagccacttgtgtcaaatgtcagtataaggttgctggggacgaaatttacgatgatataaaaaaaggtttgattcctgaatgcgcacagtgtcgcaagcgcattgccgaagattcgcagaaaccacaaggacagaagcggaagcgcaacagcactagtgctcacaaggatagaagcaaaagtggagaagacagctctgatggggaggactacgagataccaacgccaggggtaatgaaggttagtagacgaaaccggttttacttctggtccggtcactaaatgactcgctcagccggacatcactttctttggagaagatctccccgacgagtttgggcgccgtctcctgcaccatgaccgagacaaggtggacttggtcattgtcattgggacgtctctgaaagttgcaccggtttcggaggttccaggcgtgctgccacctcacatacctcaaatatacatatcccgtaccgtacgtctcagactacagtgctatggattgtgctgctaacttcccacacagcctgtagcacatacgaactttgatatcgatttgttaggcgactgcgatgtagtggtgtccgagctctgccgtagggccggatgggaattgaagcatgagatgatatccccagacgaaaaggtcgatgtcactccagttttcggatacggatcacgacatgtattcaaggttagcggatagcatagcggtggagtttctggtcagacggttcttgcgcttggtctgtctttactgaggatggcgtcatgttatgatatttttgaaggctggaagagtgcttggctatgataatccttttcattttattttgattttctaatgatgtcgagagattcccatgtaagtatgccgaaaggatatagggcatttacgtgtatgttatagaacgattgtggttgcgcgaacataccaatttctccgacattgaacttgcttctctcaacttaaattctttctgattcactcgaatattggtaggcgtgtgtctcgatgttggtaattctaagcccgtctccctggtgtacgtcccagttttattctttggggagaaaaaaatctcattccaacctccatctcacctagcgccacatccttgcccaacagatcacagtacaagtcataccacgattcttgctggttttctctcacaggatattattccagctaccagctcaggactctaagcgctgcaccaaggatggagtaccttatccgcttcgctcaaacccatgaaaccttccgacaaccggaacttcaggcactggccaacttacacaatattgaacttgaaatccttcattatgaccagatagtaagtgtttgtcttctcgatttttccgaggtcacaaaagcgcttttcttagctgagtgcggggctatactgaaatacccctctcttaacactgggaaggataaaatcatgaactaatactttccagtctccgtactgcatcgtccggcttgcaaatgaagaaactgcgcgtattctcatttctcgcagcattctagcaagggacatcttcgagctctggggccacggtactacctatgaggccctgcatgccgacgtccgcaggcggacgcagcacctctggaagcaatacaagcaagcatccttcaaatttaacgtggaaagcttcgccggcaagcgtagctcggcccaaaagacagagatcatccagtcgttctcgtatttgggctttgagggtcccatctcaatgaaaaatgctgaggaagacttttgggtcatggagcagtactacgatcgcacgcataaccctaccgctgctactggtatgtcgcagcatccactgccgtccaagctggattcggctcctgtgaacatttacctggcgcgcaagcttgcggagagtagtcgtgaggtagtgaataagtatgatttaaagaagcgacgctatatcagtaccacatctatggatgcggagctgagcctgattactgccaatatggctaatgcggcgccgggaaaattattctatgatcccttcgtcggtacgggcagtttctgtgttgcagcggcgcatttcggagcaatcacgttaggctctgatattgatggacggagcttccgtgggaaggagatgcataagtggaagatgacgggagtacagttgaacttccagcagtacggtatcagcagcaaatttggcgattgtttcacttcagacttgaccaatacgccgttattgggcaagcagtttctagatgggattgtctgcgatacaccttatggtgttcgtcagggtctacgggtacttggatcctagtattctatagtgtcacataaatcgcatgtg

SEQ ID NO: 1395 - DNA, 4165 bp, Emericella nidulans
gagtctcacgcttgactggcgcagcaaggtcgcgaaaaaggcaacgtactcagcctgggcaaatttgcgtccgagacaggctcgtgagccgtcggaaaatgttagaagcgtgcctttcatttgccgggtcctatccgaggcaacgacgtgcttttcgccttgagagctgcgccagcggttgggatctaacttgtacggttctggccagtatttcgggtggtagtgaaccaccggagcattgagatagactcgggttccggcaggcaggtcgtaggactttggggatccgtcaggtccatcagtgatgatgcgttcgggctggtggatcatcttggtaatgagagtgacacccgggaacaacctgaaggtttcatacatgaagccgtaagtgtactcgaggaactcgaaatcgtcctcataggtgagctccgatcgattcgcggattgggctcgggcgtgtgcacgatcaatctcctcgattacttgatcctggatgtcttgatgaagggcgagaacagctagtccgtatataatggcattggcggtggtttcatatcctgtgcgccgtgtcaaagttagcacatagagttcaaaacagagcttgttccaggttttgagcagacggaccagccagcaggtagataaagagatttcccatagtttcatcttcagtgaagccctgctttctttcacctgacgatctggaggactccttcgacgactgttccgagtcaaacaccatcgacgctcgaaccacggcggtaagaagatttccgcgagactgtttgtcactgtggttaatgtccgctgatagttttgccttttggtcgcggatgatctcgcgcaaatatcggtctaattgggcgtgcgctagggctgctttgtgtagtatgacacggagcacccatcggggaaagaggagaatcggcaccatatagtgcaaggtgtcctgcagtgcatgcaagaagctcagctgatagccagcagggacgccctctttttccccgttcttgctccattctagccgtttgccaaaaccggccaaagagattatagcgagcgtcaaggcgttcacatccttctggatctctgtgggcggagactctgcccaggcctccgtcaggcgctttgtttggtgcactgtctccctccagactaggttgttgacgccggagagatcaccaaatgggggtgccgtgatgcggacatgaaactggtacgtcttgccctcggcggtagcaacgttcatgccgtagggctccagaacctctgttcagatgatattcttagaaatgcgaactccaaacgcgggcaaaaatgcgcgatatatggataaaagcccgcggggaaagggaggagttgggagatcgtactatacttatcccgcggcttcgtgaatgtattccggcggttcatcacatcccagcccatcgttgcatccgctgagtaacaaataatgccctccggggacacgcagagaaacacatcgccgagctcatcatgggcctgtcgtttgtcctcccatgcccagtccttgacgaagaagcgacaccagcgcggccagcctttgccgcggtccaagtagtcgcggtacaggtaccggagaagaggattgagaaggagagctaccacttctgtttcaagcaaaggcgtgatgatgtagggcagactcgtcttgcgggcgagtcttacgttgtgcgccaggcgaattattttatacagaaataatcccaccagtatggtgaacacggacgacggtaacgagagcatttcgggagaacaaccagaccagggtgtgcgagcgagagggacagagagagagcctggttcaagaagggttcatggtgtccgctccagccgggatttttctaaccttgccctattccatcttcccagatatcgccccagagccgggacctcatggcgcccgtcccgggcgccggaggttgcccaattgggcaatttccacctccgggcccgggtcgcggagtaagcatagctactggccagaggatgcacctagtagaatgcttatcgtcgatctagtaaccatctagtaattgagacatggctctagcatcatacatagggcaagctgcgccagtctagtgacaggccaaatcagcacattcactctgaacatccattgttggtcactacccctccatttccactcgctatggagcagaacactatgccaatcgccatcgttggtatggcatgccggtttgccggagatgcctcaagcccagagaaactgtggcagttgtgtgccgatgggaaaagcgcttggaaggcgattcctgagtcccgatttgcacagaaggaattgtatcacccagataaccagaaacaagggacggtacgttactcgtgagggtaaataaaaggagccccagacactgattgattcgtcgcctagacaaatgttgaaggaggacatttcttagaggaggatatatccctctttgatgcggcctttttcaacttttcatccgaagtggccagtgtaagtgtccgtcgagagaaaatcagctaaatcagctaaccttgccttgttcagactatggacccccagtttaggctccagttggagaccgtgtatgaagcacttgagagtggtgagtccctcgcaagcttgtcaacaagaggacggggaattgatctaggtttctgtagctggcattccgctggatcagattacgggctctcgtacttctgtcgacgcaggcgctttctttcgcgattatctcgacagtctgatgagagacccagccactgtgacccgcttcttcatgacggggaacggatcagccatggcatcgaatcggatctctcacttttatgatatccgtgggccgagcatgacagtcgacaccggttgctcaacgaccttgacgacattgcatcttgcatgccagagtctgcgtgatggagagtcagacgtttccattgtttctggatcgaatatcttattgaacccggacatgttcgagtccatgtcgagcttagggtgcgcacactcttcccgactatgtgagagaaatggactgacgtatttaacaaagattcctatcgccgtccggcaaatcctatgcatttgaccaccgcgcatctggttatggacgtggcgagggcgtcgccacgttgattgtgaagcctctgagcagtgcactgcgggatggagatcctatccgagccgtgatcagggaaacagcactgaaccaagacggctggaccccgacgataacctcgcctaacccgaaggcccaggaggagctgatccgaatgtgctatcagagagctggtctcgaccccctggaaacgagctatgtggaggctcacggaactggaacgccagctggcgatccggtggagggctgcggctctcagtgccgctcttaatacaacacggtcatcccaggaccctttactgattggctccgtgaaatcaaacattggtcatacagagacagcaagcgggctggccagtattatcaaggtgaccatggctctcgaaaagggctacattccgcccaatgcgaacttcgaaaagccgaacaaggacattgatatggatgaactgaacatacaggtgagaagagataaagtacaaacggtcgtggaagcatggctgacagggcctagatcccaacctcattgaagccctggccacaaacagttcggagggcatcggtcaacaacttcggatacggcggtgccaattcgcatgtcattatcgaatcaccagcggtactaacacagccttcgccaccggccgtttcccagaccggcagtttgcgtcgagagtatttgtcctcagtgccaaagaagaggcggcagtgtcgaggatggcatcaaggatggcagaccaccttagcggtctcactttggatgatgaaagcgcatatatgcgtcatctggcattcaccctcgggcaacgccgctcggaattttcatggaaggcggcatacttggctccgagtaaagattgcattgatcgagaagtttgaacaagggcaggtcacactccattaggcctctgggcatccgaggcttggatctgtcttcgccgggcaaggcgcgcaatagaaaccataggccgggagctcattgaggagaaccaggtcataaagtgggggtttctcatacaggcagtcgtgtt

SEQ ID NO: 1396 - DNA, 1221 bp, Emericella nidulans
tagtctgcaagatcgggagagggctcatcggtgcacgaggcagtagaagaactctcccacccggagacgtacacggtgtcgaggtacttggccatctgggtgaccagtgtcgggtcaagacagccataggtgaaactagcttccttgttctgggagacgttagtactgcagacgttgccggcacatagccaagacagagtcgaaagaccaaccttgaagttacgctccaggattccccacagcttcttcgcctggacgtttgaggggtactcgatcttcaggtttccacgcttggccacaatctgctcagcagtaaaagggcgcttggtgtacctccatcgagagtccttccaccagttcttgacagcagcaacctcgtcccagtatctctggtcttcttcctcaatgtaagacatgatggcagtattcagcaattcaaactttttgaaacaagatagtatgaagatagtatacagggaggactgtcaatgcagtaatagaagcacacgacagtcaaacgaggatcagcctcgaagataaaaggtaaaaaaaggaagaatacaggcgaggagaggaattatagtttcaaaaatcaagaatcacaggccgaaacccggggaaggactcgcagttatatgccaatgcgtcagaggtccatcaacctcagtatgactcttaggtcggtaaacgctcggctcagcgggacaggcaggaatgcctgaagacaggccgggagacctgcaaccggcgaaaagtcgctgagcatccccaggttcacaagccagctccgggtacgtgactggctgctgtagcttcggtagagaggatccagatcagcttgatcctcggtctaaaggattgttgccttaggcaacttgccacgcatatccacgccgagtcatccccgagccttgaattttggactcgccactgccccagaccccaggaatgttgctagtatcctgggacccatcagcaaagattgtcgtccacattttcgatgttggatgaattgggatgcccaagtttcgagaggtcatagcattcaatgatgaccggatggttgatggaagaatgaaggctgagacccagcaatcaagaatgacgtcaaaaacatgtgcttttagagtttcatgacaaaacatgacaatacgattctgggcttggcacattgaaccctctgaatctttgttctgtacatacatccttgtggaatacgac

SEQ ID NO: 1397 - DNA, 4341 bp, Emericella nidulans
agcgctggcttcaagacgcatgtctacgccggccatctttgtggcggcaggcataacgacgacgttctcttgccgggaccatcctgcatggtcgagaccgagtctgcttgctgtaagcacaatgttacgttagaggggcttacacacgcacttggctttgctaagagacatgggccagttggcattgatagtctgtccatggtctgttccgggcggagctagcttgtcgctgttctggcggtcgagctccgggttacctgctaacgtcagtcgacgtttgagattgggccggctgttgggagcgtacgcgggccaggatcagttcctccctttgagccacggatcggctgcggatttgggttgttcgagaagtccaggtatacaccaagatcttcgtcctctgtctgtccgggaacaagggtatactggatgtcctctgtggtctgctctgtcagcttgttgtttggcgaatagccgagcaggtctttcgatccgcgtagcggggggttcgggccggtgtcttgtcgcttggtaaaggttggtgctccatggatgagaggcaggagctcaagaagtgagaacgagagtgaaagtgcaagggtggacttcatgatgagaaatgactgcgatactgtcctgtcctatcgctcggatcaggatgtgagttctactaaccggctatatatacttccctcacgtcaaatgaggggaagtatgctctctttcgttccgtctcttttgtcttccagctaccaccctgcaagccttcgtgaggagaaatctgacagggctgaccaaccttggagccataatgctgatgctatcgccgaattggtatcgatgcggggaaaactcctccgtttctgagatgagagtacctgctgcctagggacactaaaacccatcctatcttcctgctctcgctctgtggagagtcgtcattatgggtaatgagttatagatggctggaagcagacactgcatccacaaggtccaacaacgcttggccgacccgatacaaaacgggactcaacagtatccaagctttagccaaggaagtcaagactcgactgggtcctatagtgtgccaaccttgggcctctggacttcggatcacacggcagaatgcaccttgaaggaatctcccctcatgcggagagatatcccgctgaaggttgcactgcagacaacccctgttctaaatgtctctacaggaatagacagcccgcttataggagagatattgtctccgcagacagggctcccctcacggccgttctgtattgttggatgaggtatgagatcatggtcaacggttctgcagctggcatgcgggccaacgctccgcaacgctccgcaacgcgggtatcaaaaatagcaactagattgctagctcctagggctgcgatgattcgaccactcactgtcgagaagtcccgcacggcaggactaatatacttgtagcacagtgtgcatgagtgcctttaccatggcccttccgtgccgtgaaaggctgttcccccaggctgttttggagtctcgatatcggtctcactctaggcaactggattcctgatttttgattattgagacatttaccctttgacccttcaggccctttacttgtcagaccaattaccgaccaagctttgtagggctgactgcaggcaatgcaacataaacccccgtcttgagccgaaatcaggacccagccgtgtgctgacgaccaccatcactccgagtctccgaagctaaattccgaatgaaagaatagaagaacggtgaggaatgcgggaattattccgatctcaaataggccgaacttctgcaatactcccaagccaagctcttactccccatccagcactacgcctttcgatgcgggcaacggtatcgccttgtcatgcagattctgtgctttgagatattctttagatgacctgcctggccggacaatcagtggcaaacgcaatatttcgtggcgacaagatggcttgacacgaatcaaagtataccacctgaccacgacaagccccgtccaggctcgagaagcactacaattactcccggcacggtcggaaacgcgtcttatgcgccacaatcatcaccgggccggtcatggtgccggcaccccagacgggcgaggttggacgcgatatggacatttcaaaatttgcagtggctgactgttaactgttgttgagccctgagcagtatgggttctttccagcgtcaggtgactacctcgacagcccagggtaagccctactaagcagtattcggcggctccgttcatgcgctcacagttcgcggcaaactcggccagagtgtctgcccgccatacccttttcagctttcccgaggcaggcaccggagtttccgaaaggggccgagcgtggactgaccgaggctgagactcctgagaggctgagactgcgagatggcggtggcccgaatgtcggtcaggtggacaactggacaagcgctgattggtgccctggaaggtttccacgggaagaaattgtttagaacgctttggcagtggaaccgatgtgcattatgattggatgattgacgcagagcttgggggatcctctccccaactatcagatttttggctcgcagtatctcttcccttttcacctcgatcattattgtgaatttgttggattctctcttctgacgacgacgacgacaacatcattgatacgtgaggtttgaatcgcaatggcgttcgactgctactgcgccatctgcggcgtcgggttctccggtatgcgcattgggaccccgtctgaggcagcggcagagcggcgacgacaatacgtggagagtgtatctcgctccttggaccgatcgagggacagaccaccagtccctgaagacggagaggagtccatacaaagctacgatccccgactggttgaccaggataatatcgcctggacatcccaggtacactgtctggggctgcacgaggtcaacggaaagaacaagtaggcttttcacctggaacgctaagccagaccagcctgacagcgtgtagagcgttcgtctccggaccgggatactacgccgatgctgtatggtttctccgcaaaacgggttgactattagaaccgacccaatctaaccgattgcagggcgaactagccgtcaaaatgggacagcgcgcaaaacgaacttactttaattggtgtgtcacctttgactcggtttgaaaaggctcaattaacgtcctccgtccagctacggcttcgggacggacgaggcgcccgggcccgtgatcccgttccactggtgttgctttgagatccttctccggtctttgaccttttcaacagatccgaagaacgtcaatttggacgttttgtacgaggtcatgatgggcatgtgcaatgggtccggatcggccctgcggcttgcctatggagacgacgttgcccacgcccaggggcagtattggcgatgtcttcctggagccgaggtacgcagctcgcgcaggacaggcagactgtgtagccaccgatattgacatctgatccagttctccgtccgccatcctacgaacacacccaacttgaaggaattcatccagacacagctgaaaaccaacgggactctgcatgccccttcagaaacaaaaggccttgattttgggtcgcggacgccgaaaaacccttttggcactttgcccgccgaactcatctaccagatttgcttgtttctcccggggtcttcactcaaagccctcatccaggcatcaccctttatccgttttctgaccagcgatgactacttctggcgctgcttcattgagtccgatatgccgtggctgtggcaaacccagactgccacagacgctgaggaccaggcacagtcagagccggagaatctgtctgtctcccaggtgctaaggagcttggccacgagttcaggtctgagcctcaatcataaacaggtatacatgtggctcgatgaggttacggcgccgaagtacggcctcgaagacccgaccttgatgggcattgcgaatcgaaggaggatctggggcgcttgtgaggagttgtcgaggggctatcgcgcctgggcggcagcaggatgaatttgctctggctccccgagcccgactgccactctcggatatgctggaacctgcgtatttgagcggaaccgactggctatacatccatatctcatacatccaaaacgttttcgacaccggcagacggtcacatattttcttcctgctaccaccaagcggtaaaatctggcccaaattctgaacgggacattccctaaccaaacgtgaaccaatattaaggttttattagctccttt

SEQ ID NO: 1398 - DNA, 2380 bp, Emericella nidulans
ccattacaaccccttaccaacatagtcacagtcagatccaggatcatcgtgacccatactttcttataccaccattcaacaaactcatcgccagaaccatactcccgagaccgctactcttcagtctccagcagcacctccagctcgaacggccaccacagccaccactcccacagcaacggcacctcggtctcaggtagtggaggaggccgcgaaggccgccgccaaccgcgccccaagtatgaagaagaagaaatgtacttcatctggtaccagcgcgttgaccttggccaggagtggaaggaagtccgcgagtcctttaaccggcagttcccagagcgcccgcggaaagggttccaggggatccaatgtaaattctaccgctttatcaaggagaagaagtgtccgacgctgagggagcagcggcgcatgcgcgatggcgagttcgtctctggtcaagcgcctcatgctctgtctcatccttcatcggattcggcgtcgggctacgggggaaagccccagtttggcgtcgttgagtggatgggcgtctggtatccttggatgagggagaatcaggaggaggtgatgaggaagcggttggcgaggtgatgccggccatcgatcatctccgcttttcgtcttttcctcgtttgcttactcctttaatattatatcttttagcatttgcaccacggccgataacaccttttcttcgcatcactcgacgctctcttgaagctggccagcgacaagaactcgagtccagagccaatatccttatcttctacacttcccattcactgtctgcttttttcacgatcatatgacatgctcagtcattgggaggctctctgaattctagcatgcatatgatggacaaaaccatcatgttatgatacctcgataccgatatcaatctcgttatgttcacttggagcgttggtctattcgctgaatgaatccatcaaattcaacagagcagtcaaattcatagaacagaaggctatcaagttagcagccgtcgcagaaatcaaacatagacgttgcgattcaccgtaagaggaaaaatcaaggcctgaaggtgaatccaatcgtaccagccgtcacttcaatccttgtactttatagaatacgacttcacgtgatttctccaacccatgtactctgcctagtggcagagatcatacgatattcctcagcacatgatattttgatcaggtagacagcattccgttatcgaggacagaaaatcgtatttgtgtgatgggacctgcccaaggaacgagatgctactttcatatcaaatctattgtactgctgagcacctccctaaagctttaggtgcgtctgcggagcttgataattactacaggtgggtggtgtggagaggattagactgtaacgtatgataccttactgtcacattccgactttaggtcctcgccaagcaagaatgataatccacatgttggtccgagcgtacaagttcaagcttcagggtggccataaattacagagcacgaagaatggctcgacaagaatgtacttgcctctgaggttctactcactatgtcatgctaggcagttacttatccttagcttctagtgcggaatactgctttacaaaagccctcgtaaaaatttccattttagttattttcactgcttacaagaagtcaacccgtgtctgtgcccgaccctgtcccgtccgcccgccaggatcgactatttggtttattcagctcgctcgtaagacgggtcgggagtcagcagtcagcactctgtgctgtgcaacaatcgcccatcaaggaagcaaatctgtagcccggactagcggataagaaaagacaaaaaggacggatctggaacgtatggatcaagtaggtaaatttattccttcattattgtttattgctatccgtgcagccttcaacgagtgactgtgacacccacgagatggaaaaagtaatatgaccggcgtatctgcagagcaatccttctcgctcgcgtgggagaagggtcagtcgcatagtgttcgagattgtggttggcattgcgcggttaggttgatgatagccggcaattgataggatttcaaaggatgaaggattcaagtggtggccatttcagtgttagttatcctatgagaaactgttcacatcctccatgcgtgacccgcattgttaggatttagatgactgaaggatgtgatcatccgtgtcgctcacagatcttatttgtcttcaggcctgcagaattctgaaggagaggacggaaccgcatattgaaaaccacaacttggtcagctcgcaagccaatccgcaaataccgcaccattggattccaaggagctatatgcgcagtctctccagcaaggctg

SEQ ID NO: 1399 - DNA, 3209 bp, Emericella nidulans
tccatccaccgcaagtctatcgacaatcatccaatctaccaagcattcgaaaatgcaacagcctgggggttgggcggaaattcgtacgctctagacggtcatacatataacatgaacatagttaagccgcaagcaaggtgcaaaaagatggaaattgatgcacaccaatggattttctatgatccagaaattccatactcataaactattagttcttacaagcgaaaggtgacgatctgactattgaatctgtcagttgtatcggtagcagaagctcagcttctgatggagtatggctaagtacttttcaaatctgtctatcagaattcacatccaagccagtcgaactgcaagcagctcgtaccgagccttaatcgtaaacttgaaagatatctgggatctaagaggagaaaaaaaggaaaggaaaagaaaggtattgtcatgctgaatcgtcattctgatcaagagccagcttaatgtggagtcccatgctccggcatattcctcgtcatgcccttatagaacaaaccctgtcgtcgcggcaccgactcttggaggagcgagactcgacttcacacatcagcagctgcagactcgacgaggaactgcgagggaggatctgcgacgcaaattccgccgccaatgcagtatccgggcccatcaggactagcacagtcttgatcggtatggcattgaacttgaggcgatcgagtctcaagctgacgagtgggcgcaatacagatgccaccagctatacactgtccaggcccatggggactagcgcagtcttggtcggtacggcactgaatttgaggggagcgggcttcgaccttattgataggaggagcaatacagatgcctccgtgagtgcagtgaccaggtcccgaagggctggcacagtcacgatcggtgtggcagacaagctgaggagaccgacgagcgaaacgtaatttggacggtgcgaggcaaaggccgttaagacatctgccaacactaccgcagtctttgtccttctgacacatggcatcacccgttagggatgcctcaactgtaacgtcacgatcgatacagaagccgcccatgcattcagcaccttcaccgcagtcctcgtcggtcttgcagttcccctcatcctcagtgtcgggttgggcctggctgtggttagactcaacacacacgaagagctgacaggcttcattctcagcacaatcactagcacggctgcagaaattcaatacgtttttgcgcttgacaagatagccggttccagtgttcgattcgaggaagcctaagagaagaggcgagtgtcagtcccagaccttggcgagagcagcaagcgagagtctgaaacaggagcaaagcaagagaagtagaagtgcaggtgagagaaacgaagagaagagaaactgatagggagcagatgaaggaaaaaagacataccagtggactcaacggcatcagagccatcgatggacaaagcaacagaagtgacctgggccagaaccagagacacaaagaacagaagcatctgaaatttcatggtggtttttgaatggattgttcgagctttgatttggtaaagggttggaaaagagggttggatagtgggatgaaggagggaagatgggtgagagaaaagaagagatggcgacagattatgataatgtttgttacctttatagacactgattgtgcagctatcctgaagcagactacacactgggctttatagtgaataggttttcacagatggattaatggtagttgaatgtcataactgacttacatgaaacttgtctctgatgattcaccataggggccagagggaaatgaataatagataccaccaaccttgtgtactttgtcttcagacgtgaatagagaaaacacatgcatgcacaaagtgttactaacacttggctctagaaagctcattggagacattcttcagtgcttgtcccaagaaatcagtgactggatccagaagcttagcagcgttcttgaatgtcaaaatccaacatcattgtttggactccgtatggaggagctgaaagcacacaagacattgacctttgaagacaacttgatatgtgtgtaggtagcggccagtcaaaggcaagttctaataaagagccagaattctagtccgtgagctgttaatatgcatcgttagatgagccttagtgacagggatcctcatcactaacgtgtttctggaccttgatgccatttgcgaatcaagctggaatcgagcttcgctctcaccattggtggatccccagctgtgtactgacagcttcgagatgtctcaccatctataagctaacttcgagctgccgtcttgtgtttgacgagcccatctgtgtcctcaatagcatattcgtgtgcatagccatgtggacagtggctgggtaacctgcggctgaaagcattcacttgaatctcttggtaagtgtaagattgacctgatttttgccgcttaaactaaattcgtattcatctccaatattataggctttggaggttcgcagaagcttaagatcgtatgcaatatgctgttgtatcaggccgatattggctccgcatcgttcgttaccagtgaatcctagtctatactcgtcttcaccctaccctaccacaagcctcgacccttgttcgagagaaaccgagagtatttgattcttggcggatatttttctgagaaggaatgccaagttcatagcttcaccaaattgagtccagtaattctcgagtgggctactgagacaaagtacttctctacgaaaattgctaatgacaagtatactagtagtgagttgtgaagcagtggaaatgacccccaaagacgaagtgaacgatcacatgaccaaagtctaaccctaaggcatcagccgtgcaacagggtcaagaaaagccattagtgcgaggaatacaactcagtgctcattctagaatagctgtttttttttgaacataacaatttaaaagagagtgaattatttggatcgtatttatggctaggacctgaccatggttaaccacgtgtccaaacggagattgcacccagaaaggagttttccgttcccattaagggtaagagttcatcccctgtcaccgcccaacgctctttttagaatttgtgggcctttcccctgtaaagggcgtatttaacaaaacaaaaatttggtcttccaaaacctccctacttt

SEQ ID NO: 1400 - DNA, 3468 bp, Emericella nidulans
gtcttttcaaatgtcttcacattgccgctatcaggatcacgaatagtaatggctttcctggctggctgggaatgacaaacgcatgggccttgcccccggcagaagtattcgaagagcggctaggggtgtgcgtgtggccaggcgtggagggaacagcagacggcgcgttctgtcctaagctagagccagggcggtcagacacctgtgagggagttcgcgacagaccggttgcctgcggcactgcttgagggacagggtattggttctgcatgtacggcgactggttatagggcatgcgagggccgggttgcggcgaggggggggccatatattgatagttcgggtagtatccgtagttggggtcggcgtaggggtagccctggttatgtttcatcagcgttagatagtgctcaaattgaccactctctggagctagatttggggaggccagagttgggggaggaaaagaatggttaacttgggggtgaggaaggtttgagtgccgggagttaaacccgcggggcccttgtttccttttgttatatagaccacggcgcgggggcttctgggaataagggtggggtggtctcactggttggggtcccatatgttgaggataagcaccgtagggctgagtaggcatctgtgcatgagtcattgggacctggctcatttggggtgtcactgggtgcgcgttggccaaggccgggctgcggctggcttgcggagaagggaatccaggcatgggtcgtccttggtttgagtggaactgaggccccatgttatggccgcctcggggctgactgggttgacggaaaccgggagtaggcgagaacgctaccgggccttgatggctggactgcgaatgaccacggccacggccaccctgatggtagaaaccaccacggccaggaccacctcccatatggttgctcatgtcactgtgcgttgactgagaagactcgcggcgcagatgcgtcgactgaggtccggcggcaaggggagcctgggcctagagaatcaaaagaggttagatagcgcacaatggagaattaagacaatgtttactgatgtgacgcatcataaattcaatccttttgaacccatacgggtatgaacaacacggaacacttacattgtcacctgcatttccgaagctgccaaagttaacctgagcctgatatgaagatggcggtgggcggccaccactcgaagcaggctgaggaataggagaaggcgaagtttgcggtgaggtcgcacgagggttcatcggaggcgtgacacccaggcccgactggggctggttggccaaagcggcaggattgcccatgttcggcgaggactgggtgttggcgaagccaaactggaggctgttggggcgacctgtctgcgccctagtgctagggttgtagtctgcggtgatggtaaccgagggcttctttgagtggtcgccttgaggcacaccagaggccggggcgccattcacaatggtcgggtttgaaggttgctgcatgggtttgccgctcacagaagttgaggtcgacttcccatgttgcgatgagccacccacggtgacgggagcggcggcgctagagtccgtcgcggacttcttagtcgcgtttgctaggaactaggcaccgcggtcgatgtcgaggtcggagcgggaaccggcgcctgaggcgaggttttcccactgagcgaaggggtggaagagtgcgaggcggcctgagctgcggtactctgtccttgaggttggccggacttctgagggatcgagctcattagacaggcgggtcggtcgagatggggaaaggacgaagagattgggaattatcgaaagacgagggaggaaaggaggacgatgctcgcaaaatagagatcgctggagctagtgacaacttctaggcgatgtcaagaggcgtgttacggcagaaggcacacgctcgagaataatcccacatccagaattcccacacacaacggcaggaaaacgagggcggcgacaaaagaattgtcacggcaggggaaagagacaaaaagcgaagaccaccaacgggaaaatactgtgcgtcgtggtcaacgacgatagtttggagaggagaagggggaagaagagaggggaggaaagaagaggtcaaagtcttctggggagatgatggaaaggatttcgggttcccttttttttttcttacaaactactcttttttgcgtttcggtggtggtgctgttaacgcacgaacggaggtacggtgactgcgctgccaaccacgtacacagaacaggtccctctcgtttataaattactcattaaaacaataattatcattaggactccttcagactctatggaataaacgaactcttccccttctttctgtttcctgattctacaaatgacatcgggtggaggcggcaaaaacagcccgccaagacctgccggagtattgttctggaagggatcaataatttaatattgcctgctgtgaatatgcctttcagcgccctcttgaaatccaggaagaaagaaacctataaatgtcatcatgcatgccaggctgtctttcccaggagtgtccataatgcatggaatgcatactggagcctctcgccacgaaatttatacagtatcataccggaaagataccgatatcagaccaacgcacagcaccccacgccacgtatcagataccgtaacagtgtacgtatttggccgttcgccagtcaatgctttgattccagtgccacttccaggctcattcgcattcgccctaacccttccactaagcctcatcgaagcaaacgcagctgaaggcagaacatcccgcgcttttcatcgaatagtcgacagtcggaacgtacgatgaaccgacagagaatttgtgactcatgaataaaacactaagccaccgtatgctaccacttatcttcccagaacagggcacggagaacgcttcggacctcttcaccgggcaatacagagtttacagtcgtatttcaatctggcatgattttgctatgaaatcaaactgtcacatgttctggcaaggaaactaaccttaagcaaggcgaggcaaggcaaagcaagatcacacaggctgtatcctgtcaagccacatgctgacagtaacacgtctgatgtcatggaagtctagctacacctacccaagggaaccgaccggctaaaacccgaggactgtcactggtgagtggcggcatctaaagcatgaagtaaaacagacaggcagtagtatccgtctctatcgaggggaaataagaaaagaatgatgtatggaatgtatttgagtggctgttttacattaacagaccatgacgtacgcgcgtggaaccggactcatagctccgtaagttggctgagcttattttaaaacatacagtacatgcatacatctagggtaaattgtccataaactgctagcggatagatgatcagggataaatttttgacag

SEQ ID NO: 1401 - DNA, 1080 bp, Emericella nidulans
tcgtacccagtctgtggtgaagcacacagtttacgggtacccgtttgttctgtcgtaagttgaaaagctaacccttatcattcatcgagttcaaacaaagcctgccgggagtctaaccaatcgatttataagtaaaggccctccaggtaaagcctgttgggtatattttaaacccgttccaacgcgcttcggttcccacgggttaagctcccccgtttaacctgaagatccaacagcggttctccatccagtaggctctccagctagcttatcttgcgttactgacaccgcagtataatgtcggcaatattgcggcccctgaagcgctaaaaggcttgcacatacttcgcaaacaccgtcgaaggccgttttgacccaaggacatcgagtttcctgccttatctacgagagccccaaagacaaatatgcctttaccctcatcccagccgtccgcatcctcctctccaaatctaaagcggaagcaacccactatctccagcttcttcacgaaaaaaccacaggcgccaaagcaatccacttagaacgaaggccctgcgccgatcgacaacgattccgaaattacagacaagttagcggaggacgatgaggaggatatagttgtccctgttccgaagcggacaaaatcaaatgggtctcttaccgtaaaccggccacagagtcccaaggcgaagtccgtatcgtgggtggagcaggaaagcagacaacggaccgagctctctaaattcgccagttctcctgctattgagacggagggaaatgaagcgaccgaattggacgggtcagcgaaagtccgacagcaggagagggagaaactgcatcaaagattcgtccgaaaactcggcgggccggattgtctggtgggaattggtcgtaattgcgtcggcgaaacaacatcgattgaggaggctgcagagggggatgaagacgatgagacgccgcaaccagtacaaccaaaggggaaggcagggaagaagggtggaggtaaactcactccgatggaaaagcaagtcattgagatcctagtattctatagtgtcacctaaatcgtatgtgttacat

SEQ ID NO: 1402 - DNA, 1831 bp, Emericella nidulans
gaccaccctgatgtttactctttcttgagtttgagatatttggacgcacagaattcgaatactgttcttgaccgcataacttcatgaccagacgaaataaaagggcggcattgtctcctgacggcgggtcgtggaggcgctttgtcggtggcagactggcagcgtaatcatgattcggtcaggcgggtcctttgcaaacagggcccaactacgaacaagattattgtgaagaagtcctccgtaatatcctcctaagtcccgttaattaggaggaacccgcgtcaacgcccaaatcaggtcgtcagttgcgttcactaacgctccgctgctccagttctccatagctacatcgatccactgacccgcggctgcgctcccctctcgtgttcttcctcttccgcccaattctctcagacccaatattcaataattttcaagtcttctcttttctcccgcaagtcgaatgccgctctgtaacgattgctactcgtccaccgtgcttcaagtactgtggacgagccgatgagcgttgcgcgatcggtgtcttcctcgtcgaccctctccccgtcgctggacctgtcgctcgacctgtcgcatatagcgggttccttcttcattgccggtcgattccaaccccgcctaataacaccttgcggataagtgcgctgcatgtgtaaacggggtaaaagggatttgcaactgcatcatggcgtcgacaaattccgttaatttcgacgaggatcagtaccgcagggaagtcctttccctgtcgtctgaggaggaggaaatcgcgcaacagcaacggctggcagaggatgccaaagagctagggctcaaggttccggaagtcgagattgtagcctctctggccgcctcgattgcatcaggattggttgatttttcctccccgatcctctcctctagttcgtcgactggtcgcaactcgatgtacgaacctgcgcacgattctccagctctcgagcagcttgccacgtctctttctgaatataccatctcgtccaacccgccggctagaggcgggagcacccgctccactgcctcgctttcgacacgcccgacttcttatagttcgagcgagggaagactggcccaaggaaccgacggaactgcgatgaggtcatctggaaataacggctcgttattgagtgtaatatcagggagcgataagaaaaaggaaagacggcgatcaggtatcaaatctgcgattgacaaaataccctttcggaaacgtaagagaacgccttctacggtacttttaccgcccgctgcgcacgttacttttcgaagaagcgagggaggtgttgaaaagctctacgtggagtccaaaccagacgaggcgaggctgtcaatatctccagaaaacaaggaggaaccactgaaactcgaggtcccagtgttcgacaatgaggctctcttgcgaagccttgcaaactccgaactgaaacagctgcgggaaagtcaaacatcagaaagaaaccttcacgtctcatttcagactaatctcatcaatgggctccgtcgatcacagcagccgaaagttgaggagaaactggcgcaaaaccgccagttggagaatgaaaagcgcgaaaaggtatgtccatggtcctacacatttttggtcaaatctcacgcccttcagaacgtagcggacgccgctcgcatggaagaaaggcaactcgttgtggaaatggagcaagtgcgcgaattcgaaagggctaaagccaactcccgcacacgcatcaagtacatggagggatatcttagcagctcaagccccccagactcgcgctcgccctccctctcagggctc

SEQ ID NO: 1403 - DNA, 2042 bp, Emericella nidulans
tacactcacattacacgcgatgtaccgtcctgaatcaggacgacgccctcatcaccgatgagcgtcgcattatgtcgctcgccatctcatccgccttgtcctctgacagatttcggtacagcatactagtacattcttacgcgcgtgactctgcaaacttctcacgccacattctcccttaactcaccctccggttcacaagacgacactacctggcgcgctgtctacaacgctggccgtatcgcaccacacactcccagtcttcatccacgccactcacctcttcacataccattctcacacctatcacaacgcatgaacttctctcccttgccctcatcttagcacccacccccgacccgcttccagagatcctcggcgtttggcgccgtgcagacgaagaactttccctcctccgtgcccgcgaatcggatgaagaagacgcctgggacaccaagggcgatagaagcgctgccgccacatttctcccgggtggcttcaatcaaccgaacacagagcaagacgtattggaaacaaaacagcagcacgcccgtcgcgcggcccgcgccgcccatcacaaccgtcttgattcgggcgaagcaccaatgggtctttttgaagttgcacgcggtgctgcgagagcactgcataagaatgttgcgttcccgttatctgcatccgcgtccgcttccgcttcatcgtcaatgtcgctcgttgatcgcacttccgaggatgacggcgagaatccgaacggtggtaccggcgacagtgatgcggggagaataaggaagcgagatgtcgttagtaatatggttactgggggtctagcgagtgggataggctgggttctgggtgcgcagccagttaatatgaataataggcagtagtatatgcatacataatttggaagtggtttgtacttcagcgttgtgttttggtgatctgggcttcagcctctcgagttctatccgtttcattttcttgttaatgccggaaacatgcgaggttgattaatagcgagatgaagttatgatcacatgtttatatacccacgtacctgacagagttccttatcgctagtcatatgatctatgatcgaaaatataaatagcatacaaaatatgtctttcatttccaaagccaaatagtacttcggcgactgtacaaaatcgtacccagtatactctcttgtcatgcacactttcaatcttcgagcagttccacaagcttatatgcaaatgcctgtatataatcggatcacggggcatagatgattgctagcaacccgagaaactaggcttgtagacatgggagccatccaaatccaagccaagaaaaaaaaacaaaagacaaagtcaggcgggggttatcgaactaagtagctaggtagacagaagaagcaacaccaaagaactgcgcgtgcaggtgtaggtgaaccagaccaagcatagatagatatgtagaactgaaacagttgctaaagcgggaacagagactgaaatggttcgaactgcaaggaaccgaaatggaaagagccggaagtaccgaacgctgatgcgagttaatagtaaggaaagacacaagatagtcatgcggggatgatgagtaaattccgacttcatagaccagagacgtgcagatacgaaaggagcgtcgtagtcacaaataagatcgtatgcttttttgacatccgggtcaatcaagggccagccacttgtaagcgtcaaagaccaaagagtcagaggactgtcgagtcgaaggactgttaagtaataatagggatcgatattatagatattcgaagccacagcgttaggggatttaatcgccccagccccacacctgcttcacgaagtttgccatgttcacttttttattcttcatatccagcacccacggatgttccagcatccgccatggtgttgctcttcgcgggggttctttttcaaggctattgctaatcagcattgttcaaggccagcgtgcagaccaaacgtaccagcattcaataaagtacttgaaattgctcgaccatttgattc

SEQ ID NO: 1404 - DNA, 1091 bp, Emericella nidulans
tctacgagacagaggggggagtgaaggccgacatgcggtcgatgccgaagcccgctataacgcggccgccatagatatatgcaatagttccccttccgcccgtctgaactgcagccccaatcatgaatatcacggagagcacgagaagcgagttcttacgttcgtaccggtaattcgcgatggtgcctgcgatggcgccgaagaaacagcctgttgttagaagggcgacgaagttagatgagatctcgggttttttgctgctagagaaaccagtactgccggtagccatgtgaaagtcgtgtttgaagctgtcaagcgcgagcacgcttcccataaccccagtgtcgtagcctgtcctcagtcagcaacctgctcgccggataccatacgaccctcgtcccagataaagacttaccgaacaggaaagaccccatgtatgccacggcactgagcatatatactcgggagttcttgaagaaagacatggtgactggactgctctcccagaacactgctaggtgctacagagccaggaaagaacagaaaacacaacgttttcctagcaacaaggaaacacgggttgagtatttgtattcagctgctcactcatccactttcccatcggtaaatggtcttgccagtagtcacatacaacacttgccgacccgccgacggagaaatcagatccaccaatggccttccccagacccgggccgatccaccctcaccctgggctccgtatggagccgggggccggtgcccatggggattggagattggggattggggttggttattaggggtctccgctttttactgagctacgtcgctgacagatcagtctggtaagcagtcctcagcttaggatatggacggaaaaataactgtcctgaactccgtgacctcatggacctggcttcagggtcttggacttaagactctgagagggcagcttgccgaggtgtgtgccctgtgcgcttgcttcaacccccctgcattttggatgtggcgccaatccgcagcgttagcttgcttgaaaagtctgggccatagcttggtattgggctttggcggtcttaaaaccggtttaa

SEQ ID NO: 1405 - DNA, 2423 bp, Emericella nidulans
gatgagtttctttattgaattatcatagactgtataggaagtcagtaaggaggcctgtgccctctcaattggttgtatcatgttattattctgtattactattccagggctacgtattccctgtatacagggtctggccctaaaccggttatttcttgtctaccatgcccacacaccgcgatatctcaacagcatccttacgtctcgttagcctaccttccaagatgtcaatgaacggcaattgcaacttaccatgtggcctgttggctccagcccttccaccagcttagtctgatatatcagatctgggtttcccagcgagatgttcccatcagagagacagcccacaaacggcatatacgctgcctcctttgtcgcggtatcagccctcacgtattctgaatacattggattgcccggtcgtttcatatcgtccgcaataacaattgacccaggcgcaacgattcccagctcctcggccaatttcagatcatttaagtacgagatcttggagtgatccaaaaacagcatactccacttcgcgctggatccctggttcgaggagcccgctgcaagacgtttcattgacgctcgagacggaccctcttgaacctcaacgacatcactgaggccggcaagctcaatcaaggcgcgcgacacagatgcgaaggttgggttcatctcgagactgacgtagcgaggggctgaaacgcccgtattgcgcatggcgcggccgaacatgatggctgagcagccgatgtagccgccgatttcgagaattgagctcggcctctccgtggcaataaggtcactgattatgctgcccttatgtgggcccacgttcatgagaaagtctttggtgcgcgcgaactcgtcgatactggccagtacagcctcgggcgagttgcggatggcggagagttggggatgcgtggtgacaaaacggagcaactggttttcgcggccgtcattgcactggtcagatcagttaatcagacatctattcgagccgttattcgagcttggcaggatgctccttacgaagactttctcttcaggcttgtagaacccttgcggtgtggtagtgtttatggctaggccacccatcacgtattgttctgcggttggttgatagaaggacgcttgaaggacacggtatttttcagcagaaaattatgacatttggagaacacagttctcagacgatggcactcgaccctctaataatgattgatagcgctctctatgcgctgggaatcgtttccgaacaacttctgcatcggggtcatgacacatccactcaggcctgcaagaatgtaacaccagtccacctaacccatttaccgacgactcaggtttcacaacccatttcactatcgagcattatgattcttctgaatacagtaattagacgatctcggttgatgcagagaaaagaacgtctagtcatgacgtggaccagattaggtggatcatagggtaccattttccgcactatacctcagtactaatatgtattcagtcaaattctggttgctctttagaagcatgtttacgtggtttgattctctaagcgcacattgatttgagcccaccgtcatgggcgatacagtccggacagatgtcctgatcgtcggggccggcccgtccgggtatgctactctgcctgcttccctttgctctgcggaactacgtagttaacagcatgtactaactgtgagtgaacaggttgatggccggagtttggatggcccagatgggggtgaacacgatgataattgatcaaaagcacaatcttacgcgatgcggtcgagccgacggactggagagtcgaacattagagattctggacagtttcgggctcgcagataaaatctggactcaggcaaaccacactgtggagattgcgttatgggtacagctccccaaatggctctcgataggaaacccactgattcgagctctgttatgttcagggcgctggagccgatgggaggttgcaaaggcagagcatcaccgcaaattccaagcctggatggtcccggttctatgagtccacgcttagccagggccaagtagaagagtatctcatgcaatttgtgagggctcgaaagcacgtcgaagttaggctggaaacaatccccacttcgttggagattgataacatgacgatcgaccaccacgatgcgtttccgtttcgcgtcaatttggagactgcgccatttagtccgcagtcttcgttcgatggcgtggctactccgaacagcgagctcagctcgggacagtctgatgactcggggtatgcaggcatggggacaatggttgaagccaagtacattctgggctgcgatggagctcatagctgggtcaggaagcaactcgggttgaaactcgagggcgatacttacgacagactgttgggg

SEQ ID NO: 1406 - DNA, 2142 bp, Emericella nidulans
ccaatagcctgtttgatctatatatatcatattttttatgaacgtggttaacttggtagtatactagagagaatttactcgcgataatggttgagcaaaaaaaggtaactgctttagtgctacatttgaatcttgaatggtgttcatcagcgattcagctatatgcgcaatctggcagatcaggccatgggatcagaccatagttaccatttcagaagggaggatatttccggactatatcaggacgaacagatttcggatcagccaagtttgtattgatcacaaagacgttgaaaggcttcttaatatcttattatcttcaagaaccacgaaagacatcaattattgtacacaaaagctaaaagggtatccaaaacagttcgcctcatctgttcaactttcatcatccgtctacaaccactatctcgatggcatggcccccggcaactcatgcggaattccatcttgctggttctgagacccagtcaactctgcgcggaccgcattatccccgagctccgcaggagctacagcgtactgaccctttgcagggtcgcaccgaagtgctccgttaatccacctgcaccagagataggtgcgcccatggcagctgctgcctgcgttgcgacgcagaagggaccagataagcgcgacaattagggctaatccggcaacacctccgacgacaccgccggcaattgcgcctgcgtttgtggacgaggaagaggagtcggatgttaggttggtctctgatgcagtgggggagtcgggccgtgggcttgtcgagggtgtggttgttggtgagggcatggaggacgatgaggaatcggtgtctgtttcatttcctatgtttcgaaaccacatattagcccgactaccactcaacacaccacggagccgggcacactgaacacaccgtatgccaccggtacaagcacctcggtatccctcccagtaggatacccatccgcacagccaaagccggtcgtctgactgccattatagacaagccccgagaacgagaagccattcgtgtcgctatcgcagcaaaggtacccgtcgagctggtacagatcccaggtggcattgttcgcgcagtgagggttagcctcgatgggcgcagcgcacccggagtctgttggacagcagacggcgccatcgccgcagactgtcccttcgggacagcagttgagccagtcttcccagggatttgtgcatttgacttcgttcgctgcggtatcgcaggtaccgtttcggcgaacggcatatccgtagggggggccgtaatccgtcatggtgatttattctatatgttgtatcacgctgaagaagattttaacgtcaagtaaattagatgtaatggataaaacaggcgccaatcacaaaagtcgcttaaactgaagcaaaaatgatgatcaggaataggaatgagagtgaaacagagaagaatgcaatgacagcgaaaagacgggggcaatgcttgcatctcctgctcgaagtcagccaagtcgctaggcagagattgcaatggcccttgtgagagaatggacgattatagcaattgattggcctgggggggtctctgtgagaggcttagaccggccccagtcgcacggctttttggccccgagtctgtagggcgaatcagaaaaagatatcattggttgttgcatataacgattgaacaggtctcattcttccccagcctgtgatttcataaggtacaaaccctcttttccgtcccccctcagccgcaaggccctgaaccagatcgatctcgctgccgagagggtacccaacagccagccgcagccaagcgcgcggctcataaactacatccggcttgtctcaccaggggttcgaaatcgcaccaaaaaagccgtcaagaacttaagacgctagggccgccccttccataaccccagccaatggaagtgaaggaggaaagcgtgccctgcccagccgatattgtggcgttgagactacatatgacgtgctaaatatgaggtaactgtaacttggcaattctctctttcttatgcgctagcctagagtagtaaggccgacctagagctagcacggggaatttatggtgctacgcgtgtggtttggtttggtttgattgatttgatttgatttgat

SEQ ID NO: 1407 - DNA, 3040 bp, Emericella nidulans
tgactgtctcagcgttctccttcgttacctgcactcgaactttaaaaacaggagggtttgcgttaaccccaacctctctgagcttcttcgtaaaccggtatagacagtcttccagatcatcagggctttggaagtgttgcttaggcccagcggtaataaggatacaggcccagctctgaagattggagcttgtcgagaatctgatagatttcatgttccagctgccggacatgggggcaatctctttgtcctttgatttctcatctttgtaatatacagtcggaggagcaagaactcggccaggtactgtgatgaggttggggttggtttgaatgccaaagtccacctgtcaagacgaacgaattagcaattctattttgaataaggaagggtggacaaaccagcgtggcagcggtgggatcccgaagacccaatatttgcgttccctttgtgacaatggaatgggcattttgcgctgggcttcgcactgcaaagttcaacatctggcgtgtctgattagacgaaagcttcgtctttgctggttggcctgacagaacgtcacagacttccacaggcagatatgatggcttggctatacttccgacgttaaccactggcatatgcggggtctacctggattctgtagtctttgacactttagagcagtcttaagaacgcgtggtctcggcaaaacactcacattctttaaaaaactcggcaacagtgatgtatgtcccggagggcttgggaccagctttcttgctcccctttccctgctccggatcatcaagaaaaaacgaaacgtcgtttgggccagccccgatgaacttgacctttggtgcatccttgcacttgtttccatcctgggttccatcctggggggtggcgaggttggtgatagtctttatccttggaatatactctcctctcttattcttccttttaatgtgggtgacctcgactctgagtctgccgagaaatctcttcaaggcataaacgttcctcccgttagcgcactgaaactcgcggatgacctgatatagagggccatcctggtaacaggcaacatatttgacctgaatattcacgagtagacgtgctgttgccgctctgacactgacaaagtacccccgaagagcttccaatccggcgcctagatcaaatttttccgcagcgttgtcgtgaattgcatagtgcttgttggtaccgaccgaggcaatagagccagtggacttaggatgatggccgaggactatattcagtgcctgcaggatttccgccttttcctggagcatactagctgcgttggaagaagtcaagtaattgagaaggtctgcgggatcaagccggccagtgaatttgcaggtaatacggtaggtctcagatgtgtcgcgcggctcgtcttccttctcgctacggtaagtaacattgtacttgactgagggctgctcgtggtccaggatttctagatgcgagatcagattagacctgtagtcggtcacgatgctgtgacggaatggagagaaatgatcctcaagtaacaaacaaatgatgtgctttgctttcctggacgagggtttgcggcctcctccatcgatatttatgtggtacctaaatagactctttccgctagatttcagttcgaggtaattggcaaagagctggataggatgcccctgcgtgccataaccgggtcgctcagggtaccctgcagtcttctccttcttgacgagggctgcagcttgggagttctccgtttgagtaactttaacattcggttgcggggcaccgtcaggaggcctgatagtatagagttgttagtctttggcgtctaaatcttgcctaattgaggtaccctggcagacatacaagtaaataggaggaccctgatccaagcctccaccaccaccgcggccaccacgaccagcgcggcccctggagcctccccgtccaggatcacccggtgctggtcgatgaggtagatcgttgaacaagccacggcctcctccacggcctcgcccgcgatcaccatgaaacaatccgcgtcctctaccgcggtcgttacctcttccacggctgcctcgttggggtgatcccccggcgctcgacatgatagatagatggggaattaaaataaagcgagaagcgagtggctcagcgttttccgaagctgaagaacgatgtttgagatatgtatcactttaaagctagatggcgctaaaaactgtagacagtaaagctggaagccgtagagagagaagagagaatttgatgcaggacgtggttgcttaagaaaacttatatgtccagcctgctccttcccccaccacacagaggtagctttattcatggtaaaaacacattcacagatacaaggatgtttatgcatgctttgttggtagttcctgggtataactatcatggcgattggccagtcgcgccgtttgttgcattgttgcagcctgatttcgccaagtcagtcctgataatctgcgcaagtattggacaggatgactgccggaagggagcatacataaaccgtgtacttctctggacggggagcaagctgcgtgagaatgcgcggctaagaagctcacctatgtatgcattgttgcaatggaaaaggccagaaacagaagataatgtagggctgatcatagtagttttgtattgcctgatttctgatcatttacatcgtcacgtaccccccattgatcgatagattgtgagctgcataatattggtattgagttccaagacagactctcctatatcaatgcagatattatcgatttcacggtcggcagactcgtacagaagcttagaattcaagtgccacgcctcgcttactgcacagacaaaaatgtcgcatttcgctcgtcgtcgcagcgcagtttatttataacttcccttatcttgcgacaacagcagtgaggagtgagaagtctccaatttgaacgcagctggctttattatgaagcatattgcccagatggttgtggccacctccgctttggtgcagtgcacaggtggccaccga

SEQ ID NO: 1408 - DNA, 1430 bp, Emericella nidulans
acagtctaaggtcggtatcttggccagaaagtcattatcccttggcttaaatattgggtacgcctgaatccatctggtgggtatccaattcaatttaaagcatggcgccttatacctgggcgaggtgaacatggttcagaaatcaggtttactgcagatgccagcgtggttcagaaactggctgaatttgattttacgccgagggtttttccgttccgcattctgagccacgatggcagaatcctgacccacgccgacctgtgaaccccgcggacgggcgccttaccggtgcctatccgccagtaggaatatgagggatcgccagagccgtaccggtccgccagtaggaattcaagggacgagccgtactgggatcaacccatatattgttgcagtgggatgtggtggtgtacgcaatcaccaatgcgtcactgtaatggtattgcttggagatgtcgaactaaccacactggaggttatataaagggcctcctgatgccatgtatatagagatctccaagcaatcctttcaatattcttcagtacctatcaagctccctccattggataattatcgttgatagtcatcgcttcgttgtagctagagaactccgacgttagatgatatacgcctaatataatcacctaatagcatgtcggaagcatacaaatcgagtaagagtaatttaattgctatttattcagtattccacccccaactagggttgtcaacccgcaccgcaacccgcagcgggccaccgcaccgcaccgcagcagtgcggtgagggttcgaaaatcggcagtccgcgcgggttgcgggttctaataggagaacccgcgcaggtttgcaggccaccgtgcaggttttactagcaggaatatagatattctgtatatagtacagactgattacatttattctatacagagtatggaaccaataattatagattagctagaaactctctctactgagtatagtatctacccatgggtagttttataacactaaacaacacatgtattaatactaaaactaagattctatctatatattattatacaaatcctagtaataactagcaggaacctgatattgtttgttgcgcgtgctataggccacagtatattctgactcaatatcttaataatgagaaaccagagctctaactgttgcctgagcttgacttgcaactgggactgggggagttgtcaaatgttgagtaaataaagtaggttgagaagggaaagataagtcctaatcaagtattaattagaaataatcttccttagtatctttattatctccaaccagaccttttttattactaatatagccagcctctggcagagcaacctgttaaaccacgggttgggggggtaaacagaaatagctgatccgcccaccgggttttggatggtgccttgca

SEQ ID NO: 1409 - DNA, 1374 bp, Emericella nidulans
gccgcgcgttgacggcatcgggatagcggcttctccggcagcttcaggcgtaggaccttggccagcccatggcgaccttggtgggtatatctccaggcatggtgcgtaggtgtaatccaaaaactgaagatatgcagggtggagacgggaggtatataaaaaaaggcagaccaccggggtcttgacgacaaaatgcaaatagatggtgaatcgcgataacacagctgagtcggataattcagttgatttaagcgaactggctagccatgtcggacggtctaaaggatgggatggcacagctttttaaatgaaccaagacggaccaagaatgtcgtgattgagagctgtgagtgcgagttcagatcccccacggatctcgtaaagccaagtacaagagcaaatatagcgccaaccaggagaagagggtattggatgaatggctggcagggcaccgggatggagaggtaaggcagagggtattggtgaggaagaaggagtcgaggggagaaggaggccgtgccaatgtcaggctaccagtctgatgggaatggaaaaagaaaaaccagcaggcgaaagctgagcttggaagaaagttttatgtcttctggctgattattattattttaggctttgaggcgatctttcgagacggccgactgtgggggggcctgcactgcacgagagcagtcagagggcccgctgcatcgtcacacaggcccgcaccatgcagcagaaaaagcaagcccgaagggggatggagaagcagagcgtcagagccagaagcgatcgtcagcggtcggcaagcgtgccctcgcactggccggcgcggtttaagcttgtcgaggcagctggcgtaatggggcccagttggccagtttaagacggtttagtggcttttcgccgctcgggtctggatgctcagccagtccatggtcgcgcggtatctggttcaggatctggccaggaactgcctcttggcttgcgatatcgatatcaatggcctagagaaggtaaatccaatgtcatttcgatgaaaatcaatcaaagctggacaaatttgatggattcctgcagtccgttgaggaaggaaaagcaaaaagagacattgccggtgttgaaacaggcctgatactgccgcttgcgaccgcttatccaggacaagcaatccaccaatcagccacttctggggtgcatccagccaatgggacggccaggagaacacgccatcggccacagtgatggtgaaagctctggctccacgtgtggggaaaaaatggaagaatcagatccaagacgataagatgatgttgactagaggaaaaacagcttccactgacacgccagcacgtattcgtggatgatctctattacatc

SEQ ID NO: 1410 - DNA, 3152 bp, Emericella nidulans
acgaacggctggtggtcgtgacatgtttgcgggtgccctgagtatacaggaaagggatacatggtgcgagaactgtgatcttgatcaggtatattccgcttggggttcaagccattgtactgttgccgtgtcagagctagaatcatcaatgcccataatgcgaaatttcacatttttcatccaagaaagaagatgttgccagaaatgacaaggctggtgaacggttttcggccccgttagactgctataaaatgctgcctaaaaaacgaacaaaaaaaaaaaaatcaaacgcgagcaacgaaattatgttaaccccagtgaactagcaattggacgccaggcttgataaaagccttactggttgcctgaagctcgacagggagtagtagttctacgattttaaagacttttaatattataataaaatttcaagttttagcaggtgattaggtatttcttctacattgttctagctatacttcagaataccatcaagcaacagtagtaacaagcttataagcagattcctgaggcagagccagtggacgaaggagaacaatcgagtattgaactggaatggtatggatggtattgatatgtattcttctatatttattattttttcccctattgaaccgcccattagttaacatcttgtttacactgggtactctggagaatgaatgtggaggatggcccgacttgccacatccatagcgtcagcctgattagggcatgatgtcaatcaacatcatcttatatacactagcactagccttaagaaccatacaacccctgatcatccaaactcggtcagaacttacaagatggcaacgctttccaaacatcacctccaacccctgggccctatccatccccccagactcggcagtgcaagagcaaacgaagtcgacgcccaacccatcttcatcccagtccacgaccccctcgaccatgaagcccctgcgattctccactcaccccgcgactacgatgccgccgaagcccgcaactcagcggtaatcctcgtcagcggcgcaggaggaggcgtgagcggcccgtcagggatctaccccagtcttgccgataagctcgccatcctcctcggggtccatgtagtgcggctggactatcgagtcgccgcgcgcacagattactgcgtccctgacatcgcagctacaatggactatctccaggataatcacgggtccacccggttcgtcgtggtaggatggagttttggtgggtctccgtgcttcaccattgctgcgcacacgcagatcgcgtcctcggcgtggcgactgtggcctcacagacagctcaaacgtccggcgtgcgcaaactgtctccccgaccgcttctcgtgctgcatgggagcggggacacatgtcttccacagagatgctcggagtcgttgtaccagcagtacggggacgacccgtctggctcccgtgagatcaagattttcaagggcgataaccatgggctgtcgaggaacgcgcccgaggcggagggcatgctactggtttttgcggcaaaggcactcgggctcgaagatgaattaacggctgcgtcggttaggattgcagcgcaggactgggtgggcagtgaaggggagcgcatgaaggagatggccgaggggcatgactttgaaggcggggaggctctaaatcgttgagtctgaaacggacgataatataagaaggttggcttgtagagctgtagcgcatggtggtacagacaatagcatcacctcaccgcaggctctttttgaccatgtagagcgggaggatagggtatgcgcctggcacaagggagatagataaacccactagacgcaataccttggcgcctggatttatagttgaagtcaagactgggaagaggcgtatcatcagcgtcggtttcacgagtactggtttatagtacgaatacgctatccttgacatcccgcttgacggcatgaacgtttccatggcaactcagtatacataatttatgtcttcagcaaggaggtagtggcttgagcggcatcgcagggtcatatgaggtaagatgctctgtgctatatgaccgctcagttgtatagtctcagtcatcgacaacgcatggctcacctgcccactgctcggacatacttcgcggatgctattgcaccagaaggcttctatttggtatacatgactatagtcagaaaacaaaaaacggctaggtaagttctaataaagtagttatagctttacaataggatgtatctcaagctcgatctttaggctcgttaatatcgtggagcgtgtaatcattgatcaagcaaccaacataaagatatttacattgcatttcaggcagtcacagttctgcaattgagctagatgaagcttttgcgtcctagagtccgtatatgggcaagatagagtatcgggggctttaacctaatcccttttataggcacaaccagaacttcatatatattagctaacaaaaaccaagcaagacctttaaaactattctagaattctcagtaaaactacgatattaggtttgatcaccttctcccgctttactttgctgctacctatacagcgttggtgtctacctgagtccctgaaaacggtgatggatatctaatttgcaaccagacttctctaacttcagtggaagggaaaccaccatcaagagcgcaacaccttgtgtcatgcccaaagtcaagacggttgattataagttgtcttccattttcggttcaaggagccctatatcccccgacttagagtccttatacaggctatatgataacatattatgaattttgtgctaactaataggaaggacagcttgttacatgatcacgatgccatcaccattagaaatggattgcaacgctcacagcccacctcgcaggactcacagaatggctacctaccttgctgtgaccctattcttgcagactaaccggatgcacactagccagggaaattgatgatagatcctattggtaaaatataccgctaagccaaaaaggcgtcgtgactaccagattagtcttagacattcatattttcaggttggcaaatccccactcgacagttgcctacggcgtctacgctgcctacgggggctacggtggctacgagggcatcttgcgctatctt

SEQ ID NO: 1411 - DNA, 3734 bp, Emericella nidulans
atgagcagcgtcgccgccgctctcaattcgatcgggggaccactgcggctgatagggaaatagtgtacgttcggtccctcgctcccaggcgtcccttcagtgctgtgggcaatggcctgaaaagcgctccttgcacctaccctgggatgaaaatgtggtacgactcttccgtctccgaccatggtcctaaaacttcttaatcatgtttcatcgagtgactcctctggcaaacttaggagcaattgatatgtttgtgtacaaaaatgctcagtgattcaatctttcgttaatctgctgcaattgttcttgtggttttatctgtctttcatacttttcttgttccgagtgcattgcgggcttggagaggggctaccaacagttttgattcatgagagaaaagccattctatgcccaggttggcttgattgtggtgtctcggtctgagtctgaatgttgggttcatctccgttgggaagtcaagtgaggtttacagagtacataatgacggatgatgataatgctgataagttgaagcaagatggggacatggccagattggcggtcttctgctgcttgattacgaaacagtttattgaaggcccttttcaaattcaatatagcggggtatagaatacacaggcggcagtactgcgattgtgagatcggagccatttataaaagtatgaagcaccatataggctcgggagtactgagagcggagaaggaaccacaataaacgtggggccggttgtaaccgggcgagcctcgactctggcgtcggcataattttctcttaatgcacaccttcaaagctgaggtgcgccttcattctaacttcactggctgatgtgatagataacaccgttactggtctagttctcttctttctggccacttgagcggcaggctgtaaagtctgctcttctgagcaatcagtgagaagcactaaatatggaagaagatgaggtcttccgcatctactctatgcttcacctcatattccaccgcaacaggaatcagcatggcaggacaaagtggtggaaatggctctcgattctgaagcgagccgtctggaatctagctatgtctctgagctcgagcaagcaaggagatttccgcacctctgctgaaaattataaacaatatttggccgatcgggttctaccgaggtgttacctgtgagttttaccgcagttgagcgctcttgtttagagtatatcggttttttcgaagctcggctgataccctattcccagggccttttcggtagtcatagcagatgtccagttctccgctcttggcgctgtactcttcgctatccttgcacagctctcaaaatcaactggcattgctgaagaatttaagttgccgtctccggtagaaactaaccataattcactcgcatcttacacagaggtacctacacgcatagatgatataggagaagcgctgccacggcctgcagagccatcggaagttgctgaggacttccagttgcagcagcccgttaagcccgttttggcagtgtcgaataaatcaagcgcgtctcaaactctaaacgtgacggaacccgagaagaaaatgaagaagaagaagaagcagaaggagaaggggtcggaaacgaagaagcggaggaaggaaaatgcgatagatgatctttttgatgggctgttttgataaacacccggttggacctagaccttttgtactcttgatgagatttcccaaacagattgcttcataaagttatatccggaccacataatacagatactaaaaaaaaaaaaaataaaaataaaaataaaaataacaaagaggtcccgcatcactgcctacctaccgttgggagcagcaggttcacccagtgatggataataacccaagacattgtgtacaagtatttgggcgaaaatacagtccaaatgaaaagatgagtcctcaatgccgtacatgcggccataacagaggtcaagatagaggccgcatggaaagttaaaagtgcagtgtgagtccggctttcgtcatgagattcccctcttctcaaaagcttagtggcagatatccaccaaatcgggccggcccaattgcccacatatgtcaggatgccaactaaaatgacgttataaacgctgacgccgttatacgcgttagatagatcgatggaagatatagcgttcgatccaccaaatgcaaaaaaagctatgtattgcatcagcaaagatgtgagagtaacctcagcagaattcaagttcatccatgtcaaagctttgagctgcagtctgaagaagagaaaaataggcacatttgttactctcgactgggttagaaggaagagcgttagagcttcatgaaataatcctacagttccatcagatatgcgattcatcgccagttttgcttgcttaccttgttttataggcagtttgccgtttctcataaatatcaacataaagagcacagcaattccgcccatggcaacccgcgcatataggacaagtgtgataccatccataaatgttgcaacagtttggatagtagtctcattgagaagttctggcgattcagatgccgcaaaaaccaacttgaaagtaaagcacatagccgtcactgcgaggcagagcagacgccatattaaggatgaaaggttatccattaaatgtagacaaacgtcagcataagtcacaacaatcaaaagccaaaggttaatccggtgactcggaaggtatatcctagcaatatcaggttcagcagcgaatttttgacctgtctgattccaacgtctcatgaaccggtgcgagattgctaggatggcggcagggagaagatatgtcgcaccttgaggcgctttttggagtcgaatggacctgacgtgtaggtagaaagtccatcctgtaaatacccagtaccagaattgctgttcctcttccacataactgcttgcaaacatcattgcaccgtatagcagaacacctgttgtcaggaacagccttggaagagtgtgatttgagagcgccttatatgttgcaggtatagaaaataagactgcgaggccagcgatacatatacctaacaagaggtacctgagatcataattgctagcagcgctgctcatgacttcttgggaagatctgagaaagcgtaatagggcggattctatctcagtctggacatagatgtcatccgccgcatctgctccatattgatggagcaattcttgtgcctgggcccaggcacagagagctccatcagggccacgcggtgaatcatcataacaactagcaggcaacgtatcatctccaaaattgtggttcggatatgtttctttgagtgcattcaacaactgcttagcattcccggcgagcagtcgtattctctgtgaacctgtgtttaaagaaaagttagtatcagttgaccctagcaacaatggtataatgcccaccaagatgccacatatttagaaattcggggatgaatacacctaggctgttcagagggataggtagtccaagaagaccagccagagtcggcgtaatgtcggtttgatccacgacactatagtactgtagttcatgcgtcgcattcacgggactttccctgccagcgcccaagctttgaagcttcggagatataaaagttagggcaggtgaagtttcgcctgcagaagaacccccatgattcacagcatcgttcattccatgatcaccacatagaatgaagagggttgactgtaggtg

SEQ ID NO: 1412 - DNA, 2221 bp, Emericella nidulans
ctttccttttcacctccgcggtccaacttcttcctcccccgcccatccctatcaattctacctctgcctttatccgtactcctgcttcttccgctctgcattccaagaacagacctcccgttctggtcatcgattcttttacccatccagaacgaaacgaacttggattctggcatgggcccagtaccaatctagcaagcgagcccggtaatggctatgtgcgtctcttcccttcggacccagatcagaattaccacacggagcttgggcctgcgacgtgcttcgatatgcggccttatcagaatatgtaccttcacatagttttttcaggatcaacaaagttcagtatctcgctgaatcaacataacgagaagtgtgattctcgtctcagccctttcctcgagacatgggacagtgttgaaacagagcggtacgcgcgaggaaacgatgtttatgtgcctctgaatcattttgacatcgaccagtctcggacggtgtcagtctctttccatgggttcttctctccggaaactgtgacgctatacagggttgaaattgtcccagaccttccttggggcttttacgtgccccccaagctggaaactgggaaactgttcctcagatgcacgagaccgaactccttcgccttcggtattgacgatggattgccgcacctagtacaagacgtcatgaatatactggaagaggagaaaatcttggtaacctttttcgttgttggtgctgggctccgggacaaggaagccaacttctcgcaagtgtacgaggaaatgctgcggagaggtcatcaagtagccctacattcggatacgcaccagcagttagtacattccccaatcacaacaattccagttccctaagattgatgctaacatttcctaaaggatagaagcactcgacactattcaagctatcgacgaggagattgtccacaacattgagactttccagagactccttgggattcattgtatgcttgcttcacccctttcttttgactttgctttaaggcgtacaacgacttatttatatagcccgttactttcgcccaccttacggcactgtcggcgcgaggacccggcagcgactagcgacctatgttcaagatcccaatattataaattggagcgtcgatgttgaggactggctgtgggcagagagcaaaacaccggagcgacaacgtgacgcatttttccgaaacgtgggccgaggaggaaatttggtcgttatgcattatttgagtcctacaaccgtcaaatactttcgggagttcatccgattcgtcaagagtatcaacctcaatatcatgagggtggaccagtgtttggaggatcctgacagtccccccattgatgctcttcgattaagccagcagggtcgcgcgcggtacagggttcaatcgaatagaaagtctgataacaacccaggcaaaacggggtgatgctaattgggttcgaggaaatgatctgaaagagtatcctggcttttggaggcccggtataagtcaaagggataaaactaggaatcactgagtctgaccgacaccgaattgtataccattacccttaacacccacaatgctagatctgatgtgtctaaaagtacagaaatcgacgcttctaatgtccaaattatttcgcccgcgaaaaaaagaatagaaaaccagattaaagcccaaagtctggtctaacacattgaggtgcctggtccaccatgttctctatcttattaatgatccaaccggactgggcattcgagttatgcgaccccaaccgtggcgtctcgccagtgtagcatgttccgtctcgcatgacaaactgcacacagttggccgtttctttgcagtaggactggcattcttggaatgtagaaagcgtcggttgctccttgtcagaaaggttatcccagccatttcgaacattgctaagttcggggaagataagctctttgaaaatatcgctgtggagaagcggcagccttgaagactaaacaaaaaaagccgtcagtcactgaatcgcatttctatattagagcgctggcattcatctacataccttggcaagcctccggtgctcaaaatcatgcagaaaccggatatcatccggtgacaggtggtggagcgccacagccgggaaacaccacgcccggcggtaaaatgtggtcgtgaactcatccagctccccaatatgtgaattcgcagaat

SEQ ID NO: 1413 - DNA, 1958 bp, Emericella nidulans
caacagacatgagaattcgcggccgcataatacgactactatagggatcctcactctgccgaatctacgtgtgctcgactggacgatggcatccgttcaactacgatataaggcactaagggctgaatactcggctattctagctaaagccctccaagcgcccaccctagtcaagctggaagtcctctccctctccctgaccgagtgcccgccgaataaccatgatttcgacatgggcctagagcgagaccccacctatcctgacggggatatgctaagccttgccatcagagaactagcacagcggaatctcagagagctaaacctcgaccaggtccctatctcaccggcgctttttgggtcctcggacacagacgtcaacacctcttttccgcacctcgagcatgtccgaatcaagttcccaatcattacatacgacggccgctggtactacgcggggaaccgggactcggtcaatccagaagagttagatcccgaggaacagatgcaaatcgacaacggaccatcgctggaggagccagactcagacattgagtctgatatctcgctcaatatggaccgcgcggactttttgaacggcaagattccatggtacaactggaggacacatccggacccaaccatgttcaacacgttgattcgctccgtcgtggctgcgacacatcgcatgcccaagttgaagaacttgctcctcacgacgaaagtccgcggcctttcgacctgtgactatgaggacgaattggagcggcagtggacgattaaggcgaattacgcaacgccagggtgctatatagggactctgaggtacccgaacatgtcagtacaggcggactccaggtgcaggtgggttgtaaatttgggaccgagggtgcaatgggaagtaccatccgatatacagggaatgatgaaggagaaggtgggtgatggcggtgatttggtgatataccgctcgcggtcgtgatgcggatatcaaggatgccggggcgtcaaagtgttgactgacatagcagctgcggcacctaccaggcgtttagaaaatacaagatgactataactacgggttactgtattagaggagagaaacattgacatgagtgtactggatataaactcgatttttctaactcgcacgtcgtcaaagcgactttggggtataatcattcatccatctgagctggatattagcagagccacggttaagctcgagtgtcgaagacaactcatccaaccagtgcagacttcgaaatgcagaaaacaagccctcctctcattattggcgatgctacttaatgcatcgcctccatcctgcattatacatggtattacatccgcataaaaatgaaaaccgaaaagcaaagaacccagaccatttatcagatctatctcatgagacagagtcaaactttaacttatttcacatgctccacgttatccaccttctcggtactcgtttcgtcgctagactcatgttctttcttgccggcgtggtgctcgaggtagctggcgcggcgcaccgcctcgtcttcgacatcagaaagctggcgcatgagctcaccatgcttgccatacatgtgcggctcttccttggcagttcggacaagggagaaaatgctctttgtcttgcggaagatgcggtccatctcttcgagcgaacggtaggcggtttctgggtagaagaagtatgttacggggaagatgaaggcgttgctgcatcgcattagtatcgaggctctaagaggagggaatcagaaacttacatgacagcaaagatgatgtaggtctggtagccgatgttgtcaaacgcgacaggggtaatcatgacgaccatgaagttgaagatccagtttgaggaggtagacaaagcgttagccggagcacggatcttcagaggcacgatctctgcagggtagagccaggtcataccgagccagccgcgt

SEQ ID NO: 1414 - DNA, 1303 bp, Emericella nidulans
gaagggtatttgactcctggggctcatacgaacttagctcttttagaaggtatacttctataaagtgcttgtataattaaactgctgcaggataaatataggcgcatgtactctctagataaggttagagattagattgataaagattaagtataagggttgattatacttaacaggcggcaggataatatctgtagtataccatctatctgcttctgcttcaataaatagaagtgcagaggcatctatatagccttgcctgtctggagactccttgtacgagcaatggaagactgtcagtattcctctgctttcccactataatggccaaatcatcccttgggcggagtaatgaagacatgggtagcttttggagggcttggtgaaggagagggagacaagacagtaagatctagtacttctacctcttctgggatggggattggattcgtacgagacatttctggaggaggcatgatagatagggataaaaagtagttgtttcctgtctgttagtttttgcccttagccagatatatatagggcagaggaggaagtagcggtgaagaatctactagctataataacctaaaactataggaacttaataaaactagttctctagctcctccaattcatctaactcatactctacctcaacttctcgtacgcgctctagtgcttcagtcccatgaggattaagccgtggatcccaatcaaaagccccggttggtggctgagatatctgaaggattggctgagctccccttttaatatatgtctgaatcctagcccgaaggccaaggtatattgtatgaaatagagtaagggtatggtcccctacagcttctagaggttgctgaggatcatatcctaactccagtagctgatttcaagtccagtagtatgtctcaggtagcagatatttatctacatctattatatagttagtaattagtattagaaatagttaggaacttaccccagtcttggacatcttcttgcaagcgcttgaatatttctatattaaacttgattccctggttctcaacaccagtagctgggaagttataattcatataaggcttgccgggtaccagatgcggacgatttggctggttccgaattcgatgatggttccatgttcgtacgaatgatggaatttggacccggagaagaggtatatagattgcatataaagcaatccgatcacttaactgatccatagagaatatgccttcctcttaaaggccatgaaagtactcctgactcttaattagctgtttgtacaaagtagtacatg

SEQ ID NO: 1415 - DNA, 1365 bp, Emericella nidulans
attgaccgctttatgctccgcaaatgatgtcctccaacagaccggcattgtcttgcagaacacccgtgcccagcttgaagaggaagagatgctgcgatgtgcgcatgaagagactgaacaccagctccaggatgtcggcaaaggacttatatcaacccttggccaaaccgttgaagatattaatagcctacaatcaaagcttgatcggaaagccgagttggacgctaccaatgcggaattatggagagcttcctcaacggaggtttcagatgtcacgaagcggattgaccagcgggttgaggctttccagacgcggcatgcaaagcttctcgaaaccacgtctgtcaaagttaacgagttcattgctacagagatttctaacatcgagaggactcggtcagatctctccgagtataaccgctcgcttgatgcggcatgtaacaatgcgaaggctgagacatctagtgctcacgaagacatgaacaatgtgcttgaagaaatcaaagatctgcgcgaggaagtcaagtctaaagtaggagagggacttaatggcctctcagctgccgcagcccggatatcggaggaggttattggtgaattcacccaacttcacagccaagtaaggattaatccgtcacagtgggagtatatcattactaatatccctagctgcacacatccttcaataaccttggaaaagacctgaaatcgatctttgagacgatggccacgcatctttcagagcagaagaacgaaataaacaggctacgggccgagctacagagctcgaaccgccagaacatagaaacgacgcacaaggcctccgctcatctcgctcaagcgattgaagaagaacacgtcgctgcggaagcggaacgtgagattttaatgtcacagatcaaagcgctggttgaggaatctcgccagaagcaattcgcccgcctcagggccaagattgacggggtcaggaccgagatttcagcatcaggggacatgttagagcaggccacaactcagcatgaccgccagatcgatgagtgggttttcaagtctgagcaattcgctaaggatgtcaatgcatcgaaagatgagatcaggacgaagctgcaaaatgattgggaggtaagtgtattcctcgttttcggtatactttttactaagtatgtaggcatttgatcagcggaattcgacaatccggaaggcaacagaatctgtccataaggagacggtacgcattgttgacgttcaagtagacgacatgggacggcatatggaagctcttgacgatttcgtggcataggcacgatctcagaatggtcgttacgtgatgcgcatattgcaaccctggatcaatagccaccgtgt

SEQ ID NO: 1416 - DNA, 670 bp, Emericella nidulans
attcctcgtacaagtctttcaattgacctgcactcataacccgcgttaagtctgtgccttctcctataaccttccgacgccaaatcctgctttccgttcaatcgtcgtctccgcctttcgccgcaagttctagcacaccgaaactcgaccaggatcttttctttactcccctgtattttgatcgatcggaacacatgagaactacgtagggattgtgacaaacacaacataacaagccgtcgcaatggcgcgacgttatcaaatcgatgagttgatatggctgcgcgagtcaccgctggtcacgcggccagccaatctacctccggtggaggaatggatggggtatggaattctcgccctctatccacttcgatgtgttatgtctcttcatcctacttgtactgactgatgggatttacgtaggccgctgcctgatcgtacggctcaacgaaaccctagcaacaaccataacgaaacgtcaggtcgccggccaagcaatttcgagacccgtcacatatctcgcaattcaaattcaggtgagacgaaattctattcaagcgctcttatgtttccgagacggaagctataagcctagcctagatgattattctgaccctgagtagaggaaattgtcctcggacccccaaaaaccgcgctttgcttctgcatc

SEQ ID NO: 1417 - DNA, 1193 bp, Emericella nidulans
tctccaaggcctctgttcgtttgatatcttttttttatagagcagtattatcgtaaatgccatggattcataagcatcggttctcaaccgcgctcatgaacctcttcataggcccataccgtgaggtccacgcccggagcggcccgccccaggagaacaacgggattgctagaagaatactggccgcctggatagcggtcatctcgccaaacaccgcagcgggtccttgctgagtgatccagtcggcagcatagagggaaagcagcatgcctattgtgttgcggatgacaaagatgatgaccagggcctcaccggtgagctgcaaaggttatcagtattagggctagttcacttcgaaagggttaagggcaagtagaagcataccggtttataacaatccagacaataggtaacagcgacattggaaatcgccgcgacgccaaaagcctgcatagcatatccaacagcggctccgatccagtggacctgatgtgcaatacatagtccgaagatcaggagtccgcctggtcctataacaccagggatcacgatggcgggtagacggtattcaggcaaacgctggcctcggcgctttgtatatcgagtcgagatgatatcaatcagacggccaccgaggtagaaagccagcacggagccgatgaatccagagagcgagagcagacctaggcttcccgccgaccagttgtacggaggagcagtgaatgttctcgaagctgtcagctggacaacgatgttcctgttagggttagtcaactgacggcagatatttggacaactctcaccatccaacggatatgccaatggcaaaagcagcccacaagagctgcgggtatcccacgttccaaacaatgtcgagcagcgtcctaacaaacgaagcatcagggttataccccaacgtcaacgacatccactgccatggagtccttctgcctgaacggggtcgatctcgacgatacgttgtctcccgcactgtaaagatagccgtcacaaagacgacaccaacagcgacggctagaaaatagcacatccaccgccagttctcctcttgcacgaggtacgcgttgatcaacggaccgataaacagaccgctcgtaagagcgaggtggaaaaccatgaggtaatgacctcggtcctgaggagcaaccatatccgacaccactgcaggcaaggtg

SEQ ID NO: 1418 - DNA, 3688 bp, Emericella nidulans
cagtagccaagtaccgtaaaccccaggcgacacctgaacggcaaaaaccaccgtgatcagcagcttcggtcggcgaaacgcggcctccaggtagaccttttcgcctccgcttctggggatcatgcagcccagctcaagccagacgagcctgcaaggagaagtccgagaacccagagaagcaaggcggagccgacgctgcctgctctgctggtgatggacgaaggagtggagaagatgccggtcccaatgatgcggccgacactacgcgcctaagtcactgcatgcaaaagcaccgaaagaaccgggggctgggggagggtagcaaacatgagtagaatcgtgggaaaaacacccagatgacgaccaaggcctccttgagtatactcctcaaagtccagttcaccgaatcttgcacgagcctctcctactttgtcattctcgacctcggcgcgaggagagacttgcactccaattttctcggctatctcgtatgccattattttgccaagatgaaaggagaagcttgtcgaagcttgtctgtggtgatcagtatatgaatttatagatttttcccggtcttagcgctcaggctatccatggtcattggcactttgatggcgtgattgcattggggttggagatacacagcacagaggcaccatggcaggtagccatgatcttcttggggagcaaagaaaggatgccgacgaaaccgtaccgctgctacccctgcagttatcagtaggcaggacagtactctgggagatcttttgcgctggataaatgggaaatggtggtatcccgtgtagaacctcagctcgagcggataaagcattatgttccgcgaccccactcatctcaatggcgtgcgacaatacggtatatgaaaatcttctccaagaccgttctaattaacaatacctctccgaagtgggcttttgctctaaagtcaacccataagtgagttggacggacaactatattaggcagctgcccactgcgggaacccgagagaacactgtatagaggcacggtctagtgtcagttaccactgacttttgatagcaacatcgccgaagttgaacattcctttctcaaagctcaccatttccacttaaacgatgcttgcgctgctgatatcagctcccctcggcatctcgtgctcgtacccagtccagcgtctgtctttcactagtccctttatctgagtaacatgatggccgaatcaaaatgcgaagcactgactgcgaaagagacaatggccatactggcacaaaggactccgtcgatttcgttgcatcaccctctcactgcttcatgtccgtttccttcttgcattgctacacaggcctagctctgggccatatgatgggcttattgatggtctgcttaagctctgatgagcctcaatgcgggaagagaatcggggaaccttcggaggtaggcctgaactataatgcatctcagtgtatggagattcaggctcattttgcttatgcggcgaggttgtcgcagacgtatgtctttagccgtttagcaacactcggtgccaatttcgcgcgagagggaaacgtcaagtcatggagcttggctaatatatggcgatacaagttaagaggcatcgcgccgtgcaagctctgatctgcaagccgatgcccagcttggctgtcctctgaacattctgaattcagctcttctgaataaataaaggggggaaagggagagaaaatgctcgcctgtagcttttgcagctgttgggtaacaagactgacgaggtctgcctgggaaatgaacattagactgatcagtattcctgttgcaggtaacattcaggttctcatacagacatttatcagatcccttctcgacgtgaaacgaagctcagagggcagtggccgtgaaacattggcagtgattaaattgattgacatgactaggatagataaaataccgacttcgttaacagcagggcaggtttacgaataacacactcagtacgcgcagtggccgcagtagccgcaggtagacgcagagcaggccgtgaaatccttctcagactccgactctccactccattctgagtcctcccgctctatgtgtttactctgcccagcatcatctacttcctcacgctcatccttcttctctttacctctcccatcaagatatcccgctgcccaacggcgtttcatcacatccgaaaggcagcaattcacctcgtccccgacctccctcaattctaactcgccgttcccgtccgtcccattgtatacgacctcaaatcttctgtttggctggccatcagcaaattcgatcaggagcttcatcagagtcgaaagttttcgcaactggacctcgttcctttcctcccactttcgtacctcttcacgaacatcctcgacgcgtacatcgtgaaactccccatccgtgtggaagccaacgacaaagttcggaatttgtgagatccatagtcggggaagctcgtctctcagtatattcgaatactgcttcgtcgcgctccgggttttcagatcgaacatggcagactgcggaactagttcccctccggattcgacgcgaagcgcttgctctccttcagggctgactgtactgactgagacctggttgaaagatgcgagcaaatcatccggagcagtcgccgcgggctctcgtcgcggaccgtgaggctgataaagttgaggaaggtacccatcgcctccgtaacggacgaggcaggacaggcccgcaaaacgatactggaggattcgctgatgcgattcagaccctttgacgtcggaaccccaggtagtgttcgcctctggaaatgtatgtccgaagccaacaacgttggataaagcctgcgtgggcgaattctcgcgtcgcacaaaaaagactgtcgagccaaccgcctccacgatgaatctgaattgtttgtctggctctgcgatgaatcgacgtagattacctaatgtactgttgcaagcaacgatatcaatttgggtgaagtcgaaatctgggtcctggttgaggatcgaatttgctgcgggctggaaaacatgggcggcatatctagctgaattttgatcgcgaaagtacgttcctttatcctgcggtaatctttccgatgtgcctgtgggtgtccattctggaggggcacctgtggatttgagtgtaagcagcctggagaagtagggctgtctctcttgctcacgcttacctgggacaaggatcgtggggctcttccggttcagccagttgtaagaccctaccagtctgcagtctgtgatcatggaaaactctttgccagaagatgaggttatgttgctgtcaagatcttctctcgtgattgttgacaataatggtcctacagctggcgcactcggctcggcgtcagctctcgatttccttgaacgccgccagctgcctctgccccgtccacggatcgtttctcgtctgggctctgtcatcacggtgtgatgacgcttgaggtcgtcagtggtggtaactcttcattgcaaggtaggagtgttgggtatgaaaaatatatgagtatttggaagatgaaaagaagaaggccgaaagctcccccgactgcattttatctttggagccgtacgagcatagcctgaccagcccttgttctgggtatgtggcgtacaggcctgtccgcctatatccagacagacag

SEQ ID NO: 1419 - DNA, 2697 bp, Emericella nidulans
gagagcaaacattctggagcatcgaatactcacagggtatgggcaaatttcaagaaacacctgctatatgccccaattggcacgaagagacataaccgtgagattcagctcctgctgtgctatcaacgtgggcacccttccgcgttgataccagacgatcctgagtgtgctatacgtcgcgagccatgatgcttactgcgctctgctggactacgatgagaacgacaaggccgccctcgtggcagagctacgaggtcgaccggcaacgctggccgctctcaatatggtacctttgttcatccttgctggtcgcaacaacccgtagattcccttgctgcgcatgagattagacacctacaacctactgaccggtggctacgccgcatggctcgcatcgagagcataggacacaccgtggcctgggccgtgaacgccgtggacgagaccgtcgtctcgtacatgatagacggcctctgctacacgcctttcatggcctcgggcttggtagcaacagtcgccatgacctttctcctcctgcactctccctcgccaatcagacatgccttttatgagacattccttcacctccaccagcttgcagccttgctcgccttcctcggcgtctacttccacattgacctcgacaatctccctcaaatgccctggatcaccgctattggcatcttctggctcttcgaccgcacagcccgcttcttccgcctcatctatcttaattattccctcaaacgcggctcaacctccttggtcgtccaagccctcccaggcgaggcctgcaaggtcaccttccacctccccaaacgcgtccacgttccagcgggctcccacgtctatgcctacatccccggcgtctccctctggatgtcgcacccattctccgtcgcctgggttgaccccagctcctgcgtcacaaaccatggttatatcgacaacgacagaccaccgaaatacagctctgatctcgaaaagcaactgcccaccccaccatcaacccactacaacgacctcccgaccaacgacagaattcaactaacctccgtctctctcatcgtcgccgcccgcaagggcatgacccgcaagctttacaacaaagccctctcctctccgaactccacgtatttaacaactggcttcattgagggcccctacgcctcccatccctccgaccccgcaacatatggcacagcagtcctcttttcagccggcgctgggataacccaccacatgctcactgtgcgcgatctgctcatccgcgcctcacaaggccgtgtccccacgcagaaaatctacctcatctggtctgtccgcagcacagagcatctgtcctgggtacgggagtggatggacagcatcttgcgtctgcccgggcgccgcgagattctgacgatccagctttttgtatcgaagccaaagtcaaagagagagattgtgagtcccagtgcgacggtgcagatgttccccggacggtgtagaccggatgttgttctggatgaggtaattccgaaccgagtgggcgcgacgcttgtctctgtttgtgggccgggcgcgtttgcggatgaggttagggatgcggcgaggaggcgaattgggaggggtgctgtagtcgactttgtggaggaggcttttacttggtaattattctattattcgtggtatgttaatgcattttgttggaatgaagtgagggcggaggggcgagccctgtctgtcctggtctgtctgtttctgttctctcatctctttttaaatcttccatttttattctatgtatctatatgcgacggtaagacaatgttccctcgtctcctgattttgggttttcctaaaaagtgtactgctacatgcatgcagccggagctgtacctgtatatatcttttcctaagtcaaaagttaagatgctccaaaaccaagttttatcttttagattttttgaatcatcatctgataccttctaaatagcattatcatcacatttcatgtacaatctcttgaagcaaaattcccatcgccgtctatgcaccccacgcaagcctacggaacggtccccaccacatcaacgctaacacacatcccgggtattcaacatgcaagaaagaaaagaaaagaaaagggacgatacttcgtatccatagtttagggggactcgctttcaataagaaccttaacaactggcctgcctccctcatcaacacccttcccagcaatgtcaaacgctctgatcccatcctgcaacccaagccgatgcgtcacaacagacttttcaacaacatccatcttcccactcgccatcagctcaattgcggccggatacgcatgtccatcgtaccggaacactccaatgatatcgacttcacgcaatgccgctgcgccaaccggcaacgtctgcacggggttccccatgccaatctgtacgaggactgaacccggcgaggcggcgtaaatcccggtctgaacgcaagcgggcacacccgtgcagtcataaacgcgagtgaagcccagaccggaggggtcaagggatgaaatggcggatttgagtgaagaggccgtggcttgcgcgtttgatagggcaaaggcggtttgttcggcgtgcggggcgtcgcgcgggggaggcggtgtcgagggcttaggaatctggaaggtggaaaggttggggagagacatggttgatgcgattttca

SEQ ID NO: 1420 - DNA, 3440 bp, Emericella nidulans
ctcaagcagactcgtgtcccaggcggccctgcaatactcattagcttcgtccacctttctccttaactgtggatttgacgggctgcaacgtactcaaccggaatacagttggtgagaatgaagatcaacgcaatgatgttcatggtggagaagagggcgataacaacgtattgtatatagacatatttcttccgcccttcagctactcggatcaacatccagctgatgctgagcttgatggggatgatggcggcacaatagccgacttcgaatataagaaagaacttttgtccttcggcctggtatttctcatttccgggctccgagagtcgtgatgcatgaacgccaatgccattgaaagcgcctccaacgcagcctgctacaagaacacagaacggaaccttctttcgtcagtgatctgaacccactgacaaggaaaagtgacagtgacacaatctaacataccaaagccgctgtcatgatccagtcttctgtggaccacgatctcctcgtgatacgacaatacgcacgcaggccgtaggtaacgaaggcgaggacggtcaacatgatgacgctgcccgccacattgggcgaattgtcgccggtgatggccatgcttgcgctgaccagaggtcgatcaaagacgtttcacgttcgacttcgaaacttggggggccgaaagccggggacagtgggaacggttctgtttaaaggcctttgtcactgtgcccactgtcaggtcctctctccttaactgaaatcgtcctgccgtccgctagtcatgagggtggtgccgtccattcggagatgagcgctagtagtcccactgcaactattccctgtggaccttattcacccgcttaagcgtgcagaactgcggcgtcgtcgtagcaagatcaggataagtcggcgtagtgcctgaaaccagactgatccaagcgccactcgctaagctggcctgtcatttggcaaatgactcgcaaatctgcgctacggcgatgctaatggttaagctaacagggttctaggtccgctgaaagaatagagcttaacggaaagaagaaatgattatccacgatcaacgagagcagcgtattccgcgtttcgactcttccaagacctgtctatatttcaatctaactgtttccctagcaatacacagtcgacgggacaaatctcggtaagacgttggttccgtggtccaaatgtcggtgtctgcctagggaaagcagacgtaagcagtgggattgcggagtgcaactgcaggaaaattccttctcattcttcactttgaccgccacgcctggtccctgaacggtggggtatgcttcttcaggcttgagtttctggaggctgaagaaaatttggttgcagcgcgtcttggcgggaattggttatggaaccttttagcgcgccactttaccaacagttctgatcagactcatttctcctgccaactgatgtgggggagtgggttagagcgctttgcaagtttccagtacagtccgatgatctcagaatcatatcaggtttgattccgtcagtacgcgctgctcgttggggaccaggatcctttattcaagcgtcgttgatacgctgaagtatctccaagtatctgattggctgcagcaaagtatccgatctgccgggacctcgccaggtacatgtgaagggctcgtggtacgtgcagtaatagcctgaattgcttttcaattcgtattcttgatcgattctcaagagagtcgagactcgtgtagactgtaaagggtccagtaaaatggctaaccactcaggcaggtttctgatagggaatagaaacaaactgtccatggtctttcggcatgtcaccctctgcctattactggtcgaactcgaacatatggaaatgtctgaaccgcggtacagtcaccgtcccaactccaaacctgaaaccgtttagcgacctctcagcctggcactcgagtatatgattggcgtagctgctgaaatagagcagatcactgaatagttcagaaagtgccaagacacgcggagaatattatcgagcgggaggcgggaaatgttctatgtgtgggcggacgtcgcgtcggttgcccaatatggcatttcaaagtgtcggacatgttccggtaaccggcactattactgtatattcgcggttggacagaacgggtcgatgcaagacttcacctagtgagagcaaattaatcaggctcgcggatggcaaaatgcaggaagagcgtgcgctgtaggattacaccacacttaacaatattcacatctgcacggactatccgagaataccaatagaagccccgctcgaaacggatctcattgtcggaagtagagaaaagtggctagcagtccattgcgcagagaacgatgggctcaagtagcttagtctgattgggactagtcaggtacatcactcaagatagtcttcatgcaccacggacagcggatcttccgcgggtattgccaagtctgtatcttatgactagcacgcggacacaggacagcagtgttcaaggcgtgcaatgcatcgctggctggccgggaacggggaaatttcaacagattccatcagaaacaacccgacactctcaggctgcggagcattattcaagtgagcgaggggtagcgttaagagctttctgtagtaggggtacatctgcagggtcgcccgacaggaacaatccgccctaggatatcctccccgcttgaacccctccacggtggtacgttctagaatgccaaccccgtatgtaattctggatgtcgactgataatcactccgttggtccgagtgatgaagatcctcgacttggcgttggtctgattagagtataggattgccgccagagtcttgagtgtacagcaaagggagcagaacacgaaaaccgaatatatgtattggattcagcagctgttggagaggaaacttcctttcaacgatttgcacatcctcggcatctagcccttcggtttgacatgctagtaaattacagtaggctgcttcatgcaagcaaatggcacaatcgcgagtgtaacggcagcttccgcgaagagcccaagaatagcgcatccgtgccttcctgcccatgccttgcgcatgtcgatattcattcagccagaaaggaaaggttgcggttgtatctgcacctacaagctggagtaatattagcagacttcgacttaggtaataggctagtacggagtagcagggaagctccagcagtgctttacgctggcggcattgatttatcgcagcctcgcaatgtaacaggggcttcgccctaaacggtggcatatttccaggacgagcaaagacaatattagaggaagagccccgctctcataagctggtttgatacgcggaaagtcttggctgcattcataagcagaacctggtgtaagcccaaagctctgtggctcttccg

SEQ ID NO: 1421 - DNA, 4737 bp, Emericella nidulans
atcacggcccaggataaaagcccgatgagtaggaaggagagaaccgccgcgaggggccccgggagctcgagaatctgaccgccgcgccagtacagtccagttcccagggttccgttcacggtaatcatctatagatcgttagcacttggaaaagctaaataaactgcacgctcaacacgtggtgggcgtaagtaattggtgtcgcgagcgccggtagataataacaatgcaagggaggtacctaaacatacgaatacatggatcccacttagcttcctcttgaccgtcctatttgcgctcggagagacgtaaagcgtcttagcttgcttgaatttgaattgatcggcctcgccatcgttctcattaggtgggtagcccaactttttcgggctgtgagagctattgggtgatgatgcatgtggagtctgggtaagctcctgatctgaggtcaccgtatctgctccgggtgtcacttgcgggagccagtcaggaagccagtcagagaactcgtgtccctcttgcatctgcatatcttggcttcgtacgtggctaggtgtacactacgaactggtgattgacggtgtttgaccaagggagaaagttcgtgataaaacaggagagcgaatcctgggtagccggtgcgcagacacaacaatttgcggctggggatagcgtcgagcctaagtgtctaacccccaagaggccgtcgacgctgcgaacgataagaggatgcttcagcctcccaggttgaccggcccctaacccgaggaggcatggttggcgcggacgggagatttgacgaggcgccatctgccactaagatcgcgcgccaatccatcgaggatggcagcacggtagcaccgtgcttccgactgcgtcttgtccagtcagatggtgtgtattagtaactgtcgttgcttttccttcgtcatgtgtgttgatgcaatgttcccctggtgacgtggcaaacgcatgtcaaagcagtatccacgagacccatggaggctcttttccgccaggatgtttttgagtcgacgccacatgctcacaaatctggatattgggcttctgaactatttcattgcagtgacagcaccttgggcccgaccgtcttctgattaggtttactgcgagtgaccgcgacctagaaactatgccggagcagaatgtcagcagtcgatacattcgcaggtggcgtcttcagatgcttctggaaaatctgttcccggaagtgaaagacttcagcatccgagtaaaggcctttcttgtttcaatcaactgcaatccttgctgatactctcttagttgagagaggatgagtggatatttttcgtccctaggttggtgacagaggtatgctttgaagaccgacatgttgaagatacaaaagaggtcgctgaccagtcccttgtggcatagagcgagcttgagtgcgccttccccgattacgcttacgtttgtactgtgctgatgcaaccatcgattcgtagcacaattcaggagtagtggtcaaggcgctatctacgcgttggatacaggttgatactgtcattccgctgcgccgtcattgaatccaaccatgtgtatcgcgggccgaccgctaccgacgagcgatgcgatgagaatgtaaccccctccttctacctcccgaagtctttcagtagattgatcgtccttcgcaagatccggaaggcatgccagttccttgaagcgaagcttatcctcggtggaccgaggtagagccatctccaccaacagcaacctataattgatcggctgccgagcgattgcgtacaacttatcgtctcgggaatttatcagtaatttcagcaatcgatattgtttgatatccctttgattaggagctgttgttccttctgctgctaggtcctgtatgtgtaattgtttttcccgcgtaacaacaacacacatggtaggctttttgtggaacggagcgaaggttgtgaaaagccgcgcggtgctgctgctgtccgcgcccttaagtgcatcgtcagatgtggagtgatattacaaatgaagagtgcttacccgcgcttctataggcagacagtgcatgaccttagttgcgatattgacgtgaacaacgtacactttgcgatcggcgctggggaccgtaagctgaggtcggaaaacgaggtaaatatcgtccgtggtgttgaacaagagcttggtaatgtcaccagctggccacttcagcggacgcttccaccaccggtctgtggacgagatttggcctctgaatcaacttgtcagctgtgcagctccatcaagccaagtgggaacggcggaaaaacacacgtgtctgcaagacgatagatgagcacagatcccggtttgcgatcgtcatctctggcccttaaaacacatgcgaggattcggctatctggagagatggcaatttttcggattgctggctgctctggtagctccactgtgcagggatccttaagactatgttgtgtctggagatcgaagatgacacactccaagaacagccttgtcaacagtcggtcttcaatagaacggcattacttacatggaacgtagcctgcgttgtggaagcgactaggtatcgctttgtcaagcgcacactatgccaaaagcaatcatctctctgcagcgtgtatttccccacgcaggatatactgtctgatggtgcagagttcaaagatagagccgagtagagcaatatcttacggtctgtccagtacgcaatggaagagctatctggagatatttgacagcccttgaaggcctcggtctcggaaaggtaccactgatacacacttgcggttgttgcatcctcgtctttgtggtttattctgttaccattagtggctgaggttgtaaccatcacgagggaaagccctttacctttcctggaccttctgccggacgcctcgcatcccagtaggcggtttggccacattgctggaaggattctctccgagttcaacgtatcctttgaaagtcacccggagcatgctttccacatttttggcgtcttctcgcttcgactggtctatttgcagaacatgcttctcgatataactcaagaagctactcacaatgccgccctcatgcgagctacgtccattcgctttctctatcagataaccatgggttttgctgatagctggattcggctttgtgcctctgaagccgcgaacgacgaacttgtcagaggcaccgacttcattacatttgagacgctcatttgcataacgtaccaccccctgtcgcccttcttccatataggcgaagagaacgctcaaaacgcagccaagggaccagacgtcacttttagtcttcattgagcggtctccagattctgcctcgggcgccaggtacgtgccctctgctcttcgattaagcgtacctgacaaagaagggtctttcacatctagctctgaacgccgaaggaaccatcgattcacatttttctcctctcccaagcccccactgaaacgacgaattttcatgcgggacatgccaaagtcactaattctccaaatattgcggatcttgccatccgccccaggctcactgaagatcaagatgttgctaggcttcaggtccatgtggtaacaaacaagatcctccatttttggggtcctcatttcatgatggagaaagtggagacctcccgcaagacccatggcacagcggatgatgtctatcttttcctcgatactattaggccgtgttggatggtgttccatcatatatgctcggaggtcacatatcgcaagcggcatgaaaaggctgtatacagttgagccaaacgccaagctgcccatattcttcaagatgtttggacattcccaagcggagcttgcgcggatcatctccatgatttctcgctctcccgccgggtcaaacttgtcactaacataataatctttgcgcgctacttccacgggctgcaggttcgcagttccctgaacaggatcgattaggtggccctttgctatctttactttgaaaacatgtccaaagtatcctttcccaatgtcctgctcctccaagtagggtagtcgtcggtagtcgatggtatcgattttcaattcgatcccgtggttgataatcacagggcagaaatacgcttgcttccccaagaatttgtctgcgtcagcttcgtctccgtcaaacagagctttgagatcttcccggttagcaggtagagagccgacctctgttccttgtctttccatcacaggctcattctccactaggagagctgctgtagctttccttgcggatctcacagagcatgccgcaatgaccagcacgataaggaacggctgaagttgtcttcgcttcactctttcgacaagttcttcttctgtagcgttaaactggtcaagtagcgcatgtccaggctcgagcaaactgtggaaaaaccgccggagtttgtctccgtgcaaaacctgttcagcggtcccgacaggcgcaaaacgaagagattcccggtccttccttgctagatgcgagtatacctcatcgtaaatttctttgtgaaggctgtcgtacgaatctgatgccattgccgggcttgcatgggggatgttgagaagatcgtggccgggttggtgacgaggctgaggctgagtgagtccgcgtcacactgctcgatgattcgatgcgtcccacatgataagctgtgatatgctaaatagctttggtctaattgtgctggtcacgtgatttgcgctt

SEQ ID NO: 1422 - DNA, 4453 bp, Emericella nidulans
gagaaaaaagagaacacacccaccgggagagaataataaaaaaaaaaatagttttttttaaacaaaaaaaaggaccccaaacccctggggccccctttgggtatttttagtgccaaaaaaacccccccaaaggtccaaccttttaagttatttaacaaacccccaaatccccaccccgctcgggtatatttttgatctgcaacatgaacaattctggcgtgtttgctcagtcataaacgccttgcactcacagaccctctatttccttgatttccttttattcaagtcttcaatgtcgaatagatgttcggatgaaaagaaaagaagtttcgagtcgggacttgttttatacaccatctgcagatgcttggatctgcgattgtggtttgggatgtttggcgggggcactctgcatttgacgaccgtgtcttcacctgtgaactacctattgttttctacttctatgacctgttcaattcatgtgcaacattcctgtccttgtctgtagtttttgtcagggttacgctctaacccccgagcgttgtggaatctccaatcatcttcatcttattctcacattttttttttcctttgttattttttttttttggatcccttcagctgtctggtcaagacaagcacggccacatttttaacgagttgaggtgtctgttttgtgtctgcttcaaatcagttgatgcagttcctgcattagcacaagaactatagcccgttaacccgctgcagcttcgacctgtcactactgactggatcatctccgattcgactaagaaaatgacagatcaccagcattagcggtgcgactcgagacaaactagagtctactacggttctagtggtaccgcacttaagcttacatagtacatgccgacataaatgtacgtgctaatgtatgtacgtgaggtacctgtatgctcgggccgcgctagtcagacgccttactagtcaatacaatgatgcatacttcttgcttttccgggtgtgaccaaaccaccaaagttaaccgtagccctagcccaagagtaagagtcttgggcttagacttgagatcttggtagactaagtcattgcccgtttttagggccaggccccggcccccagcgggccggggcggcactgtagtggctgtggcctggcactggcgctggcactggcagcgtcgatccagcactaggacgaggtgggcataagaggcaacactaaattcggatcctgccagcggcccagcgtggatgcggatgagatcatgaggctgaaatgtgttggtggttctggttgggctagcgggtgggctagggcgttgaggcggtggatttctagttgggtttactctgtgcttgtaaccgacggtctacgggtagtacggagagcgtatcttactaaagatttaggtaacgatagacggacaagctggcgggccggattatccattatgtatttgaggctttgtgtctggatatacacttgagggcgaaatattccgtcattaaaatgcagtagtggttgtgaatctggagtgctattataactgaggttccaggttgaataatttaaatgtcccccgaatgctgtgcatacttcatctgtatggagaatggaaagtttaggcaggaaggtgtgcattgtatacttttgactgtcttccattctgtgtcggcgagagttacttgtgctgggaggaaaaaggtcacgtgctgatacggagtctccgttatctaacaacactagcggtgatttggaccgtcgctatcaaacattttccttctcagccagacttcgcctcccaatacccggacacagatatttttggtggcggttaatctggagataactcaatactgttgtcctttccacttacacttcctgcacctgatacatcccaaattgcgctttacctttacgactcgaatcggcgcattcatttgtccgacaacgaagcttagatgctccgctgcagcaatgccactgctcttcgaacgcagttctcacgaaacatagccttgagggtgtccacatctttggactcaccatggaccagactgccgcggagggctgtttcgctcgcttgcgcgacgactacacgagcacgagcaggaccaaatggctcccgaagcttcccagcaggaacctcacgaccgtactccgagaactcagctcctgagaagtctactcccgggaatcctgtcctcgaaacgcaaatgccgccgaccaatgaggcaatagcgctacgagatctcggagtaccagaaccgggtgtgccgagtggtagaaaatcgcctgtccgtcccagaggttcaggccccgacgccctgatgctcattgcaatgaataagggagagtcagtcgcgaaaaaggcagtcgaaatggagctggcgtggctgaaagatcgcacggtgctagcggagcgggtgcagaggttgctcaaacaggataatatcgcatttgcggcggagcttgtgcggaccgcgcagcgtcggcactatgatacccagggggcgtggaatgcgattcttgcgtattgcttcgggaagggacatgcagaggcggcgtttcggttctggaatgatgtaagctatgtctgcttttatcttgtcgggttatgtggatgatgctgactgcctttcgtctgcagatgaagaaacgtggcggaaaacctaactcctttgcgtatacgactatgttgcgtggaatgggtcatgtagatagaacaccccatgtcgaccctatgtcaatggctcggtcgatttatcagaacatgctcgaccccgacagtcctgtcgaacctactctcatccaccataacgcgatgatgactgcgtgtggactccacggagatatgaacctgctatgggagattgctggttccctccccgaggaaggaccgggatcaccggacgtcattacatatacgatcatcttaaattccctcaggagacagattcaaaggcaggcggccaagctcggagcgcacgaatacggggcggaaaagaccttcaatgcgaggctttcggctattgcagagggcaaaaggatttggtccgatgtggtgtatcgatggcaaaaaggagagctcgaaatggagaagtcgaatgagcttgtttcgtctatggctggccttctctgggaaggtactggagattggcacctattcgaggtgctcaagcttatgcatcaaactaccggaatccccattctggcgaaggagccctcgcgacaagtccacatcggttcgcgtagagcgcattcgcgacaaggcactccgctcgtgccagaagagcgcgaggatgtgccgcttgtggatcgaatgggcaggaaactcgaggacatgaccccaaagcgtaaccccgagcccgccgacgagctggagaaggaggaagagggggactacgagcacgttttcgacagtttcttaccgtctagtgcgaaaccttatgccgcaacccagccggcatctgaacaacccgagctcatgcgctcaacactccggaaatctgtatactcacgaccggcgcctcaacaaccgccaccccgctatactttgcccaaggagcccgaggagaaaggccctagatatatgcctataggcaacagagagctgtctataatcatggagacgtgcctgcagatgactaatgctgtgcaaagtggaaaagcatactggaatcatctaacgaaggaagataacggataccggatcacgccagatcgccgctcattcattgggtatttacgcatcctccgtgttgctcggcaaagtcgtctctctctggaagtcatccgagagcagatgattccgcagggcatagagtcgggtttaccgttccacattgcgatgagcacctgccgccgtgaccgcaacaatctcaatgtctttaagcacgctaacgacctcttgaaacttatggatgaatctctcatgattcccgaccaccgagccatgtccagttacctggatctcctcaaggtcttggaagacaatccacagctccttatgggtctgaatggccttgacccatcgaaacagtccaaccccaatttccagcacatgcgcaaagaactcgtcgtcaacctacaaacagtggccgcagacaacctccgcccccttgtttctacgcttgacgatgcgttggaggcttcgttaaagggcagacctgacttgtctggtcggcacggcgtcgatcctgaactcctcaagttacagaaagtctccggtgacaaagctgttgctgtcctcgctagaataaggtcgctgcttgttgcaattctaatgccgaacagagaaaatatcctgcctaaagaggacgcgagcggtttgaaaaggacgagcttctgttgcgcaagtataccaaggccgatgtcattgagaatttcagaaaaaggatgatatacccaactgctgaacggcaagatctcggatcagaagatccttgct

SEQ ID NO: 1423 - DNA, 1705 bp, Emericella nidulans
agtctatttatatataccaatatattttattatacattcataataacttataataaaaaacacatttcgtcgattagactagatgccgattgcggggcaaggaaggtgggggaggtattagacgaggtcgatatagagctaccggtcttatattattcgatgacgactgagcgggttgacgtgaagaagattgatagacaggttccgaagggacggcggttcccagcatggtgtaggaactgttactatggttcgattgcgggtggttgacgacgaccgattccatgcccgggctggtgaggggaaggagaagagatagcgcaaattaagaataatatatttagccaagggctctaagccaaagttagcgagagcacagcatcgggggacgtgatgaggtgtggtgggaggcttcaggtaggtgaccgtgagggaaggcaaagaggcgcggatgaggggaaagaagcaatgccgcaagataacagagggacgcggggccgtatacgatcgatcaggattaccaacgaaaatgagagattctctagtgaaagcgatcgcgaagggccagagcacttgggggtgcgcagcgcgctccgacccgggcaggcaggcttgaattggaagggattcacgagcgagaggcagcaatggagcaatccattgcggttagaggagctggaggttggatttgacgcagatgtatggtacagagcgacctccgggagaaagcagatgaacgacggtgagcaaaaggagagggaggctaactgttggtggcggaggagatgcctcgatagccagcaagtgatgatggcgataaaatgacggcgaggctggttgacggacgggcctggatccaccgggagacagccagcagagtacagtattttggggggcctggcttgtcaacacaacaaacactttgatatcaggccaactgccgtcgaaattataaaggtgttcgatttagtgcagaaaaagatgacatggtaaggatcggctacctatatccaaggagggcgaatgatgagaatatacctcagatcaggatgcatcatcaccgcgtttccgctatacgactgtgaataggtacactctcagcaacatcctatttgcccattctcaatctttcgaggtgctagtcctgtttcctttttcttgcaaacgcccctgatgcattgggccaccatatcactggtggctatgattccacccgattgttagcttccgaactggaaggacaggtatgaaattcaagatccagggtgggagacagcaggattcatgtcagacctacagggactggaaccggcgaatggcggctcactggtagcgcacctggtggtgatgatcggatgattggtggtcggcgaagatagtcgtgatgccgaaacccaccttcattgacggtgctcaccccgccccattgggctatatacggccctggacgacttccgaacctgtcatttgaacctcaacgggtatactgtttactgatattaccgcaagcttccaactgcttcccctagccgcgatctccaggctcttgctaggcagagaaaaagcaatacggaagctcgctagtctactggtaccacaactcacgattatccttgcatggtctctcatttagtgataggtaacaaatctgccgacatatacgtacagccgagaggttgctgccgcttcagggagggaaccctaa

SEQ ID NO: 1424 - DNA, 620 bp, Emericella nidulans
cggtcgttcgggtaaacaatctttctattttatattcgaccctactcctgatatttcctggggtgggctagctaagaccacaagaggacgacctctaacaaaccatggtgtaaaataattccacaggtgatatattgcgcgagatggacctcaggcagatcaggaccagtgttagatctaagaaaatacaaattcgctcgtcactaccatattcacattaagagagaaagaagtcgatattgcttgtataaccctttgctatatgtggttcagcctgggcctgataaatgctcccatcggatttggctcttcacacttccggccgaaattttgaatgatctcactcacctggcaatctggcatcggtctgcgcgggcagtggatccgaaatagccttaattattgggccaggcagatgatgattatgggacaacagcacaaatcaaatgtcaccaatgatcatgtctaccagtttctacatattttagtctgcgaacagggatttagtcgcgaaaatgaaatcctcctggctaaccccggctcaccgagccaaagagcaggtgggacattcttcagcccagtgaaaccttcaatctccggctgtgattaaggatgataga

SEQ ID NO: 1425 - DNA, 1162 bp, Emericella nidulans
agaggagttgacgtctccgcttatcaagatgtaattttgtggcgaacggcgaacgctgtttaggtcaggtggaccggacacaaccttggcttaataaggacaagcgcttgatgtaatgggggtaatttcccgacttggcgctccgaggccgagctcggagcgctatacggacaggagagacgttatatgaacaggcaggtattcttgaccaaccatagtatatactctacttgaacaatatatacaagatacttctgtacctgtatgccttggtcatggcttattatgcctaatgttcgttcggtacataaggttcagattagaggctaggttaagagagtagaggtggcggataggttagaaaaggtctataaattcgtaatagaataaacgcctgtcgatatagagagaatgtctgtgtgtctagtcttgcttacaggatctccgacctccgcggacaatctaataatccacgctgactcgctgaagatacggaggtatgagatagttagcttcggtcaactttcgccggcgtcggaggcgtctagactcttctccggccactggctatgtgatccattcttttggtttgctgaatagatcaagttgtcttccaatcatataatgaagttacttatccgccacatatcgcctcactaaccccagctgcagaagccagcagcaaccgtgagagaatcaaagtacacaaaagtgttacgccacttcctgtaatactgattgcaccgttaccgccattacccccattaccatgatcacaactaccatcaacattggtccccatcaccttctgcatcggctacagatgcaatccccgccctgcttgttgccttctccggttcgaaccccacgcgtgctgtgggaagaatccaagcgctggattgcagaacgggcgcaactccctcggagtcaatgaaaggcccaagacgtacatcataactagcgataatccctcaagtcaagttcgacggacgggactagacgggtcgccttgccaacggcgctggtctcagctgcagcctcacatttcccgtcaacacccgtggctcaggaggcgttaagggacggatttggcaggctgaaaaacgcccctatgcctccgtcaatatccacgttgagaagaccgatgcggctggtatcgatt

SEQ ID NO: 1426 - DNA, 5731 bp, Emericella nidulans
tggataactctgacgaatcatccatttttgtagcatcgtctgaagaggaaacatcgtaagtactgcaaacgcctatcctaaatgagagctgacagttgcagggaggatctttcggatgatgatgccccaggctcagaccaggaagatggactccgtcgacgccgtcgacgcagaggtcgcttctccggtcgatttggcgcccgcgggggtaaaggaatcaagagaggtccccgcaaaccggtagagcccagtccggagttcaagcttttgcactcggaggcaacatctgctttcatcgatggggactatgaccgcgcaatcgaccttgttaggcgtgccattcaggtcaaccctgagatgtttgcagctcactccttgctctcagagattttcctagcccaaggcgagaaagaaaaggccgtgacagcactgttcagcggcgctcacactcggccaagagatacaacagtgtggttgaaggtggctaggatgataacggaacaggcaggcgacgatagacaggctgtactgaacgacgtcctctactgctatagtcgcgtgcttgaaattgatccccaaaaccacaacacccgcttccagagggctgccctctatcggggcttgggtcacaatggacgagcagtaaccgagtatgagagaatccttagggatcttcctcacaacgttcgagcgctccggctccttacagataccctttccgagcaaaatcaatatcaaaaagcgcttgactattggtcagagagcatacagcactatatggcacaggagcctgaggagaccccagagttcacgtggtctgacgctaatatttacatcgagctgtatacgtacttgggacggcatgctgaagggctcaaagctgcgaaagcggtgtcgcgatggttattggggcgcaaagacgacactatgtgggatgactttgacgaggatgatcgtgaatgggaccacgccgacttccctcgaaggattaaagcagatggttatattccgaaacagtggccgccggactcgtatggcccaggtttaccccttgaatttcgcataaaactcggtctcttccgtttgaagctaccggagcggcacatcaatgaagctcttgtaagtctatatcagaagctgcttttttgttctctactaactctgtttagcatcacttcagatggcttaaaccagaagatacctcagacgggtctctagtttacgattacggtgacctctttcgagaagccgccgacgcgctcaaagacgccgagatgttcgaggacgcccttcgattctataggcccattcagaaaaccgagtacgcggatgtcagcttcttcatggccatgggagattgcttcaagtccctgggcgaactggaagacgcagaaaattgttatttgactgttgcagaacatgacacaagcaatattgaatctcgagtgcaacttgccaagttatacgaaagcataggaatgaccgagcaggcgctcagatatgtcaacgatgccgttctactaggacggcaggagcatagaagtaatcgccgacggaaggatacccggctcgaagagctcgcaagggagttcaagtcggtgaatgtggccgcagggcctaaagaccagtccgttgaatcctcatcagcccttggtaacaagggtgaggcagaaaggaccgaaaatatacagttccttttcaagaagctgacgcaattggaaccgaaactccaagctggagactctgaggccacggaggactggctagacattgctgacgctcttctgcgtgaatttcgttccaacagaatcttttacccgcttcaacgcaatgtggtattccttggatatagtagcaaggcgggcaaggatgcgcttatggatgaattacaagaaatggcgaatcggcttcaggagtcactaggtgcggtacgtccggtaggcgtcacgtccgggcttagctaacttcgcataggggtggatgaggaatttccgcagtctacaatccctacagactaccatggcatcagtttcgacgaatggcttgacctattcctgcagtacgccctaacggtggcaggtcaaggtgaattcagcgaagcgtatgatactctaggagccgctgcggacgcgagtgtctggtaccactctagagacagctcaagattgattcatgtgtgctggttcagtaagtaccttgattgacactctcagcagtaaactgattgacttaatagcttgtgcactccgactccaagacgaagaaactctcgccaacgaagctcgctggtttattaaagagtaccaatttgtgacagacacataccgcctgtttgccatgcttagctgtctcagcggcgaccctcaccgatcgcttttccactcatcccccttgatgaagttcatgctccgccagattaaagccatagactttaccctccccgaccacatcgccggcgcccgtcacaccaaagccatccgagaatcaatctacaaggaacgagcagcactatcaacaaaagacgagaagggagagcctatcccagcagaggaaatggacgtagccctacttgtcctctacggccacatcctctactcaggaaacagcttctacccagccctcaactacttcttccgcgcgtacgcactggacgacaagaatccggccgtccttctttcaataggcctctgctacatccaccactccatgaaacgccagtccgagaacaggcacttccaaatcatgcaaggactctccttcatgaacgagtacaaacgcctccgcgaacgcaagggaacaccccttgtcgagaggcaagagatggaattcaacttcgcccgtgtttggcataccctcggactcgcgcatctcgcagtggaaggataccagcgcgtcctcgacctcggcaaagaaatacaagcacaattccaaacaaaacagttgcttactcctgctcacgcagccaatggagcgcaagcagacgataacgatgcagacatctcaatgcccgacgtcgactccaatgtcaatatagacgtcaatgttgatcgggccacccacagcgtagaggtgaaaccgcaatcgccacagcctgtcatagaaaacttctcccgcgaagcagcagttgccctgcaacaactgtacgctctcaatggcgacttccagtccgcacaggcggtcacggcggcttggcttgtgatctgagctcgcgtaacttttgagttactaccaaggttgcatgcgaacagaagcaggacaacagaagacgctatcattttgatacagagtacaccataccctcttgcatccccgcatcttcccccatccactaagacctaaaggctcagatacattctctgcgttcctatctactccgtagtacggcgtacagagtacaaagatggagacgatatgcaaagacttgccaccccctcttacatatcagcgagcaatcaaacgaccaagcagccaaccaacagtcacagacccaattccaaaggcgtggaatgtcacacctacagaaattcaacgtgtaattgaaggatgagcataatatcaggtgtggcgtaggctccctgttagcgcatgcagcatgacgtgggaggtagcagagatcagcatttagttgacctcaggatccagggtcatggcgcacgccggcagaattcggagattaggctaagatgttacgctctggtactatcatcgtagggttggttaggttaaatgatgaagcatgatgaagtctcagactccaagcacgagatatactagcagggatctatagggttgcttggctgctgtgtccataagtcatcaaccctatggacgcatagcaaaagaaacccgagactcaaactaaaagtcaatcttaaactaccactgaaacaatatgaatgagaatcaatatatatggttcggttaagccaaaatcacacgcctgaactttattgtacaatagacggaagctaccacccgtgagcacgcatgagactgaaacgatagagagactacaaatcgccgccatctctataaaggtcaggatcatcaaaaaagacggccgactgcctcctcatttcttcaaggttaaacaggcttgagaaactcccgcgtctttctgctgtccctgtaccaactccagcttcagccccagcatccctctgcctactaggcacgatataattatcgtctacggagctgttctcagcagatactataggatcatcagagaaatctgagaagctcttaacgtaatcgtagctgtattcagagcttcgctcggggaaattgcggttgagacgctcttctctcggatcgttgctcttctgatctgcaccgccggctccattgtcaaacgggaatggctgtatcgacgtagcaccgacactctctccatcagccgagaaacgatgtagaccttccaggatagcgtattcgatcttgagccgattcttgataaactggattttgggtaatgtactttgctggcctgtgcggagcatgcgagcaagacgctcagggctgggatcggagagaatgtggtaaaaatctgacggcactgtcttcggccagattgtgacggtgccgctgaacttctgcagccagatctcgctccagtcttggcccagggggcggggaaggagttcgaggtggcggaggactttgagccatttgtttaggtcgagtttgatgtactgttctatggcagatccgaggaagccaccgcgccagccccggcctttgcggtgcgttactggccggccgacggcgccgcgggagctaaagaagaaaagatttatgtgaggatttacctgaggtaaagttagaaaacatctggggttattgggtaagtttaacttacctgcgagacgatggtgaagttgacgttgaagtgtaaattcagcgctttgatggggatgtccgttcgcagacttccatccttccatttgtggccgaacgagtacggcgcgagggtaccgtcgcgtttcttcgtcatcaggaccaccggattcaaaattccaggaaccgccgcagatgcaagtacggcgctccatatgacgcaattaggcgatgtcaagtagttagccaagatcgtcggcgagtgaggatcagatggcacgcatgacacatttagtatacgtccagtgcgctcgtaggcttcccgaaacgtggtggaacccctgcagaaccagctacactggcgagcccaatccatcgtgtcaaaacgagcgcctgtgcgccaccaccgtcgcgcccatgttgtgaagccctcggaacatgccttgattttatgcgctagagcaggcaccagcagctgctttagctcatcgtctgtcctagtaccaaccagcgctgcaacaagcgctcctcctgacgtccccgtgatgatactcggaagcacctcattgtcaaggagcgctcggacaacaccgaaatggtagtaggcgaaagtcgctcctccagacaagcacagcgcagtccgaccaaagtttgtatctagatgcttgaaatggctgtatttttcctcatttctcgcctgtcgtgagtccgtaattaccttgacacacgcatgtacctcgtcgatgtaatcctgaacaaggtccttggtcccggaataggcttcactgtaaagccggggattttcaactccagcaaaattggccttgacgcaggcttcaagaaggttgcatagctcttcgaccaccaccgtggagccagattcgccacgctt

SEQ ID NO: 1427 - DNA, 4439 bp, Emericella nidulans
ggggaaagcccccggggaaccgaggaaaaaaatcccccgggacccaattgggccacaaatatttgttttcggggggccccctagggttgagcctcccaggggggataaaaaaaggaggtattcattcctttgagcacctctggagagagagaagcgcccagaccacccgggccaatggtcgcgggacaaaacccatttctcttatattggaaaagatgttccccgaaatgcatcgagaccaacccattggccggccaaatacctttccggccatcgcgggaaccccaggtttgccttaaaaaagtacctatccccttaaaggtcccatccaggttcggcttgaacctcacccggcttcccccccaaaaaggcccattgccggacctcaaaacccacatatgaggactcacaggtagttgcacctacatgccttggtgttggtcacaacatattcactcagcgtgtttttgattactgcatggttgatgaggcgtcccagattacactgcctgtttgtctgggccctatccgaatggcgaagacatttatcctcgttggtgaccattatcaacttcccccattagtgcaaaacaaggaggcacaagcagacggtcttgatgttagtctcttcaaactgctttccgatgcccatccttcctcggtagtcaatctcgaacaccaatatcgaatgtgcgaagacatcatgcttctttccaacacgctgatctactccggtcgtcttaaatgcggcaccgccgaggtcgctgcgcgctccgtagagatcccgaacataggcggtctcaagcagcaccacctcagcgatttctctcagacctgcaatagccgccagctgtgcttggggacaagtcaaagccgctgctggctacgcgatctagtcgatcccttagccaaaacttacctcgtcgacacggacactcttggaacacccgcaggtgaggtcgccaacggctcgcgaatcgttaacccgattgaagcaaccctctgcacacagctcgtagaggcattcatctcatgcggcattccagcccgcagcattggcgtcatcacattctaccgcagccaactctccctcctgaaacagaacctccgtcatcacctccccgccctggaaatgcacacggcagataagtttcaaggacgcgacaaggaagttatcatcctaagttgcgtccgaagcaaccaggaaaattacgtcggcgatttactaagtgactggcgccgtgtgaatgtcgctttcacaagagcccgcacgaagctgctcgtcctgggaagcaagaataccctgcgcaacggtaatgagctcctcagcaaatacgtggatctagttgagaatcagggctgggtatatagtctcccgaaaaacgctgtggagaatcatatctttgacgaagttcctctttcgacgtatgaccaatccacgcctagtctgattaagagaggtagtcccaggaagagcccgtcggtgatgaagaagaccgcccgcaacccgttaagtcctgttcaacagagactgtttccgacggaacccagagaacctgcgaagaagggtatgaagctcctcaatggccaaaagatcctcgggaatcgactggtgttgcaggacgtggttaatgaccttgtgggttgatgttactctgtttcttttgtctctttttgcattgcttagttgattagtgtccctttggcatctgattatagggttgtatctggtatatcctttggcttggttgggttcatggtttgttgataagagcttacattggacggacgagcggtattaacggtttattggatagcggcgcatcaaagtttacactcaaaagatgaatgttcttttctatagtatcgatgcaccaagcatattcccaacagatgaaatgccgtgtgttcttcgcctctgcgtcttcgtctttctcaacagtattcccgccgctcgctggcaatgccatgattgtatacccatctttgctctcaatcgcgtcccttccaagggtgtttgcagaaagggcaaaccaagcaggcgtcttgcaaaatcgaggcgcacttttccggctgattaagtcaacaaacgcgttctaagtggttccattgtagacagagtagagtagaacatacaaaagcgtaataaacaactgcgtgatccagtgcgggggtataagcccgccccatttcaggctaatgagatcagtggctatggccgctttaccacttatctcaggcgcaacatatcggcagagatacgggtctatactgtcagttgcggatacacgtcgcgagcgtatagataccatggccagccattcggagacctcgccgcagatgtctcttagatctggctccgactgtgtcatggcattcagttctgagaatgagggagtgacgacgttatcgtaggtggtcaagactggttcacaggggattagttcgggattgttgccctttagagttgggtcgcctggtccgcctgttagttcatgtctgcaagcccctgggggttatgttctgtaccttctgctacaccggttgattctgtgcctagatcgaagaatagccacgtcgtaggttggttgaggacgttcttgaaagcccattctactctttggaagcccttcttgccgtgcagcattgatggcagccgtagattgagctcgataactgaaaatgtcattagtcaagccgacagaataaggctgtatggattgcataccaaacctctcttttccatgtttcttgccgccagtgcggactgggcttgcctgtcaacccagatttctcatagtcttctttgcccagttccagtttcagaactcctaagacgaatcagctaaaactgagcgtcggacagcgcttcatcttgctaccttctctgagggtgaagacgttgtccagccccgaccggccttccgatatcataaggatattccctgtataaggcatcagtaacgtttgtctggatatatggacgcaaatacgaagtcattcctcccaagcccctggctatcgaccaggtgggataggtgctgggccatagttaggtactctacctgacttaatgttggtgttgaagaagtctccctcgatcagagaagaaagcgtcatagaaaggcgagcatatctcagcttctgcaggttggagtctaatgagctctcaatggacaagtagacctcctttggcatggtgacttcgacctggcacttagtcagcgggcctctaatgactctaggggaaggatatagaggaggtaccgtgtgcacgaaatggttgcttaggattgcagagaatgggggtttcttgataggcggttgcttggggtcgatgaactgaggcagttgggatatagtggtgtaacatttctcacgcctagaggcgtcatcctcttctaatccaaacattataagtaggttcacggggtgctaaacaatatacttgcttttcaattgaaagcgcgagagcagcttcaacaacgggacccagagagtgaaaataaatcgcgcctcaggcagcactcacaggccgcaacgtcacgggcgaaattccgacaagctgaactttgcgatgatgatttgctggagctcaagttactggaccattccttcaagcctgtctatcctcgccatttcgctcatttgttgatatcgctgttgactctgttcactcgcagctgattactgccgttacgagcaagcaattcaaacttctagcccctcggggcatccaggctccgctagctactccgcagatatacaaacatggctcctccgcggcgaaatttattgcctaaagaacgcttcagttttgcctttggctcactacggacacaaagctatcatgatcctgctgcaaagggacctgggacacatacgtacgtctcccgaacgagcacattgactgcatcgtcgaatccttgaaagcaaaaagctcatacgtataggaatgccacaggattcgcacaattgcatggaacccgactggtcagctagtcgccactggatctcaagaccgcacccttcgaatctggaatcctgagcgctcacaggcgcgatattctacggagctgcgcggtcacaccgcaggggtcgaaaaggtcctcttcaacccggcccgagactctgagcttgctagctgttctagtgatggcacggtgcgaatatgggatgtacgttcgaaaacatgcgtgagccgtttagaggtcgggagtgatgcgtttactttgtcgtggtccgccgacgggaaggtcctcatcgctggacgaaaggtaggatataatcaactcacgcgcgcgcaaccatacacctacttacgcgagctaggacgacaccctcattccaataaccgtcgaatctccctcatctccaaccgtaaccggccaggtaaccttcgtcgagcccggcttctacaaaacccttggaccacattc

SEQ ID NO: 1428 - DNA, 1478 bp, Emericella nidulans
ttgaaggtagacgtcctcgtgagaacgccgcgggaaccgggcccatggaaggcgttgaggatgtcgatgcagatacatttatcgaggctgtgagcgcaaatctgaaaggagcgctttacgtcgcgcaggctttcttgccccatgccgcgggcagtgcagtgatcattgacgtcaatagcatggccgcctatctgaattttgggcctagatttgcagcgtatagtattgccaaactggcagtttatcggctgtgggattccttgggctcagtgaattcagggttcagtgtataccacacgcagcccggggttgtggatacggacatgaatagggctgctggcggagttaaggccatggggtatgaggatcatggtcagctcatcagccttctcttgcctgctatgaggattatactgagccgatgctaacctacgaactccagtttcccttccagcaaatttccacgtctggctcgcgagtcctgaggcccggtttctgaaggggaagttcctgtactcaagctgggatgttgaggagctgaaagcccgagcagaggaacttgcagcgagtagagagcttactattggacatgtcggatggccgttcgactccaatgaaggggaaatcaattggaacgcctaagactgcgcgccacctgcacaaagatgaagagttgaaacgccattatgtcacctagcttgccctagacttttcagaattatatgtggcccatagatatgcagctataggctatgattatgctaatatcagcaagaataccacaaccctccgacaaacgtgctaaaaccacatgtactgggtatacttcgtgatggcgagaactgatgcctcaggctcccatcgctgtatcgataagactccagttaagaaaccccgcccttttccatcgcatcacagcaattctcgacttcatactcacacacataaaatgacggcgccaaatccttccaatggccagccggtcaatgttttatttgtctgtctcggcaatatttgtgcgataaacccgtaacccatgcttcactcgcacttatactaacgaatgcaaatccaaatcaggccgttctcccatggcagaaggcgtttttcgcaatattgccgccaaccatcccctgatcaataacattgattctgctggtacaggagcctaccatgccggtgagccgtcagactcacgaaccatgtctaccctccgccgccacaacatcagaaactaccaccatctcgcccgcaaggtcacactggaggatttcctcaacttcgactacctcttcgccatggatgaatataacttggaagacttgctggagttgcgcgcgtctgttttgtcgtcgtcgagccagtccgcgggacgggcggctcgcggcaaaggaactagagcggcgacgaccgcgttcgatcgctgcaacgtcgaagctggtgctaaagttgcggaagtgcgcctgtttggtgattat

SEQ ID NO: 1429 - DNA, 3777 bp, Emericella nidulans
ccatctcgtaaatcttgagctggggtttgtgttgctagtccacttccgccaggataagctgcccaatgccggtacggcagattatgacttctgacgaggtcttgccgtgacccaaaccgttgttgttgtgaaaacctttgttcgccacggttccaatcacaccggccatgtcatctacctcgcctccgtgcttcaggctctgagtgatgggatccgcgatcttcaggtggatcaggtcggtcggggctgtctttccgtacgcaagatcctcaatgagtctcatgattccatcgcggtagaatgatcgttggtgacgtagatctcatttagcgtttggaaatacacgtcgtttggggttcagatcaggggatgccagacggaccgcacgtgcgttgcttcggtggagccgattttatgatggaagatctccagccacgagcgagcttggggaatttcagaagggatcgggcgagtagggtcgtcatagtaggccaggttgggcaggtgattcactgccacaatgtagatggaggttggatcctctggaggagggcagatatcgattccatgggtgttgaagggtcccttaaaactacgcaacgtcaggcgtgtagcagtcagagtctatacactgtttgttagccatagcgcttcggtcagggaccagtttgcgattcgaaggccagagacccgcaaagagggttatcttctccgagtgcccggccgccatccaggcggcgccaaaccctaagcgatcgtcggccagcacgtggtccggccaaagatcgagtccttctagcgttcattgctaagcgccttgtgtggcggcgcatcaaggagagatggactcttgaatgggcggggagaaggaacgactggttccggctccggacaagaagaatctacggctatttgagaatttccccagccgtacacatcaatcttggttcacacgagatcaatgggtatagtgttcaatcgcttcttgtccaacatcgatgggtctggttctgatgagtgctacctgggtcccgggtcccagacgccgagacctgtcctcctacagtgcccattgtacacggatctgaggaagacgatgttggacaagattcgggctggacggaacttagccacatcactgactaccatgcggtcatgtcggactcgcagagcacccgctacgtggccgaattccggtaagaataggtctaccgggtcaatctcgtcatgtcaacgttgaaccagacggaggaagactcaacgactggtcaggacgaactcgcagcggaataggtgacgaagctgctggttgtgaggaacgcgggctcccaaggcctgtcgagaggcaggatcagctagcacgatgatgactgaaactttgactataattcatcagcgtaacgttcagcggatgataatcggtctattagtgattatgtctctgacctttagcaaagagttctagtatatgatagagcaacctacctatatacttaagagtgccaggcatagctactcgctagcagacttcaaacactaccattggtactagactttataaaagtataccgtcgagtctcctgctatcgagctatttgtatgacgtgtaatatcctgacttggtaaaagtaatcaattgtccgctgtaagaggtgaatatccctaatactaggtagataactgttacaacaccgcccaagtcgcactattgcgcggcgtatgtgaccaacagaaacaatggaagggcagttaccaatggatcccagagaaatacttacaccagacaggcttccatagaaaaacagtgcagtagtcagctatctgagactaaactttcccaattaaattcacccaagtccaatacttggaggcacccccatctatcggcacaaatatatatcgtacatgattatccctgcaaggcctaatccactcgagcaatgttgcccagacccacaagccagagctcattcatgttcttccctgcaaacgcaatgctattgacgcgaaacggcgcctggatctgcactaacaggataccggtcccatccataatgtcgatgggatatccagaagcggcgacgagatatccgttgcgcgcgatctgcagtccatcagcccgcccactccacagcctggtagattgggcgttgattgataatggagctggtcttcgtgctatattgcaccacatcaaagacataaatcgtctgcggacctctgtagtccaacgtataagaaatctcatcaaagggtaccgatagagaccctgaagccgcgcctgtgtcggtcacgtacaagattttgccagacggagaaaagcgagtgccgttgggttgtctcagagctgtgctggccacctgcaccattccagtgctaggtcggaatcgatagatggccgggttcagtgacggcgcattagtcgacgtcttgtccagccagccgtagtctgttttgatttgcatattcggatcagcgagtgccgcattcaggtgaataggagacttgacttaccgtcgtctgtgaaccagatgtcgccattggactcaatggccaagtcatctgctccgttgaagtagtacccaaagtaggtgctaaggagcggtgtcgtcttattcgtcttggggtccaaggtgtagattccagtcgtaaagaattcagaggaggctattatttatgccggtggtgctgtagtagagcaggccgttgtggtaggctgaacctgtggccgcatacagcggcggattcggggtgaaatattccatattgggcggcgatacattcaggttgataaccagcagctcggtgtctgcctgatcgattggccagacgtacagacggcccagttccggcacatatgtcggagcttcatggtggaccatgggcgtgctaacatcatctggaacgtgggcgcactccctcggatagcctgggctcgagcaagatcatacacaatgaaagtagcattcgcgatcgatgcaaaggatgtatccgcggggaccacagctgaggcgaagctgcccgtggccccgaggttgatcggaggagttctggagaattttccaggcagaacactggcatatttgtggacgcagattaccgtccttttgtcccatgatccgcatgaggatagcaccgtctaagcatggacaccaacagtaaagagtgaatagacagcaaagaaaagaagaaggattgcagtcgccatgatgggcaagaatatgaaaggatcgtcggttgatgaatgatgattgacggctattggtgggtacttggaatccagtagcagtgccgcagtcccatttatatacctcttcccttcgaggacgcagacatatttcgattttgggttcctttgcggaccccgagctcattgttggagcgcttagggctaaatcggagccgaaagtccgagggccaaggctatagtagagattcaggtacattcgcaatgccaatgtgatagggcctggttggggtcgaaatgtctgagaaacgaggctgagtagagatccaagaagagcgcattctgaaattgatgctgcggaatgccttagctgcaggcccctgcataatctgacagttgcatgtggtgattccacgtgggggcaggggtcaaagctcacatgagttcgtacggacaagagttaagctgctgtttgtaacccttttctttttagaaatgatttctgatcttataatgcgtacagcgatcttctctgaatctgggtgtctttacgtacttactcgggtatcagtcagtcgatcgacgtgcct

SEQ ID NO: 1430 - DNA, 4029 bp, Emericella nidulans
taccaaccttgagaagggctggggtaaactgcggcttctactcaacctctatcccttccctatcctttcatgccaatgtgtttctccgtctcaatgacaatctctaaagaaatctgactgtcagaccatgatctttaggtcctcagctacgtaactgcgactgatcatttcatattgtcttcaagatttctcagcatgggagaagcatcgtctactgatatcatgccaacggtgagtccatgatcccccctgcctccatgaaagaaacccacaatcattcgctgacggcttctcttaaggtgagcccagctgaagacctagactgctcctcgtccgacgaatctgagagtgaagtcattgctccgacccaagatgcctcgcaacgccgactgattcagaaagctcgcttcgaagcactgtcagtaaccggtgcccgctgcgcttattatttgagggctaacacgctgctagcctcgctaatcttgctcttacctacgacgagaaagtcgaagttgccaatgagtcccaaatatcctcagctcagctgatttcttccaaaaaaaaagaccagcagcaaggcacgctggatcctcgagagtatcagatagagctatttgaacgggcgaagacccagaacactattgcggttctggctacaggtatgcatgccgtccgaatcgtgttccatccctaagccgattgcaggagctggaaagacatcagtagctgtgctcttactcaagtacactatcgaaaagaactcaacaaccgcacgaatggagagctacacatgatatccattttcctggtctacaacacacactatataaagtgtggctaagctaatatggacgacaggttgatagcgtcaccctttcctacaaacaagcaggagtcctgcggaataatcttgatatgaatgttggtcgcatatttggagctcttggttttgacctctggagtcgccagacttggactgagtttctcgagaaatatatggttgttgtttgtacggcggaggttttgtaccaatgcctgctgcatgcccatatcagaatggaacaaatcaacctcctggtattcgatgaagcccatcacacgaagaaagatcatgtctgtgcgaggtatgtcaaactgaattagagatatagtccatatatttagcgcattacaggatcattagggactcttatttcccaacagcacaatcgaagcggccaagggttctcggcatgacagcttccccagtagacaccaagggcgatgttgcgcaggctgctatgtgagttgctagcatgagtttatctgtttccaagctaagatcctgcaggaatctggaattatacctggatagcaaaattgccacagcatcccaactgtccctagtacaccaagttgtcagacggcccaaggaggaggcctggatttatgacagactcgaacaatcttttgggactgagatatacaggcttatggaaggtcgattaggtgacattgaggacctgaaacttgtcttcaggtttgcatggcaggcaagcttcgagctcggtagatggtgctcagatggcgttttgaaatacgtattctcggccaaaatgctaccgaaactcgagggaaaatcaaaagaactgtcgcaactgcgtgacgctagtgaggttgctagcagttatatactcggcagtccagaagagcccggacagtcaagccataaagtccaggtgctgcgcagaagactcaccgagcattaccgagaaaccccagagacgagaagtttagtctttaccaccaggcgttacactaccttgatgttattggagctcttcaatgctttagaaatgcctcacctacgacctggactgctgatcggtgtgcaagctaatgacttcgccgggcctgaaatatcttgccgggagcagtttctagccatagacaggtttaggagccgggagattaactgcttggtaagaccttgtcataatgtcaagaagtcattttaaccagttagcagtttgcgactccagtggtcgaagaaggtctagatatccctgccttgaaatttggttatacggtaggttaagtgccaatgctgctggagaatgctcactgcctaggttcgatctgtccattaccataattcgatatgtgcagagccgtgggcgagcccggcgggtcaattcacagtaagccaagtttctaccgaacgtatatgtccttaatactggtcctcagtatgcaagtctcgttgagaaagacaacgacgccatgatcgttgctgaggcattgcgtcgtctggccggactgctaagatcaaggcgagtgaaaaggccttggacattctggagaaattaagccaggcggaattcgtgagacattcaagtgtagttgcccggacgctgagaatccttcgcaccacctgctcaatatatctgaacagatacatgctcatagtattactggtttgcaactcacctgctgtaacccagtgtaggtatagacctgtcttcgcatatatacggcttcctcggcggacgtttaactatctgctctctccagctccctggattggcctcccatctacggaatttttcgataacctagccagaaactcgatcaagctatcatcctcaatcatacttctcgtctctctctagttttggaaaatagtgctgcatttgatctttgccttcaatatctgagccaaggctagtccttgctgcaaaatattccggatcttttgcacatgctacaattttgtagcagctacaggctatacaatgatactcacgataatgcttgttgtatttctgatcctaactcggttgagcgataagataggtacaaagctacgctaagttagtattccaggcttatatagattaccttgttatttaatttgtacgttgtaaggctttcaatagtattctagtaaatgatgctctggtttttactctgagtacatataggggtgattaataataatattgcaacccccctttgtacaggcttggggtaagaaaattaatatggcaaattactcagagtttcaagtattgattctgcatatccatatatagcaagaatactgatttttgtaacatagacggctcattacctgtagaatgggtggacaattgtcatcattagatggccgacgtggccgcctcttaatatctagtttactaaataatgagtaagcgagctcgaccccagggcaggcggcatcggatagcagtatgccccgacataacggcccgatcacgtgaagtaggagtaggaaccagagaaacgtggctggcggctaggccaggccaggactagcgtagatcccccctgagagcaaccaaaaaacacgccgggagggctgccgcgtctccagttatcgctgcactcttgtacctcaagtgaccaactcaacctctggacaggttgaagctgaaatcacgcccggaaggcttcttcaagggcttatactaatttaatctactctttcgtcccttcgattttttagatatcagcgtattccccgttcgtgttgcctatccggcctcttcaccacgccgctcttatcctgttctgttgtcgttacggaccagcgtcgcaaaactctatctgcccgcgaactaccctcatttatattttggaacgtgtttcttagcttctgatcgaacatcgatgatacagtcgggttacttctcatagataatcgtgatggaggtcgcctcttcgggggtaccggacggtgcccccaccgccatatcccaagggcctttggtcgatgccgacgctgtggtggaatatttggccgatgtgttgcgggtgactctaggagcgctgagaagcgaactagagaacgccggcagccttctgtctaagaccaagtacagtgaaaccgcgcagagatgcttgcggtttgcgtcggaatcgcaagtcgccctctacgtgcagaaagaccttgtggcgtcagatcatacaaatggaactgcggacagtgagggtacgtatatatggtatactgtggtcaatatgaga

SEQ ID NO: 1431 - DNA, 1539 bp, Emericella nidulans
tctaccaataccactacgcaggacgcccatttctctccgccaaacgcgtccacagctacattcccagccgcttcaatgcctcattctctgggctgccagggaatgacgactccggcgcgatgggcgcattcacggcctttgccatgatgggcctgtttccgaatcccgggcagaatgtgtatctcatcactccgccgttctttgaggagatttccgtagagaatccggtgacgagtagaacggcgacagtcaggatcagaaacttcgatccgcggtatagtagtatatatattcagaaggcgtggttaaatggagaggtctatgggaagagttggatcgggcatgagttctttacggaaggaggaacactggaattggttctgggagaagaagagagtgaatggggaagagcgagtgaggaccggccaccgagttgggagggagagtataacggcggcactgcctttggttcattctaatcacggcagtctgtttgacgatatggtatggtacatagggtttaggcgggagagggtaatcccatgcatcctggggcgattaccagagtgaggagcagatagactcccaaagcatgcagctgctttgttaccagacgtactcgtgaaccctgcaatatctcaagtcttaatgacatgcaaaacatgaagaaaccaaagggaacaaaacaaaaagtgggggaggaaaaaaagaagtgcttccaacgagaatcgaactcgtgcttgcggatttccaactcctttagataggagctgtcatacttagtatgagaccgccgtcctaaccactagactatggaaacttgttgaatgtaaagctttttatattgctttataaatcaagcaaataccatatcatatacacctttagcacccttggtagttctgagttatgttcatacactattgtaaatctacctgagtagtaagcaagtttctccagtatcagcctcggtatccgattatccccagtgtcattatgttgaattaattgattggacctgcgtggatgcattaaagagatatgtacgcatatataaaatctaggattccattgttccgcaaggcctgcttgagccccacctccacgaagcgttattcaacgtctgcgggcataagtgaaatatgagctccactaaatctcacaagcgataacctccagacccagatcttgcatagcattcttcctctgttacccggcctcccacggcccggagcattctgcacaatagcacccaagtgcatagtcttgccgaactagagatcctgagcattgtgcccggtacctctaggatctccgttcaatgcactcagtttgtatcaatccagggcactaggggccccacgaagaataccctagccaaattacccgtctccccttggttctgcgccaggggacgtgcaatcaagtctggccgaggaagggcatgctgggacctctagttcgcctgagtcttaaagtaacccacgaggggagaaatgatatcgaagggtttacagacgctaagtcggcaagcgtgct

SEQ ID NO: 1432 - DNA, 1436 bp, Emericella nidulans
gcgacgagtaccggacgaggtccgcgtccgggtctctccaaggcccgtcagctgttcgacggtgaggccgcagggccgctggtacttggccgctatcctctgcagcaccgcaaccaccttctcgtctttgccctctgcgacaagaaacttgggcgtctcctccagtcggacaacggtaacgcgcagaatggagaggacaaagacaagtgcgccagaggtgtaccagacgtagcgccagccctggttgttatcgtaggtgcaggtggcagcatcggcgcacgagtagttgggcattaatgcccatgcaaacagacccgcgatcaactgaccgacgcctacatgagatcatcagcatcgaaccggaggtaggacagagatggatgttgtaagttttaccccaccacgccgccatcagagtgacgagccacgaatgttggcttggaaggtattccaggaagaccgccgtgtccagcaccagatttccaccggcgccaaaggcactgaggcatgtgaacagcccgagcacgatccagttcggggatgcgccagcgacgaccgtgaagacagccgagataaacagcgagacgttgaatgcgaaccgacggccgatcacatcagctgagaatccccagaacaaagcgccgaccagcattccgacgtagacagcgatcgtcaagccggtatcaaagctgggctggaactcgagtgtcgcctgtgttgagatcattgactgcagaagcagaatgagcgaatcgaccgcgtatccgaagccgttaaggcagaacagcttccactggtgaggcgtaaacccgatctcgtcaatcgcctatgaccgtgagaaagaattagtatgcgacacggaacaatcgtcgacgctctctcgtcgggatataccattcaacacgcacgtcgttaaccagggccatcttcgcggtcagcaccgcatccagcttctcgccgctcaagaggtcactgtccccgagataaacagatcggttctctgacgcagatgacgcattctggttcttgtcggctgtctcgcaggcattggcagcgtgttcgacgtccatggctacaatgaggtgccgctcgcagtttggggagcaggaaacgaggaacaaaaaataaaaagaggggaagaggggctagagaattaacagcagcctgagtaggagagggatcgagtcgcattagttgccgtctctgcaattgcacgccatttcccacggcactgggtgacactatggatctcgcagaatcctgggcgcgctgctcatcacttggttcgcaaccaatggctgggccccgtgggacggcgtttctgagagcagtcaggactgaactgagacccactcgcagtgtcaccttgaaagaggtccattggccatcaaggcagtcaatggtcgtctcgtcgattgatcggcatgattaggttg

SEQ ID NO: 1433 - DNA, 2008 bp, Emericella nidulans
ccactccggcccgctagcctaagctgtgcgaatctttatgataataatacagtatttgcatttgcggtgcgactctggcgcggtctcaattttcgagtatctcgccgtaccgacgacaactcgacgagcatggagcctggagtcggggatccccggtcatactccacgttcctggctcacgagcccatcctatttgtcagcatggagcgcctgtacctggcggcatcagaaacaaagtcagcttaagagcggggacaaattgacgtgtaattccggttttacacggaatacatacagggaatggatgtgtcggtggccgcagacttaggccagccttactggggctaaagagtccagccgtcattgggatggtcacggctgcaataatccatcttgatcgcggccatatgtatgtaccccattatagcgtgataagaacggcgttccaatcagtgggttcaaagtctctagactgcagtcaccgaggccatttacgaaaattgacagagggggaccttgtacgcagtacgtcgtaccctgttccggagctggtgctagtggcggcatccgcgctgccctaggtaaggcttcagccctgagtcactgccctcgaaggaccctgggttatcctggcccagcggcggctaagggcctgagcatacatggacaaatccgtgacatcctctttatgaaatttataataaagattcgaaataaaaatcgattgtgtagaaagtagtttttgtatatctagtaaattgttttgatcttgttagctttccatcatgtcggatagaccgcctacctgatactagctagatagtacaacgattatctctgtaataatactctttatattataaggcgcatatatactctatttttcactaattataagggcactttgtgcaaccaagcatactcccagctggcccaaaaggccactatggatcaggccccgcggtccagtttcctcggatcgcacctctatagctgggtcgctcctgacagaatacctacgctgattccaagtttcgctagcttgaaaattctttttcttttgttctttttttcttttttcttttcttttttttttttggcaagacactttaatctaataggggctagttatttatgcaatacaacgagtaataagggcctggcgtgccaagagcctgtggagttcaatcaatgcaggctagagggtatatcagggcagcccctccgagtcaggttgcttcagatctgaagcatagtctatcgttcgtccgacctatagtgcccgaggtactctgttctatggtcctaccttagatagttatagtttcatttttcacagcggtgtggtggggtcgcggatttcgcaagctcttgaagaccgaaatcgggctaaaggagcactgatccatgttccaggataccaggataccgtatagcagcggttgctgcgccctcgctcttcactaccgataggaaactatcaaccagtcggaacccaaaaggtctccattcatctctgataactgtcatcgaggacggtcgtgcataatcgttgccttattggggtatatctccaagaatagatctgtaaggtaccacgccatggagcctagacgggctcccttcccaaggactctatatccggtccttaaaatccatcatattgcagattgatatctgctactggacgcgctaagacagggacagtggtgcaccccggcctccatctaccgttgagcgattcgtcgactcgtctagaccgtctggagcgggggttgtcgtcatccacctccgcgacaatactgtactagcaactgtactagcaccaccaggactaggcgtagtgctaagacagacccaatctcgccgtgaagtcctcgaggaatcatggcatcaggcgaccaggcggatccgctgcagtcatggtatgacaatcgttcaggcacagatgtgtccgatcaagcaacaatacaccaggttctggatccctttagtgagggttaattgc

SEQ ID NO: 1434 - DNA, 2113 bp, Emericella nidulans
aagatcgccgccgcaattaaccctactaaagggatcttgtatacgccatggacctgagcagtgacaaggcagatagcgaagctgcagcgtacatgggaaaagccgccatcactcgcaaacgcaagcgggaattggagaactggacttctcctgccaaagaggagcgtcgccgctcgtcaaggatttttgcggcaacaccagctgccgaagtcgaaaaaaatcaacttctttccaagaaacaaaagcttacagctacgcctcaagataccggcttctcgccagctaaccgagccacgaagaagcggaagcatgagacagttgaagttacagccgaaaccccgagaaaggagcagatcaatatggacaaagaggccactagagaaccagggtctcagagatctcagaagcggcgatcacaccgtattagtggtgtacctgcacccgatatcccagatgaacttcctgccccgaagaagtctccgcggcccagtagttcgcagaagcaggcgtcgaagccgaagcagaacaagaagcaaactaaccgcatgtcggagagacgccgctctcaacgagcgggagcttcgcaggacgaaatcattccggaaacggatagttctatggagaaatcagttgaacattctcaactttctacgacagacaataactccgagcaacaaccgcaaccaaccgatgctgctcatagagaccaaccgggaccgcaggctagtcaacaagcagaagcgtctggggaagccatagccattcaaatagcggaattcagagcaactgggtcggaacgagccgcagtaacagatgtcgagggtgcatttatcccaaaatctcaagcggaggccgagaagcaagctctctccgactcaagccagccacaccagccgttgtccgcaccagatcaatcgacgtcagagagagcgccccaaccaaaccaagacttccaaatctcaacctccctccgctccctcatcgaccaagtgaagttatcttcgctcgaccgaaacgctgtcaaagagctggatgaactcctcttcgatcttcgagtggagatgcatgaggctttgcggcgccatcatgccagtgacacccatggctaatccaagccagtgaaacccattcagtttacatttgcaggaaaaaataaaagaaaaggtccaaaaaagaagaaaaataaaaaagaaagaaacgggggaaaaatgaagattttgcatagcgatggcgtttttgagctattttgttctcggacaaggactacttaggtatatcagatcgtaaagcttacgtacgtggtcggggcacatcagtcaagttgactcagctttactagatttcatcagccttgggttcttactttgttgcttgcctttgtctcttcttgcatgactgggtggcttgtcttttttcatgttatgctgttgtacccgtatgtccttgagatgagattacctaccttttcatacccaagtagcaggtctgaacgtgacggtatagttcaaggatgagaattgctaggcaataggttaaacgcttctatttaagtgcatatgtagcaatacctaactacctcccatcgtagccctaactgaccaggggtacttgccagtgatgcagaaaccgtgtgtcaattacaaagtctcgttttctacccgccaaatgaacgcgcacgggatgttcgaatctatagaagttacaagtgaggaggtacgcgccgctggcaccatacggagtaagcataggcatgcgaagccttcagcgtggacgagatgcaagcaccagcattcagctctgaaacaacggccggagaatgtccatgagacatgtgactatgccatatccttgatcgaagcactgcttccacacttgggcataagcccacgcgcagccacctgcaaggagcaaatccatatatcagcgtaagcgccacgcggagtcttaagacacaacaccaccgtcatgtccagaaaccccgtacgggagcgcactttgatgacgaaagaaaacccatcgataacggaaggcacgtcacttgccctgcgtggtgcttgcattaatatttgcaccaggacgcaagtcagtgccaaggaagtccagattgttccaa

SEQ ID NO: 1435 - DNA, 4212 bp, Emericella nidulans
tagatatacacaggaaacacgctatctggaggcgttgtttggtggataatatagtactctatagcgcggggccccgcatccgccaagcctccgcgtctacttagacaatagagagtgggattatagtgaggatgaactgaacgcagtgtgtgtcccctcgtccaattcgccagcacagtcattggtagtgccagtaccagcggtattgccgtccatttaagtctgagcaatggggggttccgagtaagtgtaagcagagacgacgggtccaaaggttcataggaaagtcgacggcatgcaatacacagcaatcatgattgcgtcctttgcgcctttgctgcaaattgcatgtgacataccagaacccgatagccgaaagatagggcccatagggctacgaccatatgaaccatgaggactcgattgcttacataaccaaaccttgaataagactaagttgtcaattctgattcaagccgtccaatcacgagtcggcgagagtatgaaagtggtgccaagcaagatgctcaaaaaactaagaatactcgttccgtatgtcactgtcactgagttttagactcttatttttgacattgtttattcagacatggaggatggaggattgatatattatcggaaatagctcgacgacctcatgagtcagacagacggtttgtgcctaaaggagaaagaaggtgagatcggagaggaatttccccgatgtaatgatcaacatttggattgatctacaatcactcaggtatcagactcatcagatggtggagaagaaaaatgcagagaaaattgcaggatcccgtccgctccggctcggtgcaacttgccggtagaacagggataactcgcgtggctttgattgccgggaccaaacggagccgcctcttgtcccctacacgtggcaatcgatgagtctgggaaacagtgaacgtagaaagggaaattgtactccgcaagttagatactccttacaggaagttgagaacttcttcgccacgcagcgggacagtctgcagaagcagatactccatagcccgctccttatctgagtaatagcagtcaagcacgctgacttcattggaaacctaaacacgtggaacgatggtatgatgcaaccacccacaggttgacttttactcaagagtaggaatcgcaatgtacaaaaatagtctgcaaccttttgctgattctattcttactattgcagccctgttgtccaccgtagagtgaattgcgttgctgcagacaaaagaaagctaaatccaacggtcagaaaagtcacttgtggtccgacccaccgcgcctcctgaatcctcagtgcctcacctgcatgtcattgcgcttggcttgacgacgcctctttcctctcactcccctttctttcgtcttcttcgcttgcagtttcttagacatatcttcgcataaatcgctgaatctcttttcttgtcatataagcttttgcacgtcggcatttactaggtacgaacaacgctttcccttttcgcgctcttatcactgcgctatgggtattttcctgtcttgactcctattattgcagcgcctactactcactagcgaacttactttttctggttcttcctacacattattccataatcataatctgttatgttgctaccttctggcattactgatcactgaccgtccttccgtacatatataggctgcgacagcactgcaccgccagcaccagatccaggcgtcatttgagatttgcacgaacaaacatggcgagacaaccttctctagattccgaacgtcccatcatgacccagtcggtaagtccactttcactttcgagcgtctccattaacctgtaatctaacccagtactatagaaccgcgcctcgaaacggttctccaccgtcagcgggagcccttcgattgcctcagaacttaccaccggaagcctccctagcggcgaccccagatacacagaatacaacaacctacgcgaggggctgaaccgcctggaaaacaaaccgcttgcaaagcagcggttcgttcctagcgccgaaaagtccgagagcttgagcaagcttgctctaggcgccaaagtggagcgcgcgctcggacggaggatgacaagccaggatgcagtcatgcgggagaagcctgcgctgaacgagaaggctgaggagactacttcatgaacgttgacgtgcttcgcgatcattattacaaaccccggattttgagatactttttattttcctttgtcgtctcggctttcgcgatctggtgttcaatcccgtgcttactcccgtctgattttctatgtggtggttattatgggcggaagtcgatgtctgctttgacgagaagtttgtgctttaatgtctctcatacccccgttcttccagcttaatgtcgtattttgctcttcatgataattgtttttgatcagattattgtcgcggatatgggtcatctagtgtcatccaatttgcaaaacagatgaatattctttcacgagatacatgcctgcccttctggctttatattagtagattcactgctagagtatatccagcgactcgatttatgcgaatgacctcatcaagcaatgctaagtggcatcgattcactgcttcaggcgcacatctgccgaaccgtggatctgatagcgaattggcagaaactaaatatggaaggcggtatgtgccactgtagcacccgtcacagtcaccaccacaattggggaacccaaccgctctctgcaatttgaccagttccaagtctctcgtgaacccgcttcctttcttctctatactcaattatccttgtccactctgctccattcgtaaaagagccttctaaacgtcgtcttctctgcccagagctttgatcactattctattctggcttctctgtttgcctcccaagaccttctccgacttgattcaaattaaccgcacaagaatttccgccgttcctcacctccaattcacctccacataacctcttcagacgcaattcgtcttcaagcttagatctcggacattctcagtacgagctcgcttcattttcctgaagaatatttttcggtcctttgacactgtgagttatttgaagtcttctgtgttccttcctacttggtcctgcccacccatgcttagccgcaatatatactgatcaaatgccattaccagtcaagcgaagagctctagtgctagatattttgccctctgttcgcgctacatagaggctttttgattgtgcccttacatcgctacatccctcgcttttttccgcccggttagactttcttcgcgaccttaatatcgaaaagtacaccctcgacacaatggccgacactcagattcccgttaacggcacctaccactcacagcccggataccccgattcatacaaccatgcgcacactgccgtcaacagtgtttccaacttccagccggcacagtcttctacaccttccaatgccccgtctaacgaccagaagaacggtatctccaaggatgaggttggatggtatttcgttgaacagtactacaccaatatgagccgtagtccggacaagctacaccttttgtactctcgacggtcccagcttgtgttcggcactgaggccgagtcggttccggttgctgtcggtcagaagggactttcactctttccatggatgatgtgttcaattaataagttgtttcaaatctcaggccatttaagaaaaattcaaacagcttgacttccaggactgcaaagctcgtgttctaaacgttgatgcttaggccttttttgagaacatcctcaactctggattggcgagatatccaacaacaggggccctctccaggtcgtgcaaaccttagtttgggccgacagacaatggctcctaagttttcacaaggtttccaaataaggtgttgagagggggccccaggagctgccttttaggcacggtgaggagcggaacttaggccctgaaaatgtggcggtcctttcaaacccaaaaaaaagggtctgggagtgttcaaattaaaaattaaagcctgggcaatcgagtccctgggaccgtccaaaaggaccaacctaactcgccaagtgaacccccttgggaggcaaaactttcaccctcctctccggagggttaaaaatccccgagggacatgaggttttacaaacgcctcccttcttattcaaaatttgttgcct

SEQ ID NO: 1436 - DNA, 2559 bp, Emericella nidulans
ctgtggatcccgggtggtgtcaatactagaagcatacgtggtttttttacttctcattctggccgcgcggattatgggtacgggcggtcggggcaacggattccgcataaatctgctgatcatctgaaaaaggattatgcctcgtaccagaatcgaccggcttccccaagtcagaggacgccgcagaatcatttgcagagccagctgccttcggtacaaacgtctcatactgatcgaggtatttgaatttgccttgagttatttgctcacggatgatgtcgacgtccaacgggaagaacaccttttggacggacttgaccacgaaccgagggagaaggcatatcgtgaccgtcaagaggaggaccacccagaaagtaagtgtgccatatgtctgagcagcagatttgtagaactgcgctgacgcttggacagacgagtagactccagtccaaaagaagataagcaaacaactgatcgcgttgataagtaccgtcagccaatcccacctatagctgttcataaggatgtaggtgttgctggcgatgacggcacaggaagcaacaaggatgcccatccggttgcgatcactgacatctaacccattctcagtgacgaaattcgcaggctcatacagaaggtatggcatatagaagcatatcacggattgataaaagccgtcagccatgtgcagcctgcatcaattagttcagtaatccaaacaaacaagaagggacaaaaacacaccagaacttcgcctgagaccactccagcctctcaatgcccctcatatacagctgaggaacggcgagggacactttgtcatcaacgtcctgatcgaaaatacccattaagatgactggtaatgaagtgaacgcaagattgaccaggatgatgtaggtgtagtcgaacaggtatgagccgtcaaagtcgttgtagatagaataccagaaaagcgcgaatgtccaaaccaagttctttgaaaatcgtcagcttaatactttgaaaagtatgccagggcacgtaccttgtaaaagaagttggcagttgtttctcccaggcgtcggtaagaataacgtccatggacaagaataagacgctgaaggaatcggaattgccctatggcgtaatctgccgacatagcggcttgtctgccctcttcaccaattataccaacaccgacatcagcggcctgaatcatagcaacatcattagctccatcgccaatggagagtgccatgatgttgagtccgtccttcacaagtttcacgacagctgccttctgagcaggactaactcgacagcacaatacagacttgcattgcttgcaaagaaggaggaatcgttgcttcatctcgtctgagagcattaacttaagggtttcgccatcaataacgacagcatgagtcggttcaggtggcttgtgattttgtcgtgcctcaataagctcttcatcagaccccgtcagctggaatttgcggaggtgttcgtctaattcccgggatgcctgatgccgttggtctccgggaatgttgaagacaatcagctccatctcattggtcaagaggttgcaagaaaatccaatgttgatggcagtttcaaccttatcgccagtaagtacccatagtttaattcctgctctggctagcagcgatattgtatcaggtacaccatcctgcagcttatcctcaatagcagtgcctccaataagcatgagatcctgttctatagcgcttgcaacgttttcaagtttttcttcacggtctgtgagcgcagctgcagctatgtcgtgttccttgctccatgcccgatattcttcttcagagagtttgcggtctgcaacacaaagcgttcgcaagccctcacgcgcaaaagtctccaaatgctgtgctgtctttttccgtagttcctgttgcttccctggtgcaagacgcgaataaatgatactatctgcacctttgcagaatagtcttatgctgcgatcaggcatgcggacaatcgcactcattcgcttcctggttgaattgaactctagggtgttcaaaacagtgtacgttcgctcctcgcccatgacattcacaatgaggtcatcattggaccgtccaagcagtgtgaaaccacagtcacgcgcagtgccaacaagagcagcctcatctggtgactgtgctcgaaactcaatttgcggaggatctcctggagtatgctcggttataaccgaatggcacaccgcaagtgcaagcataaaatgttctgtagcctgtttttgagcttcgccggactggccacccatatctgcaacgtaatcaggtgatatgaaagtaaggttttcgtcacgaaggtatgggttatcgtgcatttgtcggagcatctttatcatcctagttgtatccatggctatcttttctcgagctcgtgcagcttcagcatcggcgtcgcctccttctcgcctaacgagaccgacctgagcttcggtaaatgcttcaccgtatgagactccattcactgtgcatttcttgaagtccattacattctgagtcaaagtaccagtcggggcggtaaata

SEQ ID NO: 1437 - DNA, 2777 bp, Emericella nidulans
ctcatactcatccattcagctgcatgggcccagcctactccgcctcaccttctgccctcccagcagatctaatcaccctggccggcaccctacagcaatactcaaggcaggaatgtccctcttgaccaccgaacctgcaccaatcgtgcatccctcaccgatgtgacacccgcgagaatcgtcacgtttgcaccaatccagcagtcgttcccgataaccacttgtcctgtaaattccttccccctgttggtacgccgggcaatgatctcggtgtagtgctccccagtgatgatactcacgttcggtccaatttcaacatggtcgccgattgtgacgaggccgcagtcaaggattgtgaggctgtttccaaaagaggcatgtcaacattagacccacgagtcggggaggagaagagtattgaggaataacaaacttgaaattagcataaaatgccttcccaacactgacattgcatccgtagtcaacaaagagcggggcctcaatgtagattccctcgccggcatggccaaagagtcttcgcagcgcactctctctgcgagcgatggtctcagagaatggaaggtcggggtacggtggcgcgttgaattcggcgatgagacggcgggcattttctctgccatcaatgagttcaggggacagggggttgtaccttcaatagcatgaagttagcgtagccctaggaagaggtcaaggacggcgtacagcatccctgatatcatgcgctcgtactcgtcaccccagcaaacgccctgaagggcttttgctttctctatggcaacatagtccagttccgttttggggatcatgtttatttcgtcagtaacagtgtttgtggaaattgaaggtagaaggagtcttgactacgtttttaaaattcgccaggcgcggtgttgaatacgagacaaacagctgcgtcctgggaaatcgggccttgtctccgcgattggtcgatcggttcgagcttctgtaggctgctgacacttgtttatcccaaaccgggttgcggcgttcctgatatttatgatgattggttgagctatatattgtgaccggaaaccattcagattcctagtagtaagacaaatttcttttagtcgtgctcgcatcaaggaaggactctaatcttgactgacaacgagtatcccacttgacccggttcgctttgaaggatactgggggttattcgtctactcttcggcgacaattctaggtggagctctaaacacttggggatatttttatgctatgatacgtgaaaggttgactctgagagcctgacatagttaaaggcgaaccctaattaagcattgctgggatgagtgctgaataacgaagtggtctaaggcagtgaaagaaaagagtaaggtaggtcatcacaaatcattgtgattagatatgggtatcccttgtcattcactcagactggacaaagaccatccgatattgagagacaactcacaaagggtgaacaatgaaaccattttcaagacacaataccgctttttttttcagatagggtgtcgagagaactgtttgattcaataaatgatctcttcaagccacgaactcgtctacctgttctcccaagcccacaaacagcctcacttctgagatcgttccccgtagctgtgctcttcttgtaaagagcattgtgagtgctgcaatctaacaaacaggctcatcatgctgaaggatcctcgcttattgttcctagaatctagctaagaagactaagcgcaaagaatttctgcgaaaccaggatgccctttgagcccaaccctgtccatatgagcccagaaagagacagctgtgaattgtacctaggcactagcaagcccgagtcccgatacggcggccgctggatcctaatccttgagtttcctgagtgcgatacctacagcgccttctactctatcggaagcccattcagagataatccgtacgaacacgaactggtacatgacgggcagtgcagcgagtacttgagggatgtccacgaggtcatcctcataggcgttgtacaacaggaacgattccgagccttcctggaagctttctatgacacacggcctggcccggatcagtattttgtgctgcgggttgtttctgcgctctgggaacaaggtcttgttgagtcaattgttctggatatcctcttgaatcaacctggcttgcagtattcggccggggagaaggagtatcattactaccatctggctacgatggattacttgttctttgaggatttaaaaaagtgtggatttttggttcaacgccgcgctggagaggcgaagatggaggacaaagcggggatgagatggtggttgagagaaaaagatttattgggttgcagtagctgtttagactatttcgactgaataagaggtattattttaattgagttgatcagcattgaataaaggtctcagttctatctgcagctatgatgatgctgcaatgtgcttatttcttctctggatacgtcactgaattgatgaccgatttgataatctctgtatgcaaaagaagaaacctttaatgatatggcggaagcttcacataagactgctgtagacggattaccgattgataccacgcaccttcgcagttccaagaactaagagacgcttggcggctcaattctctcacgtcgatatctgaaatagtgttttcatggtattttcgtcgctttgaaaacataaatttaccctgtgctcagctgatgctcaataatgcttgtgctgttacatagaaga

SEQ ID NO: 1438 - DNA, 3440 bp, Emericella nidulans
tcatgatgcctcccccttaaggtattgtgtgatcagtatatttgaacatccagactccttatgtgcagactaccaagcctaagtctgtgccttttgcttggtaatagtcgcagtcatcatggcttgaccggattgatgcgcttatttctgccttatagcagacgacgcacgcctacagctacctcatttgagtttatccactgccacgcatcccaatacccaactatagtttccctgccaatcgcctctaaggttcaaacttgataatgaagcaaaacagtatcagtggcgtagctgataacctgattggagtaatgtgggtgcaatacagattttcgtggcgagctgaaacacgcaggatgttggtgattgtggcaatacttttttcctctaatatcctacttaatcgacttgtctcgacatatgtgacacttcacagatcctaatcctcgcatcaacctttgaaaatgcctgagcgaaccacagacccggccctctcccttgcggaattccgcgaaagcatacgaggccaaaaagccactcttccgaatttatactcgctgtttccagattggaaacccaagttgcatccggagtatcaaagagcgagagatgaggttctcacccatggctagaacggtaagaccacccgccttgctgttcttagggtttaaattatcagtaaagcggtaggcttgaagctgggtacccaattcatcacagccagcaaattccaaaaagccgagattggtgttttcgcagcgataatgtgtgcggatacttcgtttgagaagttgtgtactgtgtgcaaggcattcgcctgggtacgacccatatcccgagctactttaatctcatgtggtaggtgctgacgcgtgccagtattttatatgggatgacagtatgagcgacccaagtcaagccacgggccctcttttctgcagcaaggatatacgcgctaacgagtcaagtattcgattgtggctccctggcaaccaacatcgaagccgccttcgcatatcgcaaaaaatcaatgcagtatttctgcgcagtcctctgcagccaggagccaatgcccgatctgtcagatttttctgaagaactgcaaaatgcattacattgctgggatgaggtagccgcgcacttgcgccaggagtgctcgcaaggctcgttctgcttattgccgtctatagtaaaagactcgctgaccaaggtttagatacactcatgatacttcttgaacagaaactcttctacgtatctagcgttgatacggttgacatgctcttccgcgggaaccgtatcccatcgctggcggagtactggattcgtcgagaacggccggtgtctacccggtgatagcaacaataccgtaggtggatcgagttgattcaattctagcccatcactgaggcgtccaggtttatctatggcatgatataacccacaaagatatagatgccgagctcatgcagtcgttatggaggcatacctcctactcggtccatatgtgagtgcctcctgccctacacaagccggaggaaatgctaatgaacagctgtaggataaatgatatgttctccctcaggaagaatttgtataattaccccatgtctctcccttttcctgctaacaccattggcttgcaggccgatagccaacttgaaaacatggtcaccgtcataatgctgaacgacggtgtggactgcaaccaagcgatgcgcctatctcaccagttcgttcaacaagaggccgcccaggggttccagaaggtggagcgtcatcttcggacacaatccctcgttgtgagtacggagcgcagcgttgaagacgcattcattgagggatgcaagaatgtggtaatggggcttacccattggaggtatgtctcgtttattcttccgtacgaatgaatttctttcctgttctctgcccgtcttgcctatgtgctcctcatattggtctacctatccagatctcgtcgctgatggctttacatagttattccggacaacggtatttcaggcagttggaactgaatgagcatcatgaagttgacttccacatctaatcggctgccaattcagtcaacatagcgcggtattattaggcgccttagacagatatctaggaaatagaaaaccataccctgctttacagactaacatcgcttcaggcagagtccctcttattcgccttctgattgggcagatctcgttaactgagagatattcctgaatatgagcgcagtcacaataaactatatttggcaagacggactctaaagctattgaacttaggttatacacaatacttgaactgcgtatgcgagcacaaatcagcaggctggcgttctcggtgatacgagaatagcggaatggcgaagagcctcctatcaaaccatgggtagagactctccgaaattatcacgttttgcaaggacacgtgaagaagtagtagaatgtgccttgtgaatgaatatgttatgcaggcttatatcttggtttccctggtggctgtagagagggttctgattgtttgggctaagcgaagataattgcacacagtctgaagtactagctgatgtctttagctgatgtgtgccttcattctgcttggaaatcactcactgatagcttcctcaaggtacggtaaacatggtattagaatatttgacgaagaaggttgattggatactaccatacctcctaaaactgaagattgatcgactaaacgttcagaatgtaaagttcataatcttattcgtatatcctcctatgtgcagagtagagaatctactatcttataagatacttatagattatagttcatagaaacttttctattgatggtctgtctagtgctcagcatattttgggcttgaatttcctgcatactaccctcactgggtgtatagggccaaaaaacattgcagcgccctactcagctcccgttgttttattccgcaagcaccagtttatatgcccttctactttccaatacacatctttgtcggcctgacttccaacaatggtatccagatgcccatatctctccaccaggaaccggcgatacatgtgctccccaaaggtccttctcagaagctcatagtcccttagcgtagattcggggttaaacacctgattctcagaaccagacatgaagagaatcgggactccgcgtacattctgcaaattcttttgtgttaagagcggctcgagattattgtttaaacaagaacccgcacagcccatgcgcgtaatatgctcgagacttctggtaaatgtccctgcgaagaatgtctcaatattaccatggatttcttgatcgagattctcgtggttccagagaagtccgaatgcgaagcttgtcctatggcaggatggcgaagtgcacctgtcgcgtcgggccacggggtatagtgaaaggagaaagtcgag

SEQ ID NO: 1439 - DNA, 1176 bp, Emericella nidulans
tcccactcccgccatcttcagcgaccccggtgggacaagatcaacaacacaattctttccacttcaaactgtggcaacccctgcttgcggcatttcggcttcggcccaacatctgcagacggattcggcattggctacattatcaaggacgactcaatctcaatttgcgcctcatctaagcaccgccaaaccgcgcgtctcatgcagacacttgagttgtacctgcttgagatccgcaagttgctgcgcgcgactgtccacaagccgtccagcccgcggaccagccgcgctcgtgaaatggagatgattgccgagcgggtccagcgtgatcaacgccggggtcgtattgtccgcacagacgcgggccatctgcgggccggtaccgagacgcccacgacggacagcggggacatggacgatgatggcatgggcggatgtaagttaccattctctctttgtttatatcggcactaatcaagatctagatggtttctttgatgcagggatgctcctgcatgcgctcaaggggctcaacgtggatcgcgagcggggtggcgacaagacccctcgacgacggttcgttggcaagaagctacggttgaatgaatattgatttggatgatattttggatgtctacattttgcatttagatacgttggatcatgatctgggccatgtcttgtgattttagccgaattgaatattgcatatcttggatttatctgttgtacaaaaatgcttgtatgtattgtagatcagcttttaacccctatcaaaaccacaaggctaagaatgcagatgccgggattggcgacaaacagctagctgtaatgtaatatatcaagccttctcgccgaatgaacctacctgtgcgaatcgagctagctagccgacatgcatacatggccatgcacacgatccattgaggaaacagagcgttggcggagcgcacgcatgatcgagtattgactactaaggtgtccgtgctgcatgcactctgtatgtgtgctccatactcagtagcaaaagacaaatcataacttcttaagctaggttgattaaatgttccgcaacgcggatgtggtgcgataacacaatgttactggcagagagtactctaagaagcgagtaaggagctgcatgggcccatgggcttgctttttcagttgagaaaa

SEQ ID NO: 1440 - DNA, 1955 bp, Emericella nidulans
gcgcagtcggagtttcctgctgaaccgagttcttgcgggctgacctcccggatacccgtgaagagccaacggcaaggctattggcgctgttgcggttacgcttattgatcacatcggtcttgagcgacagtgggcgcaccacgccgtgcaactgcaaaaacaaaccgcaggcgttgcacagcggctgaccttcagggttacgccgccacagcggtgtggtctgcgtaaagcagttcgtgcaggtggtgggaccattctgctctccgttcttggtcccgcctggactggcgggccgcgatggagcagcgctgtttagacccgactcgggcggagtgttgggagacgtgtgggacgattggttctgcatgctctggcgtagtagttgggctgtgtttggagtggacgaggtgcgagcgatcttctgccgtcgagggtcttgatcccgattgcgcacctcgctgactgacgcagccgactcgtgagttcgacctaggcttccgccctggttccactcgctcggggtatccatcatgtccgcagacccgatggtaacatgctttcggtgctgtgcagcaaaagcaggcagcgactggaaagagttgggatatgatgtctcccacgccatgttgctattcatgtcactgatactgtcgtcgccgaactcggctggcattgccagtcctccggccgaaaattggttcccatcgtcatcttcaacatccgagtcggcgccgaaactgaacattgcggcgtgaaaaaccgttaaactcgttcggattcaacacttgcgttggatcaacatgctgcgggatagaaaagccaggggattgcatggatgaagactgggcccccatatgggcattctgctgtgtaatatcctgggacgaaccaccctggttgtacatatatcgaggttgcagcgaggcagacaaattcgatgatcgctgagtaatgtaagcgggaacaacccggcgttgcgaccgcgcgtcgacgggcatatcaaaatacttggagtgttcgccatcatacgcaggctgaggagtcgaagcagtcgactgatagccggacggcggaggagagaagaagtcggttgagttgagtgaagaggcaatcggagtctgagcgtagaggttggcaaacgggttaccgctggtcatcggtgactcgctgggcgagaaagtgaattgctgctggtaaggaccagcagatggaaggataggatcgtcgcccaggttgaaagtatccagagcgaacgccatattgggggaggtgtggttctgagcattggcgagctgctgagcgttcatctgattctgtagagacagtccatgcgaagtatccaaggtatactccggtacagcatgtgagaaatccgggtcatgagctagcatgctggtggacacaggcggtacgtgaggcgaggactcggccggccgcttgcgggacggaatctgcaggttgaagaattgacgctcatcgatgctcgtcttgcgcactctacgcggtacgtatccgaactcactctccctccgctgatcctgggccgggtgagggaaagatgcaggtactggggtggcttccgacgcggactgatccctgcgggctttgataggtatagcaccagtagtggcttcggaggctttcgttgtggagggagatgggtggtcagacggagagaaagggatgatgaagtcgtcaaggttcatagcatctgagacagtatctgcagttgtggtcggggtattggaaacacgatcagacagacggagctgagcgatgccactcatgccaggaacaggactcttttggctggaggcactatagaagatcagcaagagaaagagcaaagaaatacccccgatcggaaactcatgacgtaccgggcttgctgctgggcgcgcactctttcctgacgcctcagactaagagccatcatccgccaggtcgaattttca

SEQ ID NO: 1441 - DNA, 8708 bp, Emericella nidulans
  unsure (1)..(8708): unsure at all n locations
ttctttattataactcgctaccccttggagttgatatttagcctagctataccaaggcagtgagcaccgctccctcgtccgtgcggatgtgtgaaatctctgatttgtaatcacttacgagtctcggcgcagtcggtcaagaccagattttataatgtggtttgtcatcttgttgtatcgaagatgactaatcttgaaatccaatttctgtcctccagtgtcaaacccagtgtttgactgagctgtcagccaagcacaaatagaacacaacacacaaacattatgccttcgcgtaaaggccaacctcgaactcttgcaaaagcaactggagctgaacgtcgccaaaggacgcgtcgtagtcttccggtgataccggcgacaccccaggctgaaccagaaacatgggagcgtacagttgccgaaatagctcaagagccaatggatttacacgtcaagaaatacagagagtggaagcgtaagctctaaaatcgacactgtcgatctatgcgatggaaagcgggactaagctaaccagccctttcggtacgcgtacaggaaatggatctccccatgacacggcctgtcgcgtctgtggagcgactggcaatagtgacctcaagcctggtcgactcataaattgccatacctgcagggtagcctttcatttcatctgcgtgccagacgggagcgagtgggcgaccagggaaggtctttactgtccaatatgcgtcaagcgcggttgggacatgtctcctccaggcctctcgccgcctacttcccctgtaccagctcccgcgcctattgagcggcccaagggtgtagcgccgatcgaatccgccgttaccgctgctgttcccagggaaggaccaaatactgactcaaccaatggtcccaaaccgccgcaagcggcttcagagggcgcctcttttggtaacagctcagagcgcattccacagtcaccggctgtgactgcacgcgctgaaagtatgcggcatgatgaggacaacaattccgacccagaagccccccaacccaagcgccaacgtacatcgcggtttgttactctacctagcgatgtcgatgcctctctcggcgtgatctatcgagagctggaatctgttgcatctcttaaactacagattcaagagttgcagtacaaagacagacaaagcgcgcagatgatcaagctgcgcgataatagcatcgcaattctgcgccgcgatctcgagaagtaccgcgcagatgatagtgagctggctcggctaagagacagtgcagcacgattcgaccaagtgaagagagagatggaagaactgaagaggaagaatgagatgcttggggcggaattaagaaagtccagagaggagaccgcgacggcacagagccttgtaaacgattggaaggggaagcttgcacagttgctcaatgcttgatagatgcttctcatgttccttgtcctggtccttaggttagcatgatacccctgggcgttttatttaaagatctcgagtctttccagctctctcaatcaggactccccttggtaatcacattgtggtataggtatagatacattacatctagtaataagcagcttcctatgaacgcgatgcggagctcaccatggtctgcctttcgacatggactatatagtttctaggatacggccccttgtcgcaggatagtagaaagctattcttcctttcttttcttcctttcgtaattttttttattcttttctagattgctgcagaatcgtatgcactcatcccgctcgcataatgatcatgcagaaagtgctgccatgatccgtaaggcaatagtaatgtgacaacaagtatattagtcagaacttagctctccaaggggggttaacctgagccctttttggctgagtgggaagttcgatataatgctggcagatcccgtgacccctgcgagggatccttgctcagcaactcaacctctccactcctccaactccgcatcttccagtctcacgtcaaccatcgaccatgttatatttgttgccatcgattggcgaaggaactaatgtcattttgatctcgctaacataatggcagtttacacgcctcacatccagcagaactttgatatgcgatccacccccggaccgtttctgggcccagccaaagtctggaagcggggttggctctgggactatttaacacgctacggccctcgatgcgaacccagacaacaacctgacaaacctgacctagcctcgcttcaataccactatggatgccaaaaaatctcgcaagtcgacaaacggaagcaacgctcgtcctcgcgtcaggccatctcgcggccgaggcctgagaacatcaacaggatggtgagtgaccctcagcgcccctgaagcgagcatcaagccgacacctcgcttactccaatacagcctcacttgtagggagaggcgtgtcaaatgtgatgacgggaagcctacatgtgcccgctgcaccaaggcgggccgcgtctgtcggtatcgccagccccaaacgcccgggctagccggctccggggtaaccggacagaggagggttgaacagccgagggttgaggccgcacccactccagctgcagcgcctactccttacttccaggtccagctcaacggacatgacgatggtgtggaccgtggcaacctcagcgaccagggactgtcggtgaccagccttgaggcccagactcttcccttcacccttggcgagatatccactccgttcgagtggtatgaccttctagcacgcgatgcaatcagcaatatccaacggttaggggagccccggaatttcccccagatcaccctctcgcgtagacagtcacccgccccggaatgtatcgaacctcctttaggagtgctggagtatcagtctgagccttggaactcaaactatagaatagaactatcggcagttgacctcatcttctttcgatattatattgaaatcgttgggccgatcctagatttgttcgatcccgctcggcatttcactaatgtcgtgccgcatcttggcctgcgaaacaccgggcttttgaagtcgatactcgccgtgggtgcgaaacatatgtctcttggttatgcacatacacaaggagacgatgtaactacaggcgtgaatgcgagtagcccagcctcgcttgcgggcgtagcaaacgctgcttcagctccagctccagcccacatggctacacactactactacgaaacacttcaatatctttcgcagacacttctttatccctcttatgcggactcccgcgagctcctagcgacgtccactatgatcagcacgtacgagatgtttgacgccgacgctgacagcgactcgacgtcgagcggggactgggagcgacacctgcgcggctctttctggatccagcgatctcaggacaatgatggcgagtctgttgatggactgaggcgggctgtatggtgggcatggctgcggcaggatctctgggcggctttccgggcgggacggccaacccttactatatggcgtgcgaagaagaagctcgaggagcttgactcggatgaactggcaacaagaataatttacatctgcgccaagtgcgtagaatatgccgcctcggggaaagcgccaaaccaggatcaggatccaagagcaaggattgagcagggcgaccgactgctaagtgcgctcgaagactggcatcgtgtcctccccgcctcattccagccggtcgcggtcgctgccatggattccgcaagtggaaacgtccgagcatcgagcatgatgccttcaacaagcccggccgactggacaagctgggctggtgatagaactggaatgcaagagcccactacgtcgtttttcccgcctatctggatccacccgcccaatcacgcaggcgcaatgcagatgtaccattttgccaaagccgtcgtgctgctcaatcagcctacaatgggggggttgaatgcctacgtcgagcgccagaagcagcttagtgaaagcgtgcaaatggtctgcaggattgccaatgcgtgccaggagcatgaatcagcaatagcttttgtgaacgtgcaagctttgtttggtggtgagtacccttcccccttttcggtttgactcgtaatgtcctctgacgagactagtcggtcagtttgtccagtcgccccctatgcaggtcgagttgctccgaattctggagaacatgctaaggatcagcaagattccggccaacggccttgttgcggaactcaaaagggtatggcaagaggcatcaggatagtgataagtgtgcgatgattcattcattctattatttctcttctaaactaccacgctccgacaataccagcaattggaatgtcaatccctgttgtgtacgacgctccgtccgacagcagatacacataagcccctcctagctccttcggatcggctaatcttggcataccaccgtaatattgcatcttgagattccagtccggcgcctggtcgacaaaataagtcatctgggtcttgataaaaccgggtgatattgagttcacgcgaataccatggtgcgcccactccatggccagcgtatgtgtcatattccgcacagcacccttcgtagcgccatagggtgcgctcggcgcgcggttgggtctataactcgtcatggaagcagtaaatacaatagagcccttgatcccgagctcaatgaatttgcgcgcaactgccgttgcacagaagtacgcgccaaacacgttcaggttgaacaacttgtcgatttcggcccgggtgaagtccagggctggttggtgcttggtcattccagcattggcaacgaagccgtggacggcgccactggcggacaccacagcgtcgattgccgagctgatgctttcctcggatgtgacgtcgcagtggatgtattggaggcgactcggattcgctgactttttttgcacagcggtgaattcctcgccaggctcgaaaaggtctaggctgtaaacagctgcggcttcgttggccagacagacctcggcgatggccagaccgatgcccctgtttgcgccggtgatgacaataaccttatccttcagggtgattcgccagtcatggttcgggccgggctgagtactgaggaaggccggcgtgccgttgtttgttccgttttcctgaggcatattgagaaagccgtttgtgaatgatgaactgatggttgaattgttctccttttgggttgtggtctcctcgagtgccttatatcctaatccgtgatgcagtgttttacgagccggagcacgcatcgagggcgccaggactaccgcgtcttacccagtcggaatagagaagatgtcgagtgcgcgccttcgaggcgagcacggatccaccgcatcccatggatatgagatggcctcgcatcgaggccctatcgtgagtggagatttacgggggatgtctcctcgcttcgcgcagtgataggcttgcactgcactcaacactcgcggggtaaccccatggggatgcacctaaaggtttagttatatgtctcgttgatgccgtactacaacaaaatcacacctatctcaaacattccccagaatatcatttccaatatggatgccaaggatcttgacgagtatcacaatggcgagtctaatcacatcgaggccagtcaagagatcttctggacggaagaggaggaggagaagctcgtccgcaagatcgacctcttcctgttaccgaatatctggatcatgtacttgctctcttacatggacaggaccaatattggaaatgccaaagttgcaggcatgtctgatgatctgggtctcacgtcttctcagtatagcatcgtcctcgttgttttctttagtaagtctcttgcctacccgtcaggcagcaactaacaagaagcagttggctatgtcgtcttcgagccgccgtccaatatgattcttgttcgatctcgaccgtccctctatctcccagcaatcatgtgcctctggggcattctgacatgcgtcatgtcggtcgtccagcactaccatcatcttatcgttctccgggtcttcatcggtatagtggaagccggcttcgcccctggtattctactgatcatttcctcctggtacaaacggaaggaacagtccaggcgctttgccgtattcatatcggcggctattctctccggagcatttggcgggctcatcgcaggggggatcactgacggtctcgagggtgtccacggaattcgcggttggcggtggctgttcatcgtcgagggcgcnagtactgcagggtgggcgatcatttcgaaattcctgcttctcgattacccaggaacctcgaaaaggctgacggagcgggaaaaagccattgctgctgcccggctgcaggaaggcgtcattgccaggggcgctgatgagcgtatcggaaagctacagggattttgtatggcctgcaaagactggagaacgtggggattcactatcggctacatggtgagttctcctagcctttcatctgcagtaatctgacttacttaggtcatcgttggctcctcaaccctaacctacttctacccgaccctggtctctggcctcgggtacactggccggatggcgcaatacatgactgtaagtgactcagccatgacaaaaagcgcccgggcgagtaaatcacaaaccacagcctaaccacaataggtcccaatttacgccgttgcctttgcctgcacaatgatcacgagtgtcattagcgacaaactcccgacataccgtggcctcatcatagccaactggctgaccgtctccatggtgacctccatcatcgtctgcgccgtctacgatttcacaacgcggtatgccctcctcgtcattatggctgcaggactatgggtgtccaacgcaacctcgctaagttttgcctcctcgtcattcggctccatggatcccgaagtgcgcgcacagtcgctggctctcatgaacgcgctaggcaatctggcgcaaatttacggcgcttatctcttcccttctgacgacgagccaaaatatctcatgggctttggcgttatctctggaatgttaggtgttggtgttgctaggcatatttttatgtttgctcttgtgagaaggctagaggcgaggacttctgtttaatgacatgaatgaccggatgtcttggatgaacagggttttgggaatagtatatatgtatctaagttacaaaagtcttgcactgcgtcgcaatatgctagtttccgttaacgattgatctcagatgctaaaactataacgcagtgtagggagactgtttttgctatttctgactatcttgttcgatagcgtcgtttcattttggctctaaatagctcctaggtagactaggtagacaaattctcagtccatctaaaccgcgaataagccgtagtagccgccctacaattcgataataaaatgcgatgcctttatttgcttcgagacattttttgagctgcaaggtgctactatggatagcgtgagtcgtggaatataattgcagaggataccctggccttatcaactgtagccttcataagcatcctgctctcttaagttgggcgcatcagtctagaaaagattggatctgttggggcccgcgctgcaatattcaaagtacaagtgctcccggcttcttctattcctgccgtactcgagaacttcgaacacatagggctggtcgtctcgaaggaatatcgaatattatgtggttgtaccatgcctctattctgtgctatggatggtttctcctatgtcttggacaaggagtttttctcagtatatgccacacgtgaaaaataatactcattttgaaccagtatctacggatttcccccactctagacaagtctggtctactcagtcagtgtcgtgaccctgctatagcgtgggaaaactctggaggatatagaggcaaacatccgcaatggccacgatatcatgccagctgcgaatatgattgaataaagctacagtccacgatagtctttgatttaataaccgagtatgagatgagctgcaaatgatagcttacagttccagctctgtgtgacgacgtactaacggagacgacccgtacctcgcattttaggcccattattattattctagctatgccatggaagactagagtagactattcaggccttaaataggattgattgagaaagctattatcggacataaaacccatcaagtacataacacataaatcccatcctatccgtgtatacccagtaccctatctcggacttctaaggcacatttggatgctccacaccgacactaggacccccattcagatcccgaaagtcacctcttaacacctcaacaccatcgcgtctcacctcatccactaatcctttcaccttatctgcaatgatttttccactaaatccaaagtgctcatacacctccttacacggcagactcttcccaaactggttctgcgcaattgccgcatcagcataccgctcccagccaacagaagggtacgcctcgatcgcgacagcgggtttgcccgcgcgtggtttcaagacggagtgcttgtactcgcgggactgaagctcgaagagctgtgcgcaagggaatgaaacgacacgcgctttgataccgtgctcggccgcaaggatctcgcgcgctgccatggtataagccatttcagagcccacgctgaggagag

SEQ ID NO: 1442 - DNA, 1250 bp, Emericella nidulans
  unsure (1)..(1250): unsure at all n locations
ccgtaccgagctatacagacaagctaggaggtggttgaacattacccaaaggacactggcaacccggagcctactccttcgaatatacaacaagttccgctgagattggaatatcttgacaacaaaaatggtgattgcatataataaagacagcgctacaaaggtccaagccatcctgagcttgcaggatgactggcgtgcatggtttcaagtcattaaagaccatgcaaacaagcaagaagtatgggaatattttaatcctgatactgataataaaacaaggcctgagctactgaccaaactgataattctattagtaaataaggccttagaaaatatatattaatattatcaaataatgttgcaggaatggaaggatatataaaatataatctaatcaataaataaagctatttatagcttagtagctctatagataagagagcttatagcagataaagaaatatataaaatattgtaaatactgaaacagcaatataccccaagtaatcaagaggcagatttcaaagctttgaagaactataacaatgtcagatcttgattaattcaacaagaaaagatttctgcatggcttaataagtttgataatgcttatttagcaatcaaatactgtaatctcctagaaagtaataacaagtatataaaataacagtttctggcagctatattaccagtttcctattccttcatagatagacaggcagagatgataaataacctgatatataagaagaagaacttctatatactcctaggacaatattagacttacctagccaatactgaaggcttcaagacaataacttctggaatagtatttgcaatactttatagccaaagcaaacctaacaacaatagacactagatgttatgggatgctcccataacacgcaccgcgtagcgtacgcggctgtggtcacgtggctccccatccatctccaatctctgatctgtcctgtcctgctttctcttcttcagcaattccctcttgtacatacggcacgtttagataggaagatctgtctatacacatcccttaatattagggaatcgctcacctgacctgatctgacctgacctgacctgacctgacctgacctgatccgactgcataaatgactgaccagacccctcttctgctgcttgtacagcagctccaagngaactccagaaccaacatgttgaactacaacagctccagaaccaagggctgacattcacnactttgt

SEQ ID NO: 1443 - DNA, 2277 bp, Emericella nidulans
attcagtaaatgcgtcctgctttgacaggagctttcactatttacctggaaggatagggtttcaaactacatcccgggatttggtattggggcctgctgccattgctcaccaaagtattgcggtgatgtactggtcgccttatgaagctggcccggtgagtacatcaaactcctagtcgcaatcaagaacacctatcctgcttgaaagtttatggggtacaactgaactgacttcctagagtaacatccaagaccgataccgtccgtgcctgaggtttcgttgtttaccggtgtacatatgagacatgcaatctgaactctttatcggcatctggactcaagacgaggcatcagctatattcggactcgtgacttgcactagtcgacaactctgtgctgacattcccgaaggtcctcccattcgatggagctaatactgggatgatttctggcacttgagacaatgaccccaacagcagggatcatctggcctggatgcagtggtaatatcgggtcacctaatcagctacggtcttgcttccttcttaggcttgggtgagacggaagccttacccaccactcagtggcgaccagggttctgcattggatgagaaaccgattgttagctgcctcttagacggtgttcgctggaagaaggcagggcatgggtgagtccctctgaaaggtcccttgataactcaaatttcacctttgcatattttactcgacattacaaggcctaatacaacttcaatcatggacaaattgcaaagccatggatgctaaactagtatagtcactatttacttgttgccacgcgagcaggaaacttaaatcccaacaacccaacgctatcatgtttagaagtcaaatgaacgccctttttctgtacttcacggtgccggtgcatagcgttgtcatcaagatgaagctaaaacttgaccggcatacgatgtaggctacacgagatgtgactagttctaaagacgcgacgagatcctgttgcctccctaaagccttcaacggtcagccgactttttcacatcgatgagcttgtcttctagaagttaccctgacccggctagctggctaggtgaatgtcaagagcgatctaaagatgatccgcttatagcaaggtcatattttgaagaaacagagctgagacgtgtttcaaaaacggacctctgcagccgctataggcgacttctgtcctggactgtggtcatattgtcgttgttctgagtacgatctagaatctcagatgtcacgggcagcgcgtccgtcgtcgtagctactttgacgccaaaccgttgcgacaagaccacgagctgagccacaaagagcgagctgcggaaataacgcggatcgccgtctcgaaagcccttgacaatatgctcttgtaaccgatcccagtccacaaacccgagtttgttgacattatcttcagtgagtaagctttttacaactcgatgcagcggcccgtcctctctatagtttgaagggcccaggtatgcacgcttcgtgcggttcatgacctcgtctgtaatgaacggcctcatggcctcacggagaatgtatttctcccgcaagtcattcttgacagggtcataccggattttcagactcggaggtatacggtttgcatattccgtaacgtgatgatctaggaaagggggtctcgtttcaatctgatacaccatatcagcgccgtctcctatgtagcggagtatgtaatttgcaaggatggatttggtccactggtagcttgctgagttcagagggtgccagttctccgagatgttagaaagagtctgtgcgccgagactctctgcgaatgccgtttctggatcaggttcttcgctctctactgtcgctgaagccaatggaaacatgtagaatgagtctacacgggcgaatatcgaggaattgttgagcatccgctttgttgacgctagtgattcaactgcggcaggtacagcctcccttccagcttcgaatactttcgagctattaggcatcttgaatggaggtggatgccatgagaggtccggctcgacaaacatcttcgacagcatatccgggtagccgccgaaatgctcgtctgagccctctcctagttttaatttgttagtgagcaatgctggtggattgatactgaagatatcatttacttacctgtgaggatgaccttctttccatgcgaatgggccaactctcccacagcaactcggcccatcccgttgacgtctgggattggtgtctcagtatacaaactgt

SEQ ID NO: 1444 - DNA, 3413 bp, Emericella nidulans
tccaagaggcttcgtgtgctaactattttacggtaaaggctccatgcggaagacctcgccttcctcctgggaatgcagcagaaagacctgcgcaaactttgcgccaagttacgcgaagatcgtctgattgcagtgtatggcctgcccacgtcattttgacttcttggcagaaaattaatgagcgcttgctgttcgactatagtaatacacgagctgagattcgcgatggttcgacccgcccggtcaaccgagagtactactacatcccgctacatccggtcattgacgcgattaaatacaaggtttctaaactgacgtctacaatcaaactgcaatatacaccgagccaggagaggaaggaatatatttgcctgagatgtggggccgaatggacggagttggacgttctaagtctttactcggaagagggcttcgagtgccagaattgtggagctattctcgagcgcacggaggacgtcaaaggaagcgagggcatcgaccgtaccggtcacgagaagaatagtaagctcatggcgcagctagacgggatgctgaaacttctcaaacaaattgactccgtggaaatcccccccaacgacttcgataccgcctgggaccacaagattgatgtcgtgcgcaaccaacacaccaaccccaccagagcagccgtcgttgtgccatccaagaagcaagaagccgtccgcggcaatctcaagacggacgccagcgcgctcgagatctctctaacatcctcggaagaaaaaagcgccgccgagcaaaaggaggaagcagcccgcaaagccgcgctggagaagcaaaatgcccttccagtctggcacacccactccacagtctccacaacagctggcaacgtcagctcgatcaaaacagaacccgacgtcaagatcaagcccgagcttcttaaggaggaagaagaccagaaaccgagcctcgttgatctggacgacaaagtcgccgcgtactacgccgaaatggagcgtgagaaggctctacaggcacaagaagatgccagcagcgccgaagactcagatgaattcgatgagttcgaggacgtcggtgtctctgcttctgcttctccggctgtggggggtgtgaatggtgctgacccaactcgtgcaccgagtggcatcaagcgggagcttgatacagattccgggaccagtgcgccgcagacggcgacgggaacgccctcgactccggcggatgaggggccagcagcgaagaagatcaagactgagctggaaaatgaggtcaagaaggaggagtctgatgaggatgacgaggagtttgaggatgtctagttctcttttctatgggcgctggcgctcaaagtactatagactaaagattttgtgttttttcctggtcacgctctggcttacttaggtgatttatcaagcacgagaatcgaaatatgtgaaatcatctcatattgttatactagaaactgcatgttatgcgtctgcagtaggattatttgttatcttctgatattgaaatagattctttaaagtataccagacactcttgtaatactgcattcaaatatatagcatgagactaggtaatgcctggacccagaagacaagcagacaaaatgaaataagacgttagaatgaatggaacaaccgaattcactgcaagtttaccaactatcaagaacaaatcccgaattggtgcggcttcgatgttctcccttacccaacggcatcagcgccttttcgtgttataaccccaggccatggacttatctacactccacgcctgcgcttaaaataatggctcaacgcacaaacattcactcttctcattctcagcgccttctccttctgatggttcaatccgagtttgtactagagctcaagagcatcaacgagctctagaggaagacagacaataattccgaatggagatccaaccctcgatgaatagtgtcacatccggtaggttgaaaggttccgagcttgaacgggatttgcctactgcgacactgatagttctcccggtgacggaataggtgatggtgaagagtatgagatggttcatggcatattaaaggcggtattgtgccttgttcaatatacactgcacgaaaagataaaaggaggctggacggccaatttatcatcaggtcggtcaagaggatcagcagcttgatgagctgtctgcttctataattgttgcagctatcaaggcctggatacggctaagagaaatcgaatttcaaataattaggtggtatcatctagatacctcggtccggcaaccgaccatgatacaatgagccctcagtgtcactgcggcacagccttgtcgacagagtcctcatccagctagtatacacttttcgcaaactccgttcagacttttacctacctataacggtacaatagtcttcattcctttggcaatccgttgaatctgcccagtgtaatacgtctacaccatcgttagctacctacccgaagctggctgggaggggaaggggggaggaaaagggaaaaaggacaagacgtacgctctccgctccagcccctatagcagcaagcggaatccacttcgcccagaacggcacagggatcctattcaaatgcaactgcgcctcactttcctgcacgctctcatcgagcagcaactttggaaaatgcgggtcaattgccgcaggacgcccaatgccgacaaggtcgcacgcgttctgggaaagggcgtagtctgcgccggcacgagagcggaaccccccggttagcattagaataagggttgggtagcgctcgcgcacggcggcggcgaattcaaggaagaaggcttctctggcgacggtccgggcggatttttctgcttgctgtaggccaatattcaacatctacccggagggatttggtcagtacgcttcacagatgtaatggatgggggaaaagcaaggcaagaccttgggatcttcatagcttccgccactgatctcgatgaagtcaatgcctgcatcgactaggaggccgatttgggtcatggtgtcttcaaagctggaggagttgtggtcggctgagttgaatttgatgccaatgcagaaggtggacgggacgacggcgcgggtttgcgcaatgatgtcgagaacgaatctggccctgtttgcggcgctgccgccgtaggcatctgtgcgcgtgttgctctgtatcatctttattacctattcttctgtctgctgatgttgttgatagggaaggtaccttagggttaagaaactggtctttcaagagtcagcatcaactcaccgaatccttttagctagatgcataaacataccgatcagataaccatgcgccccatgcaactcgatccccgaaaacccggcatcagccatcagcctcgccgcatcgacaaactgcctggttcgg

SEQ ID NO: 1445 - DNA, 5273 bp, Emericella nidulans
  unsure (1)..(5273): unsure at all n locations
taagtgtacaccaaactcgtgcgcccccaacttccctggccccttccccattcggcatctcaccatttcgaccttccacatactctcggtagatagctagcagtcgtctacgttctgcttcgctaagcgaactgcgcgtcgtgttcaaagaccgctccatgtgctcccatcgcactactatttcttcccgaccttcggctggccctgtctcatgggcattgtccgtcgcagttgtaggcgctaagctaccggcggcttgctcgaattgccgttggcgacgtcgcgcgttcttcagcgcatcgagcttggacgccacaactgccggtgccggcattgccactgttccagctcgctgctccagatcagagtacaggaattggatgaacgagcgactactcgtgctgggtgtggacgacttgacggtcttcgctggcggcttatcgcccgaccgatcgcctaatgcgtcatgtactgcctccaggtgcgcgttgtagacaacagcctgtagatcagcaccggaaaatcctgctgtacgcgctgctacctcatcaatccgggccaccacctcattgctcatcgcaagcttcttgctaacagctcgaataatatcagcacgatcagcatggttgggcatatcacagagtagcgacttatccaaacgaccgggacggagcaacgctgggtcaatcagatccggccgtgatgtagccgcgagaacgtatacgcccgagagaccctcagctccatccatctgggtgagaagctggttgaccactcggtccgtcactccagttgagtcatgaccacgcttgggcgcaatactgtcaaactcatcaaagaagaggatacatggccgagctgcctgcgctcgttcaaacagatcccgtacactcttctcactggcgccgatgtacttgttaaggatttccggtcctttcacgctgataaagttgagaccgcactcgcctgccactgcgctggccagcatggttttaccgcacccagggtatccatagagcaacaaaccggagcgtaatcggagtgggcactgtgcgaagataggagcatactttgttgggtactgcagtgtctccaggagcatcttccgagtctcgtgcagaccaccaatagcggaaaaggtcgtggtggatgaagtcagagttacattgcgtaaagatgccggggtgaatcctttaatggcattatcaaaatccgctgctccgaggatgatcgccctggactcatccgatgcctcgctgatagatcgaatgagggcttcgttgcgagcgcgagcgacgcagtaacaccaagtctccaggcatgaatccgtcggtctttccagctaggtcgagaaagtcgacatcacgcccaagaatgaagccgtcaccaccggatgagcttggccgactgcctggatttgaagggtccagccaggaatcgttggtcgacgtgctgactgtccttgtgtggccattagtcgcgccggatggaccagcttccgccgtcgcactggtcgtcctgcgatcctgacttgtgaggtactccagcactttacggcgtccctctttgtcaggagcccttagatggattacttctcggaaaacatggccgcccacaatgacgttatttaacgattccttggactgcgccgttgcaagaagtacaacgcccgaattcatagaacagaactcgcggaccatagagcagatgacttcactgttctgacggctacggccattatctcctcccacttgtaattcagtttcgactgggcacagcttgtcaaggtcatccaggatcacagttgattgcccgccaaggcgagcgcaccatgccgcggacataaacagccggttcaaggtctctttgatgttggatatccgagtctcgtcagtcacgagttttcgacacgagaagtacttcacgttgaacagcgattctttctgcaaacgatgcgccaggagctgacccagcgcagtctttccggaccccagcccaccggtcaccaaaaccgaacaggatttgttgaggttatccaatgcttgcgagataacttgatcaatcccgaccatgggcggtgcagtggccgggattgggtcctccattgtcaggttcaatgcgctttgatttgctggttttggtatttcagcttgaatttcaaggggcaacttcgcgtcagaccctaatagccacccgaacacagacttagacgcatcggaagtgctcttcaaaggggggtcaaatcgtattagagccccgtcaaatgcagacactgttccttgattatctgattttggaagaaccataccgtccgttatgggccctgtgagtaggcccctgccggagccagtactaccatacaggactttgatgcgctccactagtgcatcctttgctgcaatagtgtccgctccgaatttcagtccatcatttcgcttcgtggcatctgcaaggaaaggatagactttgagggccctagtggctgaccgttgcagcggtggcggtgcggcctcgactcgaatgataccgcctaccatcccttctgctcctattgccgagcaaagcagggaagaaagaccggcatgttgagtgtcgggtgcatcaatccaaggaagcaatttggccacaagcttcgtcgtgggggcacccgaatcactagccttttgctcggcttggctcatctgttgctggggatcagatggtggttttagcccggacggctggacgagcgtgacacatgcccattcagcaccccgaagttcatttgatgcgaggacatcagggtcaagccagacacggaagccctcattattatcctcttctgactcttcatcaaagtactggtccgaccattgacgatcaagtcctctaaaatagagagcaccccggcttgtttcagacttgctacttttaccgcgcgcggtgctccccccactacttcgtcctccagcactccttttactgctccctgtgacactccggttatcccctcgagacacccgagtattcgcttttggacgagttttaggagcaacgataacttctgcatcaggagcaatcttagcaaagggagacgtgctcggcggagctggagtcaacgaggtgatcacaatgtttgctgtggatgtgggagagaggtgtaatgttaaagggtgcatgtgatcagcttgtgctgccgtatatgtagggttgggtagagctcggatttgtgacaagagattaagctctagaaatgtcgcatgcagttcgataactggacataggatcagcggctgaacgtgcccgctcagagaggaacgcaaacatactctcccaatcttcgggtgtcaacggctcaatgttgatcgtatgggctaccggaggatcaagatggatgaatatgccgacctatttcacgattaggaactccggaatagcgagaactatcagaacacgcttactctttgtccatcccccaagccaagaaaccttccgaatgtggtatccagctcaactgtcgcggcatcctgttctcttgtagatggggaattgtttatgccatcccttcccacgacaggtgcgattctgcgcttgctcggcattcctgtccaccccagataacacgatcgcggggtagtactgccgctgttggtccgtccggtcgggcggaactgtaactcgacaatcacattctgtgcaggctaacgcgtaggcaatgatacattaacataacagtctttggagtccaggaaagttagcgaaaggacctactgtattggcgttgaccaaaagagaaacgagcgagggcggcaggttcacaagacagttcttcagagagaccagggcgacttccgccgtggtggagggtttcctaggcgccattctcaggcgcacacgagcggagacttgcctatggaagtatagtagaaatacagatgtaagggatgctagggaaaagaagtctgggctgagagcgtggtgatgaagtgccagccgccggctccaaccccggactccgcaatcactcgccgagccgagagttgatgcctcgcgaccgtcggaccgagactttttccgctccgttacacgtgccgctatgcttccccttagacccatttcaggactagcgtttccgcttaagaattctgccttgggaaaatggctgcattacccaagacgcgtctttcgcgacgcgaacgtgctttacgcctcaggctgcaaactcctttggtggaggaacgcagaaaactgcctggcgcccagtcttgtcaagttacaacttccgcagcacctgcgccctcttcttgctgagcttctggactctctcggttgagccaattgttcctgtcgcggtcgctctatcatggctttgaaccagtaccctgccccggttgattaccatgggcagcttgaggccttcaaggatttcctcaaacacttcaaaagctttgagtccgcctctgcatcagccgcaacagaagctatcgaagacctacacatcgacgaagatggcatcagcgacgagtacgattttatggaggacgctgatgagagtggagcgcagagcagggcagggcgccgccgaaacaaggagcccaagctgaagtacatgcagatgttacaggacgtagctgaccgggaacgtttagacgtcctcgttgagctggatgatctcgtaaatgtaagcgcttgcttctcttcttactcattccagtcaatgtctaaccgcgccgtcttctagtatgagcgttcgctcccggaggaggttgacttgaaacttgctcagtccgtccagagaaataccaagcgttatattgaggtcatgtctcaggcagtggacgctgttatgccgaaggaaacaaaagaaatctcgtatgtcaggctgctccatgaattacgagtgctggaactgagttgcatctaggttcaaggacgatgtcctcgatgtgatcatgtcgcaacgtgagaagcgaaacgaagccatgaccatggctgctgaagccgacccagaagccgccctagatgcgtcaatgttccctcccgagcttactcgtcgatatacccttcacttcaagccccttactccttctggatccagcagcgaacgtgcttcgaaagctctcgctgtgcgcaacgtgcgcgccgagcatcttggtagcctcatcacagttcgcggcatcacaactcgagtatcggacgttaagccaggctgtccagatcaacgcttacacatgtganccgtgtggtaacgaagttttcagccgtcacgacaagcantctacccgatgtcagat

SEQ ID NO: 1446 - DNA, 2897 bp, Emericella nidulans
ggcgagggtggggaatatatagagccgcaaaggagtggaacccggatatccaaggaaagaaaagaattttttgggggccaactctgttgggaaagtccgcactaccgtggtaaaaaacaaaaagggggggggtgaccccagaaaaagaaacccccaaaaccaagatatcggttgtttggaggaaaaaatttaaagagagacccgatccccggcccaggtggcgggctcccaaggcccggaacaaaccgcaggatccctaacaaacccccagagggggattttccaccaaaaccaggggtggcattggccagtggggagacgagcaatcccttttttaggccgaccctttggcgcacccggatggccgtcgtcatctagagggtggaaaccccaggataaagcgatggttccggaaaacaaagggggattccgcacaagggcttcgcaaacgactcgtgccatatggagtccccagaaggccagctgtcatcgtacgctcgcacgaagcaggagaacgttttaggcgtgagcgttgcgacccatacccgcaatatggccagtacgctgtttgattactagtgaggcaagttttatttgatctgtaggagttcctgcaaggggcagctgggtttgaaagggatgactcaaggggcaatgtccaacctgacaagtcataatgggctggtttcgccagccggtgttgatcgacttggctgggatcatctactgttgctgcaatagcctgcgccgacttcagtggaagagcggaaagaaagaagataaaagaaaaaccaaataaataaaaagaaacgttgaacacactgcgttcctatgcaaactatgctgtaatatagaataatgtccggttttcggaatacggcccatcaccctcgcgaaatgcatcgcatgagaccgacatggtcgagggtttgtgtgatggggaggagttggatgcttctttacagtctgacctgtgatggtggttgcgagagaggcagttggatgctcatctctctgactggttaagaatgaaaataacaaggctgcaccgctactcccacaaaactctgaaaatggctgggatcgccgacgtgtactctcttgaccgagaggaggcgtgggaaccgctcattcgtagagcattgatgtgtcaaggctgcaatctctgcgccaacgagtgatgctatgtgtggtttattaccaggcggtaatatcttccacctccgcttcctgaaaagtgctgctcttggttagcttgccaacaccgtcgatggcggcaccatccgtgggcgtcttggacattatgtcgggaagaacctcccggaagaactccaggatgtactgattgacctgctcgaattgaagtaggaaggcatcgtggccttcggggctgtcaatgcgtttgagtctcgagtctgggatgccctcggcgatttctttctgttcctcgaaggtgaagagcccatcgctctcgattcccagaaccagggcgggttgctggatctgcgaaagcgcctcacgaacgggattttcggagtccggacgggctcggtggcgagagacgtcatgtgtatccagcttgcgagtgatggcgatgtaacagttggcgtcgaaccgtttcacaaacttgtctccctggtagcgaaggtatgactgggcagaaaaataggtcgcaggtcgtttctgagcatttccatcggtagtgctgacacttttgctgaaagtcttggtcccagagaactgtgggtccatatactgcacctcggtcttctccgcaggtttctctggcgcgggagagttacggccgctccaattgcccttgtggccatcattgtggatcgcccaatgctcgttcggaggagtaggtagtctttctgtaccattgatgttctgccgcttcgacgggtctggtacgtttcgaccgaaccgagactcgaacgaattacggcttcggtaggtcagaagggccgacatccgggcagcaccaagcccagcggcaggaggttcgtcgaatgaatagtacccattttcgtacttggggtcgctgtagatgctctggcgctgcgcctccccccagctgatgcaccaggcagagtgtcgtgccgatgtcgcgatgggaacgatggctcgaacgtagtccttcccaaagtatgcatattcaagagtgagcatgccgcccattgagccgccaactacagccgcgatttgtttaataccaagatcgtccagcaccatcttgtgaattcttcaactcgttagcaccattttgtattatgaatgaattttggcactcacctcacatcgtcacggacagtggtaagagggaactcgggcccgtacaggcctttttccgggtttccatccttgtaggtcaccgcacttgcgcttccgtacggactaccgaggctattgagacagacaacaaagaaccgcgagatatcgaaggcttgtccggggccgccaagtaggggtccccaccagtcagccacatcagcgctaccactcaaagcatggcagatgacaagagcattgtcaccactcggtgagagtgttccgcgggttgtataggctaccggaacgttatagagggtaacgccggattccaaggtgaatgttgggatgataacgatagactggtcctcgatcagggctgagaatgggttttcaggttgggaatcgactctctctacgggatttagtagctgttcagctcaagaggggggagaaagtaatcagtgcggggggtactgacggagacgggcggtaggctgttctgtggtcattgtgcaccacaggttggagagacaagcagtgtggaaagattgaattaatacgatacgaccaaaggacagacaagaaaagacggaaatgaaatgaaatgggtggcgatgagttca

SEQ ID NO: 1447 - DNA, 1029 bp, Emericella nidulans
cttccttcaactcccaaggcagtacttgaaaaattaaatatcaacctaggtactccaaccccccctccaagccatgggggtgcttcaatccctttgtcacagcttgtacaccttatactgtgcgccatgtacatcaaaaaggctcttcagttaaaaagctgctttgaagaaggtctaaaagtcctccaactcctaccaaaaaagtcctagatgagttggtgaaagggtgtgagttagtgatctataatgccagcttactagcaaaggaaaattgtgatctctgctcagctatagagaatgacaggcagaaaaaggctcgttctaaataccagatgtcccctacagaaggtctttcatttcaggaagccagagacctgatttcgttgagaaataaggaaatagaggcaagatgggggggttctggtggaagtgcgccccaacctttaggtataccaaaacatactctaccaacatgttcagaatataatattcaggggcataagagaaccagctgtcctaaatattatggtatttagtttatttaatttgaatcactgttggttgttttacaggacttcaaagttgagcaagcatgggttttgatgggaaaattacggatcacccgggaaccacggatcacccgggaaccacggatcacccgggaaatacgttatgctctgagtagattggcgaccataccgactatccaatacttgagacatccatcactttccacacgaagtcaagagggagccaatctcttctcctacgagatctgaccgggttgatgtgctcggatattcgtcaatattgatacatgttttgcgatgcatcccgggtgagggttggggccattctacctgttaatttgactagtgaggttgcgactaggcagatatatatttcattactcggagtttggttggtagctatcaatgcacaatattgcataattaatgcataattcgccatacaaaaatacatcatttgagatgatgctgagtactattgggcagcttgcattgaaga

SEQ ID NO: 1448 - DNA, 524 bp, Emericella nidulans
atttaatggaatttggtttgaactcttaagacttttgatagcagcgagtgggttaatgcatggtagtatgccgactctgcagcaaccactgatcttagcgatgctgatcggtgattagtggtctgggccaatactctgtggctttgtatggaagctaaaatctctaggctagcatttcatagaatctgtctaggttgcagcctggcagcctaatctcttgagacggactgctcccactagttgcgccctctctccggcgtggctgagttcgcagctttgcctcgtgttccagttctctatccatcatcatcatttcgtatcgaataagattgaaagaatgctgaccgattatctctggctgcccaatgatggaaaacacggtggtgatgggttctgcgtttaaacccttggaaacccgcgccttctgggtcggaaaggcgtacttgccaaggccaatgaaagcagtgcaatcaaggtgctagaacagacgtaaagcattgaaaggggcgacgaagcaaagtgat

SEQ ID NO: 1449 - DNA, 2471 bp, Emericella nidulans
atctgcagaaattgtgactttacgtggtgttaatattgttccaggtatatcggcgttctgaatgtgacattctcgaagaagcgctccaagaaatcttcggaggctcagcttgaacaatcagacgttgatgctacagatgatccgcaaaataaaaatactgtcgcaaccaccggacacagtttgcacgaagctgcgaattctgtggagaaagagcgcatttttagccagaaacaagtcactggtatagtacctaaggtgatactcgaaaataaccgccatattattcctgttgatctgttctctcataaaagacctcgcacagcgactgctgcgctgtctgacatgcgcccatcctccaacggggccgggcgcaccactaaccagcgaaaccatgaacatggttcgttggatgaaaaactctcccactcgccagcgaaaaagacttggggtgctaccactgtcaatcggaaactacaagaacaggttctcagagaggtattcagcccacctgccatccaccaccataggcgccatgcccgaggactcctcaaccctacgagaacgacatctgatggccatcgtcggagcgccaacctttccgaatgtcttatcacccgtcaacctcgcattatggaacagatggaaccaccccgatctcctgccattgacattgtaaagaaaggcagcgacggtcctggcctctcgtcgtccgcttccacggctcttgagggtggtcagcagcaccttgaatcggtaaggtcggaggaggccgtcccacgttctagctcggtgtcgcgaactcgaagagtacgacgtcggcactccggcagtggcctgcagaggcggggaacaatggattcggacaagggcggcggcgaattaatctttttcgaggatgagggatacggtggtgacaaggaggatgaaatattctcaatggaaagtgacgcgcctacgtcttctaccacacctggcgaagcaaggctctctagctccagcccgtctaaagggagtgacctgattcctcaagataggtggacttctggtggtcctgtcgtcgaatcttcgaagagccccgcttttccaggtttcaacgacaatatattatcgcagcctccagccaatccaaaggaagcgcaaacaaggaaagatgacagggtgcagttcttccttctgctagaagatttgactgccgggatgaacaagccttgcgtcttggacctcaaaatgggcactcgtcaatacggtgtggaagcggacgacaaaaagcggaagtcgcagagacgcaagtgtcagaacacgacctctcagcaacttggtgttcggctatgtggcatgcagacctggaatgtgaagaagcaggaatacatatttgaggacaagtactttggtagggacttgaagtcgggtcgtgagttccaggatgccttaacacgatttctctacgacggcgttagttacttaagcgttgctaagaagatccctattatcctcgacaaactggcgaagctggagaacatgatccggaaacttaagcggtaccgcctttatgccagtagcttgttgatcctttacgacggcgaacagaatccccaacacaaagcctctcaacatgaagcggcttcaaacgacaatgcgagaaatcatctgcaacgccgtacatctgaagatggacataataacaccgatgtttcattgaagatcgttgatttcgcgaattgtgttacaggtgaggatgaactttcgccaaatgcccgttgcccacctcaacacccagatgatattgatcgtggctacttgcgcgggcttcgtaccctgagaatgtatttccagcggatcatgaaagaggttagccaagatgaatatctcgagagaggcgaaggtgaaggcatagcgctcaacccccaatcatcgagcaataaccctacgtttgaccgctactgggatgaaagcgtcatggatcaagacccaggagaggtcagcttttaaaccaccgtcccgctcaggccgaggaatgcccgcctgatttttgtgtgtttattgatattggttcctttcactcttgtcttttccccgtgcattttgctaggcctctgagttggagttaatggctttacatttccatctatcgatctagacaaggatcgacatatgtggcgtcaatgttgcatggtcacggcttgggaggttatgctggcttgtcttacgagttattcgatttttgagtcatggtatcaaaagcattgtaccaacgcaggtgtggagatctgatgtctctatggtgacgactgacgactggtcatggcacttacttactctaaaggtttttcttacgcacctggtgcatggtcgaatttctccaatatcccttttatttctgtcctctcgccattcggacaacctgtcttagaatataccatccaggaacttgtccaattcctgggctcgcttttcattgagaccccattcca

SEQ ID NO: 1450 - DNA, 6281 bp, Emericella nidulans
  unsure (1)..(6281): unsure at all n locations
gccgaataaccctcactaaagggatctctatgagctcagcatcgtctacagaggccacctagtggggctcaggttccctgcattccccttgcattatgttactttcttcgacagtggtgtcctgagctttgtagcaatggcgatgggatcaaactgtggtatcgtgctcatacttgcctgaagttccacagctgtttttagcggtgccgggtcagagattactttcggtcattaagctgttgtctaatgaaatatctcgatggcgcgtcctgcatcctgcggccagcatgggcagcatatccctgccattattgctttttgtgaggatcgcagaacgtggaaaggcagatctcgtcctgtacacaccggagaggaggcagactactacgccatcatgcgggactgcattccccgcatataacgttacgaattgctttctggtttagctgaagaacgtcgtgagtcccctctagcattatcaggcagccagttctgctggcacgacgcaactccccactgtgttcccgccgtgacaatcgctttctcgtcatttttgtattattagaggacctgttcatccaaggtcccatcatcccgcactgtatctcatgaaatagactagtattgcagaattcagactctaaaatccggttgctggacatctaggcgtcttggtgttgcaatgggcaggttggtcgaactcatgcttgcgtcctccaccatagcctttgatatgacagccctgcgataggcaggttcgcttcttgggctgagagaattgtcgaagaatcaatagccagtgtagagcgcctgccagaatgacgcttggttcagtccttaacgcctcatgtcacgaaggcacatgttgaagccacagacagttctcactcgttcttaggatacgtctatgtaacgcagtatagtttttgactgaggagtcctccgcgccagatatgaggagcagctattgagcagtatactttcattgctggttctgacacttcaaacctctagaaatgagaatgtgatacacgccaattgtgtctatgcaaagtatacagtgtccgcagcaacgcctggatcgctacgtatcgttgcttgccgcatgctatataactatgagaaatggagcgaaaaaaactacagccgattcaattaagaccccacatctgcttgtaaagtgagtccatacaagaaaactgattacgtacaaagtacagccctcgcacgtctcgcgagccattcacccttcgcgattgcccaaagacagacccaaagacagaccgaacaaacatgtcaagccccaagcagttattgagatgtcctgaccggttgatcacactcctaattcttagcgagcccagagagtcagaagcccttcccccgagcccgccaagccgccccaaatcgcccgcccttcttggcgaccaggatgtctcagcgggttcgctgtaaaaggaaacccgagccagccacagacatgggtgtgatcctgccgtggctcggggtaaccttagtagtaaccaatcagactgatatgagagtttctgtaggcgtatgctcttaaggatggtgtgcatgggcggccattctgtttcctcattagaggcttattacggaggatcgagtcctcaacagtcaaaaagagaaccgggttggtcacatgtaatcccttgtcttacgcggttaatttcccgagagagtctcaagagtcgtccatgaacgtaacgtttgggattgatggaggaggaatgggctcggtaccagagtgacgggttgagatcgtgggatgtcattgcctaggaacgagtgcatggtgccatggggcccccgaacagaaccccggacttttccgcagcccaatctgtctggctcctgattcgcgccggtatctgccgcatcgaaggcagaatattgtgcgactgaaactgttcgattccctttccattggcggcgccgtcacaggccagttgtagacatgcagctcttaaatacagcaaggccaggccatgaaagccacatcggcccccaaagtgcttacctgcgccgccgatctgcggaataaattatgtaaatgaatttgttagatgaagaggccggctagtaataaataaaaagatgtcaaaaataaacatccgtgcgccgtgcgccgcacataatgccgagggatcaaagctcagagctcggggcacactgggccgagattgtaatctattctcggcagggcatctgaaagtgacgtcaggttagatcttgtgcggtctgaaagccagttctgcgcctgggcttgtgattgtaacattgtgtattctgaagatggcgatggctatgtacttgagccacatttacactgtggatgagatgtgattgacaagagagccgctaggatcaacaggaccacgtcctcgtggcttggagatttaatgcgtgtcaccggctgtcaggcgcagggaagctgtgatgctgcgggacttgttctcttaaacgggggatgatatgcagtaaacatactgagatgccattgctagtgaatatgagagaggatacttggttgagtgcaggtgcagagatcaactgaaagctcatacgagctaggcatctaatcattggaataaacccctctagagctttgctgcagttatcaacagcataatacattataggaccatccatctaatccaccaaagcgtaaacaaatcgatatcgtgtaggctgaacaaaacctcacacgacgggtataaatcctaccatcgtcaatcacccccggttatctcggcactccccattgctcggaatgatttactccagtctcgtctccgtccccttcgcctcctgactctcattggtgctgtcctcactctcgaacttgccctccacatgacgcacactttctcgcctgatcgcctcctcgaggtactcaggcttaagctgaccgtgtttatcatagcggtacggctccttgatagaatgctgcacagcgctccagattccgtccgactttttgaagattgcgtccatctcttcgagcgaacggtaacgggtttcggggaagcagaagtagacgacggggaacataaaagcattactgaagatgatattagcacgtgccctggtacaagagccagctgaactgaagaaaagggaagctcacatgaccgcaaagattgtgtacgtgttatgtttgatgttctcaaaggcaacaggggtgatcatgaccaccatgaagttgaagatccagttcgccgaagtcgacagcgcattggtaggcgcacggatacggagcgggacgatctcggcgggatacagccaggtcatgccgagccaaccgatggcgaagaaggtgttgaaaacaaagaggaagactgcctgggccacaccggccttggtgtcgtcgtaggtttcgcggcggtagtgtgtacccgcgagaatggccatggagatagacattccagcagcctggctttgtcagattctagcaaagaagtgaatagggagggaacgtacgccaaagagcatcaacgggcgacggccgactttctcgataatgaaaatgggaatgaacgcggcgaggaggtactcggtgccgttggcggcggccatgagcttcgcggtgttaccgccaccgagaccaatgtccgtgtagatattgggagcctagacatatcagcaatgaacgcgtttcaaggcagaacatgtgctcacatagtaagtgatgaggttgatgccggaaatctgctggaacatctgattgacgtaggcgagcgcgacacggtggaattcacggtactcgctcatcttgaacaggctgcggaatgatcccttgttcatttccatcacagtttccttgattgacagcagttcgttctggatgtaagggtcgtcgcgcggcttctcgttcaggagttcaagaatctcaaccgcttcgtcgtcccgacctttcataaccagccaacgaggggactcggggaggttcataattgatatgaagatagtaacggcgaaaataatctgaaaggcgattgggaagcgccatgagacctcgtggtcgggaaggaaggcgaaacctgcaagggagcgtcagtgattactgcgcgccagtacaaaacagaccaggaaggaaatcgacgtaccatagttgatccagtagctgagacaaattccgccggtgatcaacataccctcgatcatcaccagtttaccacgatcgtgcgctttcgcagactctgactgccaggttggaaccgtactggtgttcatgccgttaccgattccagtcacgattcgtccaacgatccaatgagggaggctgtaagcagtgcattgcaggatagcgccagtagtcatagtcacgcagccgcagaaaatggtcctgcgacggccgattgcgttaccgatgaacacggtcaagatagctccgagaaagcagccgaggttgtatgcggcgacagcgatgccctggttggtgctacgctgcgacctgcaggagctgaggttttcgtcttccgggcacatgtctgcagtgatttccgggaagtacttgtagaaggatggcagctcgaggagaccgcctgtgacgccttggtcataaccgaaaagcctgtcgccattagccagagtcacataggaaggcatacaaagaccgacaggaaatcaagactgcccagcgagctgatggccaggttgagggacctgcccctaaagccgaagtacttctttccgaacatggcgacgcttgacgttcaaacgacggtcaacattgagaaagagcttgaggaagacttcacagaaatttggcgaccaggcgcatatatagctcaagattaaagctcccggaaggacagaaaaggcaatccgaggcagagcacaacctgggggaggccaagagaccgggggaggcctagcggggatgggggccacgttcccttggcggcctctctgccactggagttgagacctactctgagtaataatcgttaacaaaaacgcttgaggccgagaggtcaagaactgcccttggcggcccaccagaggagcgagctaacagatatcgctgttgcatttatccagacgagccggggcatgagttccttttgggaggcttgttacgccttctgccttggttggttacacggcttggtcgggcgcaggagcaaaagtatttgtccctccatatcaagtaagacatcctgtcaatggatccttcgcgaatgacggatggtgtgccgtgctgacctcttgagttggctatagccgcaggatactaacgttaccagaagctggggcaggcgccaacccccgcgggacccagtcatgtccccggcctacgtcaaaaagactttccttcaagccagtgagaacggtggctgcgggccaagtacgccgtggctgagatctggccaatacggattgggccatgttcgggaaaggactaggggattccttatgccacacaccggccaccatcctgccgtcttcgcggctcaggtacatgccgcagctatcatcgagcttcccaagttggccaaccgctgagacggtcgttttcaaaatttgactgtggctgcatgatcgtccagggctgagacaaaggaaagtgctcgagactgagcacagcgtcgccgcctggatctgtgagtcaacgccaagccctaaggtcggcgccaagggctcggggcgattggagtaggtccccccatcgtgcatcttactcaaacccgtccgagcatcggaatgagccggaaattctccaaactggatcggggccgggctagtagaaggtgccggcttgatagtgacgctcggcaaatggcacggttgaggctctgggctttgcattgtgaggttgacaccgatcacggacggccgcactacggtgctgaagaccacgatgcagccgagacggtcgttgagctgaactgtcgcccttcctggtagaggtcgataccaatcccacgtcaattcgagccagatggagggctaaccttgtgttcctgccgcgataaagttgaatcaaaaatacaattaagtgaaaaaagattgaaaaatgagaaaaaagaaataaaaataaattaggtctaaaagtaaaaacattggaaaagtcaaagagcatttaaagccgtgataaataactgccatggctaggatcaaataggaagacggatggaattcccccaagcaagcgagttcccgcagtcgtacatcaatagccntagtgattggacaaagcccacatgtatgcgctaccgccctagacagccgacctgagcaggcatgaagtccat

SEQ ID NO: 1451 - DNA, 2529 bp, Emericella nidulans
tattcatcatagacagttgtcctgaccctgttcgttcaccgccatagcccgagtctgcaaatatgaaatcaagggtcgtttaacggagaagaaaataatgctagttaagtgtggtggaacgattggcttagtagacttgtttacatcgtcccttgcgatgctggaccagctcatccatacacggcagatgatggtcttaacgagtcaaggtagaccgaaggcagtgcctatcatactgctttattgaaatgcaatgccattaactatggttttaggatccagttgtaccataataagggatattggccgtttaagccgtcataacatgaaccggaactgagaaggttatagaaagtcgaataaatcaacagctgttgcatcaagtctagtatgcccaggacctaagctaagcctaagattctaggacctggcattctaaggctgcggactgagagtaatttctgcaagtaggtctagaggaaagtacaatcacccattcagtttggtattttttttgggatctctgattattctcgcttttcaaagtatagttctccatcagatttgctgcgtctatatgccgggagataagagctctttctcctctctatacagcacagacgggatttctagctttgctaccctgatttatcgagatggacgagtagatgtcaagacttaacaagtcacttgtggtgcatttgactcacaaactacactttaccgtagccgagatggacttggaatttgtagatttctagttcttgctatctagcagtgtatggctgcttttggaggagatcccagggtagggcgcctatcctcagcccttgcagccatagttcaccctaatataaggctgggaagcctgctccctaaatcctcgcccccctcgttgccaatgcatccgtcaacgacaacaactgatcccgctcctcatcagtaaactccctcctgttcggcccgcctcgactgccatcacctccattgcggctgttactcccggtgaagagcttctcgcggggctgattgcggtactcggtgtggaatcgccatttctgtgtcagttcgggggagagggtgcgctggaacgctgacgcgatgtattttccgatcacagggaggaacttgaaggcactgtggaggcgaatgttagctattattctttatcttcaatgttcagcgtgcaagacaactgggatggcatactgtcccgtcccgccagtggcgatgaacagatttttatactcagggtgatagtcgaagatgaaatccccagttggcgtctcgttgtaccagcaaagacaggtcttctcaaagccccttttcgcaatctcggggagtatctccctcagtccagcctgcagtctctccatcccctcttgggggatgaagtttgcccgggcgggaatcgcccggccgggaggcgatgagaccaatttgttcgctgactgagtcgagagcgtataaccaaagctgtgacacgctaccttaagatatcctgtcttttcgtgcggtgggaaactgaagaagccggttgataggttgaagataatggggaggtccttgagtgcttctacctcctgtggtgtcagacggacgaacccgacaatctgtgccgtcgcgaccatcgagttccaggagggaatgagattcgccgtccaggcacccgtcgcgaggatgaacttgtcgccggtgattctcccgcatcaatggtgcggacggccgtgatggagctgccacaatcgccgtccttcgccttctcatgctccaaccacgagacatgcccgtgaggcccagtgacaaaggccaccccggcctcgatacagcgatcacgtagccccgtcatggcgacaccggcatccgcccacccggcggcattgttgtagaagccctcaaagtcctctccaatggggcggcccgccacggccgggaaacgctctttcagcgcatcgacgtgcttcagatcatgccactcgagacccagatcatcaagaatcgcctttgtcttgcgaatgaaatcggacccgccggcgagaccgcccttcttctgcgccgtccaaacacacgggccctggtggaaagagtctgcgtattcaggtgtgttccagagatcgtatgcttccttgcccagctgcgcgtacaccttgtcaccgtagtcgaagcggattacgcgcgagatgtcattgctcgacccgtctggaacgggaggcatgctccgatccaagactgtgacattggtgaacccattctgagcgaggtcgagggctgtcgagagaccgaagacgccggcgccgataacgacgatgcgttgggatttgtccatctcttttgtcgtaaatgctgactttgggagtgcgagctgaagccttttttgctctttttctcaggcttgaccacagctggagcaatagctatagctctggctggccgacttttcccgcatcctgcacggctcgtgaaccgtctcgaccggcttggcgcaaataagccgggtcggttagcgattccggggatggaatagacttg

SEQ ID NO: 1452 - DNA, 806 bp, Emericella nidulans
ccgagatacaccgatgggattattccgcaagagactgactctctttcggagcttttttttttcgctcctggaatcttcggggatcccattctatattcttcttgtcagcaagctgccccagtagcctgacccatctcccaaagtcttatcctgtcttactgcttccgtcagactgtcagacgggagacttgccgcgggaaatggcatatatttacaaaactcgacgtatggcagatcattaggctatgcagctggtaacataaagccagcatataccgaaatacgcatcaccagccaatcgcctaatcagttggttactttaccgtccgtagatttttggattagaagacttggaaaaccaaatcatgaaaatgaaaaaaagaaaaaaaaaaagaaaaaaagaaaaaactagcaagattaattctaggatttgggagtcgaaacacttgggggttgttgagatgttctctgtagaacgattgaattgcagggctcttgccaagccaaaattttgatgttactgtgacgcacagaccataccattattggccaatcacaaacattttttttataaaaattttgctatatagttcatcaaaaagactacctgttgccttcgggcatttggtcaatttgaaacgatacagagaagattagcatggcccctgcactaaggatgacacgctcaatcaaagagaagctaccagttttttttacatcactcccaagcttcatttgaccattttttcctatctcggtgattgcagaaaagtttcttaagccaagagagccagggttcgaatccg

SEQ ID NO: 1453 - DNA, 2042 bp, Emericella nidulans
ctttcattcgaaccgatcaacttgacggtgaaacggattggaaactacgactgccgtcttcctttctcaggcactttcgcttgaggatttgacgagattaaagattacagcaagtggaccggataaacgagtcaatgaatttgttggaaatattgagcttctgccgccatcagggttctatgatccacatgttgacaagtcagaggatagaagtcaagatgctgatgagacggaacagaacagttctgcgccacttacgatcgacaatactgcgtgggctaatactgttctcgcgtcgaacactatcacgtacgctgctatcatctacactgggtctcaaacgcgagctgcgctttccacgtctccttcgcggtcaaaggttgggcttttggaatatgaaattaacaatctcaccaagattctatgcgcgttgactttaaccctctcaatcattttggtggcgttggaaggtttccaaccaacgaatgataaggagtggtatgttgccattatgatttaccttattctcttctcaacgattatacctatgagtctccgggtcaatctggatatggcgaaatcggtataccgtcgctctattgaacgggataaggacatcccggatactggggtcaggacgagcaccatcccaaaagacctcgggagaatttaataatctcctttcagacaagacgggtaccttgacgcacaacggtgagttcacaagaatttctgtgcatcacagcaactaacgtccgtagaaatggaactgaaaaagattcatgttggcactgtctcctatgctaatgacgctatggaggaggtcgcgtcatacgttcgacagagcttttcgggaaatactttgaccagtgccgcggccgcatttggaacccaagcaggacttgcagcagcgccacgtacaaggagagagatcggttcgcgtgtccgagatattgtcctagcgcttgccttgtgccacaacgtcaccccaacgtcggatgaggaagatggagtgaaggtgacaaattaccaagcttcatctccagacgagattgcaattgtacgttacacggaagaggttggactcaaggtagcatatcgggaccgccgaacaatagttctcgagtcgactgataccggtaacgtcgttgtgcgggcgcgcattctcgacatattcccctttacttctgatagtaagcgtatgggtatcattgttgagtttgacaaggacaaggatgtcctcaattcccccgcagaggaggagatctggttctaccaaaagggagcggacactgttatgacctctattgttgcggctaacgactggcttgatgaggaaacagcgaacatggctcgcgagggcttgcggacgctcgtggttggacgaaaacggctttcgccgctgcagtatcaggagtttgccagcaagtataagcaggcatctctttcgcttcaagggagagatatcggcatgcagaaagtggttaatgagtatcttgagcatgacttggagcttcttggtgtcactggcgtggaagatcgtctccagagggatgtgaaaccgtcgcttgagcttttgcgcaacgctggtgtcaagatctggatgcttactggtgacaaggttgagaccgcacgatgtgttgcgatttctgcgaagctggtagctcgcggtcagtatattcatactgttgccaaagttaaagacaaatcggccgcacaggaagcattggacttcctgcgaaacaagactgattgctgtctcctgattgatggcgagtctctggctctcatgctcaatcagttccgatcagcatttatttcggtcgctgttctcctccctgctgtgattgcatgccggtgctccccaacacaaaaggctgaagtggccgatctgatacgtcttcataccaagaagcgtccctgttgtattgagaacgcccgccccgatgtgtccatgatccaagcggcaaataaaggaattggtattgttggaaaggaaggccgtcaggcctccctcccagctgatttcagaatcactcagt

SEQ ID NO: 1454 - DNA, 3179 bp, Emericella nidulans
agagtggactcccaagtcagaaattcttgctgacagcgactacaactggagcttagtagattatcctgtacgactctctgggagagagacctttctacgacccaaatttcatttcccgcagggaggcacttggagcgtaaaaacagcatgggctccgagaattcagatgattgggtgtagaccttcggcataacaaccatgggatggtcgagcgaagttgcaagccaatcacccgtcttgatcggcgtgtcactgcacgccagttagaattcgatgcacaattcatccaattagttcagcgagctcctttgttatcaatggtctgtgataaatgctgctaatggaacgtcgcgaagggcccgaaaacggaaatttagggcatactccagcgaccggaatgggaataggtagaagaccatgaatgtccacgcttaacttctccctagccttgaaataaattagagctcctccatccatatagaacagagccgccagagctaaccggggataagatcagggaaggaagttgactgaaaatgagacctccatccccgatcatcctggattataccctccacgatctctacacatccgatacggaagatagcttggagactgtcttggtttactaccctctacagtacaagcacgaccatggaaacaaagaggttaagtatgtctacgggtacaacatggaagaagaggacgaaggcgccacatcgtcttcaacgatggccgccagcctggtaccacaaagatacgcgttttccgctggcagaatgcgtttggtcatcctgaacatggttgcgcaaaggaaattgatcagcgaaagggaagaaaattctcaagcagctggttctgttcccgcccattatcttgatatttaccgaacgttcgcgcagctacaccctgaccagcggccaagcgtggtttttgcaaagaatccggacagcattgagttaggctcgggcgcgaggattgtcattctacaacctacggactgcgtctcgcatttaccgccccttatctgtccagaggtccattatgagattctgtcaaaacgtgggctggccttgtccggcttacccacaccactgtctagggtgattgacgccattcttgccgactacagggatcctagtctactcgcagaagagactgctcggataactggttacattgagcattatcaggtaccgttcatggtaaactcccccagtcgatttcagggatgggcacatttgccgtgacctgcgaaactgaccgaatgcggataaaatccatgctctcaacccaattaggaatcttgctacggcagctcaatcagacaaaccgccatcttcatccctgctcgatagttcttcaagactttgttgacggacctgtggtggccctgtcaatgttcgtcacgaagaccggtcagcccatattcatcgcctgctgtgagcaattattcgataataagtcgcattggattggcgggaccatctcgtacccacagcaggcacagtttcgagagacgttttctacgctcatggacaaggtggctgccttcttgcaccgcaaagggtatcatggccctgcgggcatcgatattgtcaccgaccaacacagcggagaacaattcgttatcgatctaaacgttcgggttactgggacttttcatctagggccactaaagggccacttcacgcaaagggggctgtctgaggctgctatgactagcggcgacttcttttgtacgcgagacatgttcgaggaagccttctcggaggagattcgacaaggcagtttgttggttagcggctgggtacaccacgagtctccatgtaaaagccatgctgccatcactgttgggtctaaggatcgtgatagtctgcaggaataccttcggcgcgtgaggatcgtgggacaaccggattagtatgtgtgtatgcaatcgtgtttatttaatgcttatctgattcgactttcgaaccgatgtcaacaagtctcatttataacttctactgctatctctgtaactgtctgagagacacagccttctatgtcgccccaggcatgaccgaccgcaggaacagctctaaaccgtccacgtcatctatatctgatagaaaagccagatgctggtcaggccgcagtaatgccatacacccctttggcccaattccaaaagaagagtacagtttccctccgccagcgtgatgataagtttcagcatccacccaagctctgccatagtccacaccgtcatttgtccaaggacggaagaccaacggcagatcgttcagctcgatgctatgcctatgagcacggtgaatgagatacatgccgagaaccggaaacccgcgctgcgcgatggagacccggttattcagcttcgcgaaggctgaatcaggggcattaagggcatctgtgagggcagcgacgcggcgcttctgattcgccgccacaatgtcacctccgaaaacaatcagattccattgtcccgtactgggaaggatctgatgcaaatggcatgcctgcgagtcgctttggttaaggatcagcacactaggaacgcgcgcgccgacccggagatttcgggccacggatggtctgctggtgcagggcggcacgtcgctgggcaaagatgtatcccaaactgttggtgtgaccagggaattaggttggtaggtcacagcgagacctgacattgaggaattctcctgctccagtgcccgcctatggtcctcgtcgaagcggccgttttgggcctctacaccaccgttccgcttggtgcacatccctcggcatattctttgatccaatgcaatcagttgctcggcgacgggtagccgttcttgctgatatgtctcgagagcactttggtgcaaaacgcccttgatgacagaggccagcttccagccgaggttgaacgtgtcttgcatgctgacgttcatcccttgtcctgccttcggagaatgtgtatgaatggcatctccggcaaggaatatccggttatggggaccaatttttcggcagatgcgttggccgaccttgttgctgttagtttgggcgttcacgtccggaagcaacctagcagagaaaggcccctgtgctcaccgtatacattgttgaccagtaaacataatacgttctaatgctatagggcttcatgatggttgcccgctcctccg

SEQ ID NO: 1455 - DNA, 3430 bp, Emericella nidulans
aaaaacagtaaagaccattataaaaggcacctagtgtatgaaatggcaaaggcgaagagatgttgtcataataaggcttggtgcacacgggtcctgatgcgccgagagaggatatacaacactgcactgaccaaccacatttcttatgagaaaccacttacctctggcaagtaaaacttttgagaaactggcgagatgagtgtagctctgcctataccgagaaatacaggcgagtgcgggttaggatagatttgaaaggttgttagagtactgatgctagggaaaggatgagatgagagacacctgtgtcagtctaatcatattagcaagctctggcagaattattgctcttggtaagggtgcaaacagaagagtatgctctctaaagtgttggtgtactcacgttgtctgttctaatctccgtgattgcagttttggacatagatgagtgttatggagatggggtataggaagtaggtgagcagaatttctgccttctaatgccatataagttccctagataatgattacattggcatttgtgttattactgagctattcactcactcaagatgacgcactcagttactggccagctttgatgctgagaaactactagttaacccacacctctggaaacaaggagcacttagaactcttatatttatgtaaaattatctgctgacaaaatcaacaagcattggcaggttccttgtatacaggcctctcactacagtttcaagcgtttttcatattccgaaccacatgacaaacacaaaagtagaagtaggatcatctcctcgccccaagctgagccggcagttcccgcagatcaagcaatcagaagaattcaacgacgtcttctaaactcatcagaagtactggattgatgccttcgcgtccccctggtaagtcagttaccctagaattcccactttcgtcagtactcgcttcaagtgcgggattcttatgcctcccaacaataacctctccataagagtcgttttccctcctcagttccttgctctcttgttgttcctgttgttatgatacgctgctcctttgtctgcaaatttccgcttttgcccatcacagccgtctaatcgtgggagtacggaaaacatttcctcaggctcggggctaaccagatcaatcaggaacgcctgagcacaaggaatctccgctgcgcgtgcttgcaccaaaggcgattgcagcgaagaaatattgccgtctacccgactgtctccgagctcgaaagtgttctgaacggcggaagcgtcattcaatccgttttgcaggtttcgattgtgagagtcgcgactttttggaatgatgtcaatccccagtagcaactgtgatggggagggtaagtcatctaagtcttcgtcgccgtaatcactcgaggtaaagtcaacggttggcggatccggattagggttctcctcgcccatcacctttgaccgtcgcagctgctgaatcaatgcctggttcgaacttagcagtcctagactgtttttgcacggttgtttggcaatgtctgtcaccatcggttttgtgcccttctttgctatattgccagttagcctcgactggctgaactctgctgcttcgctatgagcattgtcggacttcttcttcgtgacctttggaggactgctcagtccttctcggcaacaaagatgcttgcacctgctctgtttagctcgaacattgaaagatgacatggttatctcacaatggcctatctttacatctgtgattgcacatccaacgaccgttgtccagcttctgcggttctctgtccgcattttctttactctttgttgtcgtaccttgactgtcacccttgttctttgatgcctttttctgcagaggtgcggcactaactaactcagacggctcaaactcgacgtcgtcgtcaccccagttatcgattaatctctcttctatgcgttaactcctacatccaatgcgcctttgagtgatatctgagtccgactacatacctgaattatttctgaccatttcctgcgaggtcgcagcgttagatcgttcgtgcagtttagagtcgacgtccttgtcgtcccaatcgtccaatagccctgcaatgcgttaaacccacatgaccgatgtatttccgggagggactacctgagttcagccactccccaaataacagctcatcggtagtcaagcgtccgagattacttttgccggttgactccctctcagtactgttggtattcctcaagccctcaccgctgtgaataccctggcctgcgtctttgttcgctaaggacttatgaaaacaagatcgtggaagggccggcttcaacgtcgcgcttcgtgaggtcccagcttagaaatatcaataactcaaggacaatacggttatatggttgaaaacataccaatttcatcgcacattacatggcaagtaatactgtcatcctggtgcttcagctccacactcagcggtatctcataactcctctgcagtccagttgcgctagggccgttagtgtcaaagtgtttgaagagaccaagaatcatatactttgttcgtcgaaagtcaatcaagtggccatcggaagtctccgcaacaaagcagacatagacaggccgcccctggaagaaaaccgggcacttctcgttcatgaacgcaatttccgccttgaaattcactctaacaaaggggccagggtggatatcctatgatacgtcaataggttgcatatacaatcgtgacgttctcatacctttcccgtcatcttgacggagacgcgaagcttcggaaaattcgccagatgtttttgcagtctcgtcccaaacgcctgattcttgctcaaggcgatatcgattaggtgcggcttcgatttctcaagtgccactatactatcgatcccatgggccacgagtttcctcacggcggtggcatttagtttctcaatttgtttcatttggaaaggcgagtgatcccagactcttgccgctaggctcctagcgagccctaacgcgttgcagagagttactgagtctttgaggtgagcctgacagtcaattatgcatcggatgacccggttgacgtgcgcaaagacagtgcttttctcctgctgaaaagtgaatctatgcttctgaaattgttcgccgctggggaattcgacagcacctagttcggactggataagcagcgatatcttgtgtgccggcagtacaatatccacttctattggaagcgaatgtctttggagcgattgatctccatgtaaagtaacttttctccagctttgaaacggatatcacggaactcttctgcttgacagataattgccagctaatagcgtcgatataattgtcaacaaaggctaggaagcgactcacaatctgagcaatgtctgactcgcgcgtcgtcttaatctacaacttcatc

SEQ ID NO: 1456 - DNA, 3025 bp, Emericella nidulans
gaactatatttagcagattactctgccaggctttagggcagccaaaaatatccaaaacctaatagataattagatttgtctaacccaacccatttcttggcaggttgggtcgggttgggtcgggtttcgtgggttgggttgaacaagtctaggtttaattacatataataagagattactatagaatcaagggttattagtgcccttaatctatctataatatattaacttagccatcctcttacaagattagctagtatattatatataatatcaggaattatgacattattacgctctgacatatcgatagtattgtcagtaactgcctggttccgcaacccgcgtccggtccgaaccatgtgacagatatataccgggcatacagcatccacaccaattacaactaatttaataatgtgggcagactgaccagggatcatggtagctaagccgctgaatatttataagtaatcttcccgcatgttccttaggtaatggaacaaagccttgggattaacgaaaattgttacacatctctcttttgtatctgagcgctggacacaggcgccatgtggaggacggcaaacgaaatagcttattatgaactaacaaaggttcagggttagaaagtaagatgattacagaatatgataaagtacatgtgatttctattaaggtgtctttagcggtcaggtccagcgatgtggcaaagtaagcttccctagacttcttatcttttcggtggcccccttgagtcacgtgcaatagatggggccaccatggccttggtcacctgagatctcactcagctactacggcgtgcaggattcgcacttatagcaactcagcattgcgactaccactacggtgcacaggagcgacaacatacgcgttgcgggtgctccacacctgccatatcatataaaacttcacccgcggaaagtgatccctgggctcgccccagagcgcacctccatcctggagggagcgcgtctcatcatggtttatgactgggatggaaagcgcgagatatgctatcagatgtacatcaaagatagaaaagccttggaggagatcatggagtacatgagaaacgtgtatcaattttctccaaggtaaagcatttcactactcttgatatatatattgctgacctactagtaaacgcgcattccagacacaattcaaacgatggggctttccttcaaagcagaatccagcacataaaaacctgcagcttgttacccgcgttaagcaactctgggagacaaataccagccagcgcgacatgcttcggatcctcaacgaagaaggcttccagataaaagaacgcgaattgatgagagtgcgggccaaaaaccgttggctactccgggttcccaatgggacgaaagcacaacaggtggcgctaagttctcctcaaactgaagacgacagtctattagcgttgcaagagtatcaaccagatcctcaggacgtcgcagactcgtctgaggctgcgcttaaacgcaaggaacgccttgatcgtctacaagcggagagtgccgaacgttgggctgccagaaagcggcgtcgacgcacaaggggatgggctggtttaccagccgaccccccaggccccccacgtttcccgtctgaaaccaccattgacgagagcaagaaatacctcaaacttgacaacgctgggtaccgacaaattagagaccaatttcagagtatttgcgagaaggcaggcttcatcaagaaaaccattgcggggcctgagaaatggcaagaggcaaagaataccttgatccagaattccgaacatctgcaacgtgttttctgggacgaccccgatcaactcgaagccaaatccctcgctcttgatgttgtatgtaccgatgttaccaaacgaatgaggacactggaaaggcgcatgaccattgctgaggcgaagaatgtgcttggtatcaacccagaggagagccgtcaaatccgcaatgcattttacaatacactgagaaacgatcacttcacaagtaagttggaagcgggcgatgagcattggaaggagctcaaggagcagtgggttcaaggttctgagcttcttcaacgcgttcttgccccgggatctgcagatcccaagcatgccacaaagttgagggcgctggaagtcttgtgtcgtgatgttatgaagcgccttcgcgatgatcaaaccaaaagagacccatcccgtaggcgactggccgctaaccctaacattcgcgtcgccgagagagcgagcactgatctcactggcccatttgactgtgacatttcaaatggcatcagctcgcttgcgtccgaggctcttgccagtgcacctatcacttccagcgaccttggcgatatgcaaattgatccttcgctcttgcaggctgcaaataacacgtcatttaccccgactgttcaccatgatcctggaagtgcatttggttacgttgattccattttggattcgactatcatgcccatgacagtttatcttagcatcagccccgaaagtgaattgcatgcggactctaagccatgggttgataagctgtcaactaaatcagcaactgaactacggcagctggtttctgccaggtttcccgattcaatcgtcgtcaaaatcgaggctttcgacggagatacgaacgaaaacaatgccacatatttcataaatgatgacgacgaactctacggatacatggcccatcttcaagggcgaaaagcagtgtttgtctttaggttgagtctaggataaccttgtcatcccttttgtcctggcgcggggaaatcagggcccgattcagctatgtgaaatatcacaattagacgctacttttttaggaaatagtgtttttgaggtaaaatctgtgcttcttatgtttaaaaccttctgctattgggtgggaactggagttaatggaacaagtgccgtttcccgcgaccactttttttttggttttataaacacgattttcccatgcgctaggcctaaaaggatggtttcttt

SEQ ID NO: 1457 - DNA, 1314 bp, Emericella nidulans
ggaggtagagtaccccgcagctaatgagtatgtcggtatgtatgatgcatgcataagttttcttaggtaagaacagacccaggtagtggatacaaaatatggagcttccgagtggattgatgagtgaatcacatcggtcaagctcttttccgaacatgtgatcaagtccatcgcacatcagtaatgtgactgtagctctggcacccatgcagacgctgattggggcgttctgcatctctactcagctgaagctgtttgtgcgcatatgtagggcgtatctcgcgatgaatggtctacgtcaagagattcatcttcgccggtagcaggtgccagggccggccttcaagcctctgtgcgaggcacggcccttccacttattctggtacatgtcatgagccgtatattatctatcaggataccgaattatacccacatttcttcattgtgaacttcaagtagtacgaccgtagcactcggtcgctgtattccaacttttttatcttccgttcaacttctcgtccactatgcgcccaaccatcttctccaagatccccatattcccacccgccgtgccagcaaagtacgcctgtacccccttctcgacatacttagccacaacatcaatttcgacattcacaaagtcgccaaccctcttcgccgccgtcacaatcttctcctgcgtgtacgcaataagcataatctcaaaccatccgtcttcgccatccttcacctgggtgatagtcaagctcgccccatcaagcgtgataaaccccttctcaactatgtaccgtaacaccgcagggtcgcgcggctgcagacgaaggaccagtgagttctcatcgggggtcatcgcaatgatctttgcgattgtgtcgacgtggccctgcacaatatgcccgcccattcgggtctctcctttcacggcgcgctcaagattaactttggatgtttctgttaaggagccgaggtttgtgcgccggagggtttcgggggcaacgccgactttgaaccagttcttctcaaaagctgtgacggtgagacaggctcctgtggttgcgtcaacatcagacttgatatgcacagatggctatttgagcgcaggcggatatatatgtagagaaattggacatcaatttcgtaccattgacactgatgctatcacccagctgcacatcggtcaggattgtgtcgcaatcggtgatggtcagagacgtacccccgcccccgcttgctgaggtgtcgaggggttccagggacgaaaccgctaaacacgggcggttagtctggtcacgcatcgttgtctgcgctatacgt

SEQ ID NO: 1458 - DNA, 5321 bp, Emericella nidulans
cccccggctggtacttcattgaacgtcccttgaagctttgcagcctcaatggtgctctccgggccaggcgggtttggccttgcatgagcattgacagctggccctgtctgcccagtcgcttcacctggagagcttgcggcgcctgccgcagcgttatcaggaagacggtacgctgcattatcgtatgacctatcaagcggctctcccctcgtggctttggagatcggggcttttggaaaaagtctggcagtcgcaggtgtcatatttggcgtggacgtacgaatgaatatttcgatgatcgagcagcatgaaagctgagtgaagcaataaacattattataccctcaagaggagtatgtttattgtgtcagtactaaggcactccgttgttaacattcttcaactcatgccccactaatagattgcttaaactgttgtaatcggtcaatgaaaatgacccttgattctgatctactgctactcccagatatcccaagtgactagtaactgtgctatagcttatcatagaaatcactcaaggaatagaaatatagatatgctgtatagaataagacaagagaagcctaacactatgacagtctcttaccatatgttgagatcaataatgcaacaatatgcaatgatatgcagtgtcaaaccccccaaatataaacaaactactattctcgttgtattaaagtatccactctaattgaaataacagatagttcccattcaataaagatacgcacgcatctttcttccgtcgggattggtaatattcatagaaagcaaggggttaatgctggcccgaccccttgaagttaccaataattctttgacagtgccgcgatgtcaaacagtatcccacccgaggaatggagacgacaaacggcaacgttgcagataacattgtcgccaagggcaccaaatatgtcggcttaacataagcaaaaccgaagtatgccactacacagctatgaatagaactattccgctctgtgcgcctataattactagaacattatttccaatagaaagaagaggtcacactccaacatcagggcatcaaaacttgacccatggttgtcgattcatgcgagtagaatcctacccaacaacaatgcaacatgctagcactgctggagacagccgtcccagagccactctatgacaaccatatccacccaaaaatgcaggtgtagcacagaaatgactaagggttgtatgccccttgagccatgtactgacctggcggttcggaattcaattcctgaattcaaaaaattcctagaagtcagtgtttaggttgctttctctgcttctccccctacacaaagaaaaacaacgcatacttgaagcccaaatttggatttcccatcgtaaccattaccctcgaaacgtctaagataacctttcattgattgtaatcgtgaagtgagaagtatctagtagaattaaccacttaataccgaaggacatccctcacacgccaaacataattccctatgaagtgacggcaggtggcgcattgtgtacgtccggttgctaaacatattactgatattccgaatcatgatgcgacgagagtttacgtcctctgtattaagggcttgggaattcctggagttgctgatggtagctgtatagtaaacagtcgatatttacaaagggaaccagccaggtgcaacaataaactgctccgagggggctccgagcttcgtctccgtggaatgaagagaaatccacttgctttcggcccagcgataactgcatttggagtattagagtatggtatcgatccttgcgcgttattaggtggatgccggaccccccggcaatgtcgcaagttatgatatcgtaaactgaagagcaatttggctaagggctgcagacagcgctggagaggtctaactccaactctcccactcctaggcgcatttcaactattcgagaagtgtactatttgacaatcatgatacaggactacaatagccacttagtttggaacatcgggagcacaaggccaagcggcggatacgattgacggcggattttaccactacacctacagtttttaaagaacaatcatgcaccatattgaccctgagtaacgtttgttcagttattattatgtattagggcatttccttaatagtacatcccatagacctgcacagaccctctaatcgttgagcatgcccggaaattttatatatctgcgccagggctagccatgtatttagtgtcgagctgctcctcgatccggaccctttagtgcagtttgcctatcatagaaaccctttttccccattttcgttcttccttacttttttttcggctcgttgtgtagtaggttagtaaatataattgagagagcttcattctgccctctttcataaatatgcgtattcccatatgcttcaacaaaggatcatacctaaggccctctagggcaggtaaccaggatgactgttatgtagataacttcctataagggctttaacttattaaacttttacttaattaatccctgtgtttgccagttaccggagggctgccgacgcatttactctcggataatgcacctgaatgggagctagtagactcagtatcagatttagtcgagcaaaatcgcttctccagaaatgaccccatcaatcaccatcaccagattaattcatagaagatattacgctgactgcgctgatgctgagaagttcgcaaacagctcgtctcatcaaagctggcgtaacacaggaaatgcacattggtcaagacacagctaggccagagaaatatggaagacggatccccaaatcaaataaatttagtctcttgcagtgacacatctttcgcaacaaaggaatatgacgaatcaaacaatcccctcaagtctacccccagatagacagatggtacatctgcccgtcaacgggtgagaagaaggggtcttgattctagccagcgctgtgggcattgcaaccatcacgctagcagcctgagaatgcacagtctcattggtgttcgtattggcgagcgagggaagacagcggaggcgacggaagtcacctgtccatcggggacgtagatggagggttgggttgttgggcaatgtctgtgctggtcgcagtaatactctgatctaaaggtgcatgtagaaattattctcttttggtttttagtttggccgtataaggtgcgttgagatgcctaccgttgccgctgctgttattattctcgtcatcaaaatctttctggacgtgcctagagttccgttctcggatctggctctgactagcaccagtcttccttctatgatggctgattcctccctggcacccactcgcattacaccgtatatcagagatatattccctagcgagatgcgcgaaatctgaaatcaggcttccgggaagcatgtccctgctgcagtattcgattcgactgaagtgaccgctggcaacatctagaagggccaggttgaggatagtttcaggtagttaaggttatggataaccaggtcaaagagaatcatcagggtggagatttgggttaaggctaggatcctgctcgtatttgaggttcaacatcagtattgagactatactatgttccagatatgctatggtagggactagacagatctggtactgaagaaattctatgatgagcgtaaatacgtaccaggtaggggtcgaaggtgaaatctcgatataactcgtcagctcgagcactccgcgcgcagtctgcatcagctccgtctttcgatcgagctcttcaattctcgagtcccggtgttatctgctcgcgtccgccgccacagtgtagaagcgtccaaataagtgtaatttgtgcataccggtagtaatagtgggatttggatagcgatagacagtgccctaggctcacccagcatgcgcgggcgaagcggctctgccggccgaaaccggcgcgggatggagtctctccatttctcgagctcggcttgcagagcctcaacggttgtgcggcagactgtgcaggattggagcattgaggtggtattaaataggcgggattggatcttggagaccagccgagagtattttaaaaaactaatgagccagccgtagtcatcgaaggaccattcggatgtgttgggtagggaacagctaatgtgggcgtcctggagggtctgcaaccatcggtgagtgagaattgaaggataagactttgaaaatgaggatgactgaagagtgttgacgtactgggaccctcccagccacgaagcaggagatttttccgtgtagtaaaaaacccagaatgtccgggatgatgcgctcacggatgttgatgtagatcggtttagtctggaactttgggccaaaacagctgcctctgctatcatcgacggcttgaggccaaatcccgctattgattgagagaaaagcgcctagagggtcagtttcagactccaaaagtccttgttctgcaatagcactgtttttagtgctctgcacaccttgaggaagagacagggtgctcacaagcgccacgagtgcctgtcagtgccagcttcatacttgatatataaccatattttcaagcagaggaagcctacctgcactaaggtgagcgagactgggaaatgaaggtcttgggaataattcattgcttgctcaaagtaagcccatgctgagcccgtccgagcctcatagcttccaccgtcacaatgttgacagccgactgccaccactgcgtaatagaggcaagcccaggatctactggcggcgacgtggcggcgacgtcttgtgcaaggtttggtgcagcagtccgtttttcgaactctttcggacacaggaatgggaacaggggatggactagctccatgtacgctgaaagaggaccattagccccatgcgtaaatcagggcacaaatagtagaggtatactggtgatgtattcttccaccgcggggcgcttggtcaatctatgcacattctccgcatccagaccggtatctcgaccaacgcctgacgtaaccagtggactggcgcttttcagtttcgcaactttgacagcccgatagaccttaccgatgtttcagccgttttgaaggggaggaacgcccccaaccctttgttgaaccaaccatccaggttgcccgaatcgggcatttaatcgcctatggctagacatcctaactgccctaaacccgtaattcctagcgaatcggcttctttaaacctggttcctattttacgtctttccaaaatctctttctattctttatattctttgtcatacctactctttttaccattcttctattgttatct

SEQ ID NO: 1459 - DNA, 3668 bp, Emericella nidulans
aagatctttgacaactaccaaaaaaactccagcagggtcgattcccctaccaccaattccccccaacccaccgtggataatgacggatagacgggataggcgacagacaaagaacccgagatcgcgtgcggtcttcctcgaccggtcatggtcggcgctcccgtgacatcaccgaattattgaccgatatcagtcaagaaataggttaggacgggtggattagtaatggattttattttgagtggctcaaagaggtgtgatccggtatcggggcaaatgctcatgtttttgttttacaatgcgccagtaatcaagagtctatcatgcgagcgctgattggcaattcattgagcctgattaccgacagtgaccaaatcttgcgataaagaaccaggcaatacacaagctctgcttctccgcggatcacgtggcgcgtttgcccctcaatgctgattgataagaattgcgctgaccaaccgccagcggagtctcaaattggagatctctgactcttttgtttgatcgcttcccctcgctacttcggctcattctttccatcgactgcaatacttacattctcgcttgataccacgtcttgctctgtctccgcaaacgcgccaaaaaaaaaaatcctttcaacctccgccgccctctgaggcagaaatcactgattgcctccgtttcatcccctcccactcattttttcccgcggagacgatagacgccagcaacaatggccccctccttcgtgagcatcgacacaaccccagacttcgatatgacaccgacttcctcaaagtccgccgacagcggtaaacggaccctcctcctcgcaccaccctcaatcgccacccaagaagataaactccgcactctcttcacaacgtacgatcgcagcacaaccgatcttcagatgcttgaccgcgtctcagcgggctttgtctctctcccagcgaacacatacgatcttgttctcgttcttacaggcacagatggcacgcggcgttcggaggcgctgcaactgctcaagcgagaggtctatgcggctgttgtcccggccatgaagggcggtgccaagttacagacggaggacaacttcttcggggaagccgaggatcgggaggcggttcttgcggggctcgtgaagaaagagaccggatttgagaagatggatgttggaaacggggctgcggtgccgttgagattgggaaggaagaagaaggctgcgccggctccggccccggttgtacagccgcctccaattatcagctccgatgataacgatctcaatgacgatgagctgatcgatgaggataccctcttgtcggcggacgacctcaagaggccaattgttccacgtaagtttttcttgggtttgcttttttgacctgcatctcgctagaattcacgactgatttcctgcagctccagaatgtcagcccaaggccggaaagcgacgtcgcgcctgcaaggactgcacttgcggtctcgccgcccagattgaagccgaagatagggagcgccgcgaggctgcggacaagagtctcaatgtcatgaagctcgagtcagacgatctgaacgaactagacttcacagtgcaagggaagaccgggtcttgcggtaactgcgccctcggcgacgccttcagatgtgacggatgccccttcattggtcttccagccttcaagccggggcaggaggtccagatcttgaatgacgttgcccagctttaatcagacggggcttggtcaaagttaatggcatacttgttttggtttctggcggggatatgctcggggtttgtggagtttgcttttatgggctttgatttcgatgagcttagacaaaatcatcgttgattgctggttgttggcatttggtctggtttcggtgttttttctcctagataataatataaagttccaagtattaagttgctgcttctttgttcctgttttagggagactgctggaaatatgggcttgaattctacgatcttaaacagtgatatatatgcatgtgacaacctggacaggttcggctccacccaatccctgcagcatatctctcaaccttctacagacattattaggttgctaacaacagttgacgctgggcgaagatagcgacagcagcgagaatcttcggggaataaattcatctttccctaggtatttacctcggttgcccgtgtgtatccgtgcccgggcctacgttaaacaatttccccaaatcttggtcatttaatttcgtccagggacgccacggcgctttcgaagtaacgtcgcttacgatgcggaacctggaagggccattttgcgaaattgggctcctgccgcttcactatccgctattgaggcaatatcggttgcatccttctgccaattcttggccctaccttcctacagttgtgtcgcagcatcaagccatcagagtcgcctgcggtggatccgacaactagtttcgatttatgcctctggccaatgctttggttactctcaaaggtggcaggaagtcggtctgacaatgcaaccatgacctcgggcgccattcagagatgaccgaaagtattctgcaggtattttataagccttcatcgatggtcacttggtcgacgccgagttcaacagaacgggaccaccggatatttcaatgtctcaaaaccccgcgactgtggctggatcatctccaagattcattcagtagtccaagagactaaagcgcatgatttgatcttcctcgaataaaaacgaagcgatttcatctagtttcattgcaccagggtcccacaccgatttctgcatagttcctgggcagataccgacataccaagccttgatgttcgcagtcattgcccaggttagtatagttgcgtccgtttaaggctgatgtctgtgcaacggttctcactgttcacccttcggcttgggctttattattcgctgggatgagattaaaatcctggatcaagttctagccagcactgtgctgtattcagggaccagtagtcgatccgcttgcttgtttagcgttcgcttatctgaaatgagtcgtctggggccccagacgaagcgaggttcgcttgctgtcgttgtccaagtcataggcatgtgctctctctagtcggtttggcatataagggtccctcctcgtgagttctgaaagggttttccttccgagtgtcaccggcaaattcaccctcgtttcttttctttggagcttaagatttagacagtcttccctccactcgttcttcatgggagctttcaagatgaggttcaagccagcctcaatcctagccggcttcctagccctaacaacaacactcgctactcctacaagagtcgcgcgccagccgacactggtccaacgtgattctgcagcaatcgtgagcaaagtagccgaaatcaacactcaggtcctcgctctgggctctgacatcgctgcctacaccggtggtgacacttccgccattgaggaatcgtcgaatcagctcatcgctgtcatcgattcgggcacggaaatcgtcctggccggcgactctttgaccagcattgaagccctggatcttgtcactcccattctggacttgactagcgacgtggatgcaaccattgtgtcgctgattgagaagaaagatatggtggttgcggcgggttcgggaccaa

SEQ ID NO: 1460 - DNA, 3465 bp, Emericella nidulans
atcgatcttttcggccaccatggcgacgcctgtgctcgagaatgtacgacgttgacacggtaaagcgggaaagtttctgaggctctccggggaacgtcggggaactcttcggcaagactcaataaggaacccgcgtcgaacagaggacagtcgagtgtataaagagggacaggaagatttgcaggagaaaaattggcgtgaaggaggctgacgcagagccgacggttgtaaacctaggctgtttgctggagcagcacagcggggtactgttgccaaataggcgggggagtatggcatcaattactcctttcgggttcctcgcgccggataactggaaggcagatagggaaaccagtcgatcaggcggagtcaatttgagatgccaatgagcaaatccagaatggtactgttaagtagaagagaaaagcagaaggaaccacaaacactacaacgttgtcttaatctcaattgaacagcctttccgagtgtatacagacattctcagcagttcaattgcttttcaagcctgcgacctcgggcgatgggcttgacttttattggtacaggtcaaagagagagctcatgtcagcaagccgcggctggcgtgtcgatcacgctagtcctttttagatcctgcccgagggctgctgctgtcacatgattttatattacagtaccgggaaatcttgccctccgatacactcaggagctaagtcggctaaacgcccgccaacggccccagtcgtccgtactgcggacgactgcatccggccgcaccacagggttcgggaatactccggaaacctgtcaggcaatggcagttgtgcattccccatggggagaaagcgttagtcgattcactgctccatacgagggagcgtggtgggctccacttatcgaggtcgagtcaggccaggccgcctcccctgggcgtcctggtttcttggttgagcgagtgtctgctgattatgctgtcatttgagttgaggagggatttctgatactaaactacctaacctacctgattgatgactggtcgtcactttgatcttcaccttttttatgcttttttaaccggaggctagagtttgttcccatgcatgtatataaacgcgagtcctccgcgcgtgccataccatattgccccgactaccggcgctttttatctcgctacagaagccttaaacagcagtcttgattctggtcctgttattcggcatgaaagaccaagatattgtcggcaaggcgcttgcctccgtcctgcctcagcatgatagaacctggctgcgaatcccccatctgctgaaactgaatctcatccttctgatcccgctgctctcgtctgcagtagcaggttatgatggtagcctaccttatctacctctataccgccatcaatattaaatagctaatactgagactaggctccctgatgaacggtcttcaatccatttcttcatggaaaacctatttcgataaccccacgggctcgatcctcggcgttgtcaacgcagcccagtcgattgggagcgtgatttcactccccgtggtcggaatactctctgacagaatcggccgccggtggacactcctatccggggcaatcgtcatcatcatagcgtccattatccaggcggcaagtgtccagtacggcatgttcgtcttcagccgtgttctcgtcgggatagggagtatgctcgtcgtgcaaccgagcccgatgctgatcacagaattggcgtacccgacacaccgtggcaagtatacctgtgctttctggacgatgtactatctgggggcgatcttggcaagttggacctgctacggaacacagaaacatctctcaaatgactggacgtggcgcgtgcccagcatcatacaggccgggtttcccctcgtgcaggttgggttgtggtgggttgtgcctgagtcaccgaggtaaaccactgagcaattttccctcttttcttttattttgtcctgatctgtttctaatcttttattccttactgttttcttttcccttaccttttttcgtttttatttgtggaggaaaaatagcagaaattctaacgtttctagatggcttgttgccaaaggccgtactgaagaagcaaaaggattgctcgccaaataccacacagctggagacgctttccacccgctaattgagttcgaaatggctgagatcgtgcgcactatagagctggataatcaagctgctgagatgggctggtctgcacttgtgcagacgccgggaaaccggaaacggacctttattgcagtatgcattggtgcctttgcgcagtggaatgtacgttttgccgtcgagtacacccgagacttcctactactctttactgtgtttattgaccagtgcagggagtggccgtggtctcatactatctgaccctcgtcctcgacaccgtcggcgtcaccgacacagacacgcagacgctcatcaatggcctgctgcaaatcttcaattttatcgcggccctgagcgcggccttattcgtcgatcgactcggtcgacgaaccctcttcctctggtcggcagtgggcatgctcgtctccttcataatctggactgcatgctccgccgtctttgacagcagccaggcctctgccctcggccggactgtcatcgcattcgtcttcatcttctacttccactacgacatcgcctatacccccttgctactcgggtatccgaccgagatattcacatactcgacaaggtccaagggactcacggcggagctgttgtctgtctacgggagtctgatcatcctagcctttgtgaatccggtagcactggacaatatcggctggcggtattacatcttcttctgctgcttcgatgtcctcgttcttgcggtaacatattttgtctttcccgaaaccaaggggtattccctcgaagagatcgcaaaggtctttgacgggccggctgctgtatcgtcgagcgaggtgcttgagggtaagaagggcgcggaggaaagttcagagcacccgaagaatgtctagccctggctcgtgcttcttatagtgccctgcccagaaacaaccggctgtttcccaggtttgctagaaccttctgtaggtatagcgtatagttccgtcttctcctttaggaacaacgatctccatctccatctctgtaaaatagaagatctctctcaatatcacagtgcttatattcctgacagaaaggacaagaaccaaagtacggtaggaagtatccaagaccaagctcgtcaaacctttatatcaaacccatatcgggagtatcatgctgcatatcatagcttatataagtatgctttgtaagcagtacatcggacactgtccgagcccaacaagactcctcgcgtggggagttggagatactgatcccataatcagacaacttcgtttccgactcttccctgatagtatgcaagtaggtgcagaaaacagattata

SEQ ID NO: 1461 - DNA, 3291 bp, Emericella nidulans
tgaaggcttatccggtgattctgaacggggggcctctgccgggtaacgagaaggccggttatgatgaagccaagattaagatgcacattaagacagtgtcatcagcagcgaatgtcattgtggaggcggagaagcttgacaagtccgcgcaagggaccttccctgaacgcttctacaccgatgcgcaagaccttttgcttccatacctagatgctctcgaggggtccttgatcgacacggacgaccattcaattttcacgaagcttacgcgaaagtatgaggagcggttcatgaaggacatggatgacttgaacgtgcttcgaccggacgagttaactagggtgactgagtacgggcaggagattgccgacttcgtcgagaagatcgttgaaaacaagtttggatacgtctcagccgacggctcagtatactttgatattaatgcatgtgaggccgccgggttcccttacgcgcgacttgagccctggagccgctcggacaataagctactcgctgagggagagggatcattggcaaataaaaccactgaaaagcgttccaagtccgactttgccctatggaagtcctcgaagcctggtgagccgagctggtcgagttcctgggggcgaggccgaccgggatggcatatcgaatgctcggcgatggcgtctgcccgcctgggcaagcatatggatatccactccggaggtatcgaccttgcgttccctcaccacgataacgaattggcgcagagcgaggcgtactggcactctcatggtgaccagtgggtcaactacttcctgcacatgggtcacttgtcaatccaagggtctaaaatgtccaagtccctgaagaattttacaactatccgtgaggcacttgagaggaaggagtggactccgcgcagtctgagaatcgtatttcttcttggtggatggaaagatggtattgagattaccgacgagcttgtcagcgccggtaactcgtgggaagataagttgaacaacttcttcattagggtgaaagatcctgcagcccgtcaggggcccgcttcgagtacagacaccacccttgccgaagccttagaggcagccaagtcagccgtgcacgagcaactctgcgattcattcaacactcctggcatgatgaactcgatctctgagcttatcaccaaatacaacatcgctgataaatcgacgctgaacccgaaggacgtcgaggcagttgctcgctgggtaacttacatggtcaacgtgcttggtctcaacggccagacgcctgccgactcgcgtgagatcggatggagcggcattgacgttcctgaagaagccaagccgttcctgtatccgctttcggccatgcgtgatgctttgcgacagtctgcgcgacgcaaaacgcttaacgcgggtgagatctcgaagattgtcgaacaggaagccatcccagaggcaacaacagaaaagaccaagccctacgccaccgtagtgtctaatttccgcaccaaggtatcgtcactacaagactccggagacctcggaaaggaggttcttgcgctctgcgaccgcctccgagatgttgatctgttcgatcttggtgtctacctcgaggacacgagagaaccttccagccatcgtccgccccgtaagccgcgatcttatccaagcgcgtgaggagaaggctgctcaggcactgcagaaacagcgtgagcgagaggcaaaagagaaggaggcactaaagaagctggagaaggggaagctgagccatctggaaatgttccggacgaacgagtatagcgcgtgggacgaggaaggtatcccgactcgcgatgcggcgggcgaggagattgctaagagtcgctcgaagaagctgcgcaaggactgggaacgacagaagaagctacatgaggcgtggctcgcgagccagcagggcagtaaatgatggatgatgggctatgatggactagatagaaaagttcggttatcacgtacaagcatagacggcgttataatatccaggcagcattggtttatgttatggctacatagcttaccctcttactgccatacctataacattcctgttctagatgacgatgttgtctctacccatgacatcctagtggagtcaggcgcatcttcggctacaatcacatgcaagctaatatactaccccgacaaagccagtttcaacatgccatcaggaccatctgacctctcagtggctccagaattcgtctagatggactggcactattgctctgcctatttttaccgcgtaccgaccgctcaagacaaatcatactggtcgggccgacctccacagccagacctcggcaactcctcgtcccctcggtcgcagcagcagaggtccgcggcagtctcccttagaaccgcacgtttcgtcttattacacttgtctgtcttatagcggcggttccaactcatttcgcgagcgtctactttatagactttgtctttctaagcatcatcaacctctcgcttttcgcgacactagcacaatgggtttcaacactgcattaaccagagcgctggggatcaagagtaaagccaccctttcatcataccagcaaatactgaccagcctagttcctgtcgttcagggtggcatgcaatgggtgggatacgctgagctcgcagcagccgtcagcaatgccggtggtcttggaattgtacgttgtgcagccttcatgaacacatggcaatctccagcgagcaaagactgacttaccccagctcactgccctcacccaaccaactcccgaagacttgcgcaaggaaattcgcaaatgtcgctccatgacgaagaacccctttggcgttaacctgaccctcctacccgccctagtgccccccgactacggtgcctacgcacaagtgataatcgacgaggggatcaagatcgttgaaacagcaggcaacaaccctggtcctgtcatccggcaactcaaggccgcaaacatcacaatcctgcacaaatgcacgacaatccgacacgccaagtcggctgttaagctgggtgttgatttcctatcaatcgatggttttgaatgtgcagggcacgtgggcgagcacgatatcacgaacttcatccttcttaaccgtgcgagacaggatctcggcgtgccgttcatcgcctctggcgggttcgcagacgggtatgggctggccgcggcgctggccgtcggtgcagagggaatcaacatggggacgcggttcatgtgtacagtcgaggcgccgattcatcaaaaggtgaagcaggcgatcgtagatg

SEQ ID NO: 1462 - DNA, 2312 bp, Emericella nidulans
gggagccgatccaactggacttggaagccgatgcgggaatggagcccctattttttttaagtccccatataacaggcggacatcgtgacagctgaatcaaacattcaattccaggtccgggtgtcacgaatcaaggaatggcgaatgcaatggtgcctcttgagcaggcgttaagcgatgtattcgttgcgcggtaagcatctaatgcccattgtccctgcttctgcaaacacaagcataagactcttttctccagcgtttgttcagtcgaagctgtagccaagattagacaagtaatgctgacaccgaattccacagcgtccgcatcactaccaacccggccacgtctacgattgagggtatcgttttcaccgccgacccaatcacgaacctcgtcgccgtaaacactgccgacggtaaacaaactggagccgggaactaccacgtcattccaatttcacggatacaaagctttgagctcctctctcttccgccgtctgcccagagcggcggagcgacgttcgttctctgacgcccaaccatcgttgcacgctctggatatccgtgctttgaagaagcgggaggccgacgcttgttgtggaaatgcaaatctctgaggcacgccgaggcaagggagtcacacgggaagcgcaggacctgtttaatgcttttattcgcacgatgcctacgacaaggtgggagggagcgaacatcatcgtggcagatgcggtttcgattgcgccgccgtaccgagtggatgattgccggccgctggtggcaggtgacacagctgctcttgcccggatacgcaaggtggtacgtaatatcctttattttatatactctacagatagtaggatgtcactaacatggcgaagcttgaaatggagcgccagaagatcgagttccgaaacgccagcgccgctataggctcggcaaacaccttctcccgttcggcggcttctgggcctggagctgccggacccaggaaaggaggctgaattgatattctagctctccctaccatctcgttgcgatcgagactccgcgactcagcacgactaaggacgaccgcaatgccataaacaatctcacatgttcatgccataaccacgatgaacatattcttgcaagacacagaagtcactgcgtgacatgataggaagggacggagcgggaaagatttgaggggcagtctaggatctcgcctagatagggcttcagcagaccgagacatgggaccaaacgtcccggggcaatacggtctatgtatttgatgacgatgatgatgatgacgttcaggttctgttagccttaggattgggtcaagtttacggttctcagcctgcctctgtcagtattgtatcggatatcacttcttaacagcatagccatgaatatcacaccatctaagagcaacctgtctccgggaccggacagtcatactaacctcgtagtcctaacattaaccagcactttgccaagagatctctcaatgtcggcagatcagatccgccgtcttatctgtcctcattatgtacatgaatcccattctcccgttccttcaaacagcattcgtaggtacacgcatacggcacttacaacgcatccaagatattttcaaagagcacatgcaagctggagatataagaaccgagcttggtgaaaccagatcatggctggaactactttatggagcactctatcgctccctgagatgtcgactttctggcctgatacctggctcgtaacgatttagaaagagtgatgtgcgtcatactgcgaaggtgactgatgcaagactttaatgttggggaatttgttatataagtagaaaatgccaagataattataatgagctagtagaatagtggcagttagtatgtacaacgaaacggatacagtgacagtcctgatgcggtataaagctacaatatatagcaaggcttatgttgtttgaattgtggcaggcagcagcttcgcaagtcaagtcacccagttgaaggagacggtggtgacggttgttgcccgtgaccatggccgtggctgggtccctggacgtgagcctgggcctgttgattttgaactgaatgccaaggacctgaagaaaccggcgctccttgcgttgcgcccgccgccgactgctcggtcggggcattcgggtgaggacggccgttcatcaaacgctggcgtttagcctgcggcgccgcatttgggctttcgtgagacatatatggcgaggagggattcgggttcgcgttcggattctgtactggtgaaggaccagcactgggacttgcggtcgacggtgg

SEQ ID NO: 1463 - DNA, 1437 bp, Emericella nidulans
aattgaggaaaaacgccatgagtgtaaggaaaagaatcagtggaaaggaaggatagcataaaggagtcaccgaggcgggggaccaaaaaagaacgttccgcgaattaaagacggatgtccgagccctcccaagggggagtgacccaaaggaccaaaaccagcttcctatcctttggaaaagatagcgggtagaaggtcttcaaaggtcccttggaaattcattgctcaaatcgaggccccaagtaaatccttgcagccaaattgcgggaactgtttgatccctcaaaaaataagaaggggcaggtcaatcctaagcaaggcagattcgaaattccggttccttttggcaatgccaggattgcaacccggcttttagctcacaaagaagaagcagttgacgacgaagcagactcagttcggaagcaagccaattctggacgagtctttccttaaaaaagtggccaactccggtgttctggattccctcaagaggtttgctgatcacaaggccgacttgatgcttaagaagtctgacggcggtcgacgaagtcgcatgaataacccaaaattgaccgacgcaaaccgggcaggtaccaaggatggctacaaatgtaccctcattttgacggaaggggagtctgcaaagggtctggctatggcaggccgtgctgtggtcggtgcagatctttttggtgtctatccgctccgtggaaagatgcttaatgtgcgagatgcctccttcgatcaaatctccaagaacgaagaaattcaaagcattaagaacttcatgggtttacagcacaagaaagaatacacagatactaaagggcttcgctacggtcatttgatgatcatgactgatcaggatcatgatggtagccacatcaagggcttgctcatcaactttcttgaagctcaatttccgagtttgctgaagattcctgagtttttgatcgagttcattacgcccatcgtcaaagtctggaaaggcgacatcaaagacccgacgaagcaacactcattcttcactatccaggagtacaatgcttggaaggaaaagcatggtcacgagcgcggatgggagcacaagtactacaagggtctgggtaccagcagtaccgaggaggcccaagagtacttacgtgatctcgaccgacacctgaaggagttccatgtcatgcaagacaaatagcatgaactgattgagcttgccttttctaagaagaaagtcgaggaacgcaaagaatggctccgccaatacaatcccgacacgttcatggaccactccgtggccaaaatcagttacactgattttatcaataatgagctgatccagttcagtatggctgataacttgcgatcgattccatcgatggttgatggcatgaaatctggttaactaaaagttatgtacactttctatttagctttacttca

SEQ ID NO: 1464 - DNA, 1270 bp, Emericella nidulans
atccaaaaaatgaaagagctgctaaagaaaagggacctttaagggacttccaaatgagttttgccaatacacggcccttaaccgatttgtcattcagacctcgcaagctgttgacctgatcggaggcggcgtgaaaatcaacgctatgcccgaagtcgtcacactctccgtaaactaccgcgttgcgcatcaccaaagacccgtcgatgtccagcacagggccgtacaaataattgccgacgttgtcgacaagtacggcctgcgggtcgatgctttcaatggggacaaggaataccatgactatgtcgccgggctctatcgcagcgactcgctctatcgtaacgacctcaagcgtcgtgataaggtcgactataacggaaccctcgtggtcagcgcctttggcaaaggcgaagccgctcccatctctcccactagtggtgctgtatgggagactttttccggaacgattcgacatgcttttgcgtcaggtactaaaaccgttgttcctgttggagacataatgaccggtaacacagacactacgcattatctgagtaagttttgctagggctagttgacaggaaacatagacactgacaataaatcgggcaggcctttcccgtgatgtttacaggtggacgccggctattgctagggcagaggataacatccacactgttgatgagcgtgtgagtatccatgatcatctaaacgcggtaaggttctactatgactttattcgcaattttgatgctgcggatatatagaacttggatgttctaagcaaatttgtgaccgtaaaaaaaaaaaaaagacaaaaaaatatctatctatctatatatatatatagaccatgctgttattggatatcttgatacccaggagcaaagacatgcttgctcaagggtgagaagagagctgggattttatggtcggatttgaatactataccttttatctatatatggtaaagcggcaacgtttgtacgacgtaggaggggagctataagctgccgtccctctcccaagcattttatttttataccgctaagcttgaacctcaaacctcttgtccaacaaactagctcagtcaacttctttttttttaaagcctattcatccgcgtcaagaatattacattgcatgcttcgtcccgtcctatccctcttcacccgcggtttccctccatccccgcaccgttgcgatcataccacagatccgcgaagatggcacttaaggtaagccgacaccagccaaaactacacaaaaa

SEQ ID NO: 1465 - DNA, 1824 bp, Emericella nidulans
taacgtaacggacgtcgagctctaaagtaaggtgattggcgaaacgattccacgaaaatcctttttcctcagtcgcgccaggcgattgcctcgagaagcgaaatgattgcctgccaggggtctgccacttaagagtcacactagacctggaatggcctgatgcagcatgcttgatctaactcagagaggcggcgctaaaaagcagatcaagatatcttctacgaatcaccgccctgtatggcagtatcacacctcctgatacatttcgcatggatgtttggtgctaactcattgggcctgacggcggaatctccaagatggtaaacctcttcgtttacgaacaaggggcacacgctatttctgagcgactaacctcaatatccaagactccagcctgccactaaagacttgtaggcatttcaaactctcattgcacgttccttcagcgccagtacttagtccgagaccggcttggcggcttctggcttgagcttccagtcaaatgcagtcaagactcatcacccagatgtcagacgtcgtactgggcccggctgatgctaaatgtcaacatggtctgtacctctgaatcgaccctccgcaatttacaagtccattctaaaacatgtccatacacaagtcatcctacattccctacactatagaagacgcaaagcaacaattgcttgatcatgagaaaggatcctggctagacagttactggattggaaattgtgagggcgagcgcctgacaagaatgataagtcggatctcgtcaattcaacctttccttccccacccaattgatctgccggaaacacttccgcgacatggtcaatcatgtttctgactggttcaactcacaattggccctggcaccactgtgtagcgattcgagactcgaggaattccgctgagccttccaatgaggcggaagtttcgagccgtgcttcgggttcaaggttcgatggtttcataccatgcctttccgatctaaagtacttttgcccttttgacaggtcttttgatctctcaccaattccgcaaatatcgagcctcggccagcgaatggtaacgaactaaggattatattctccacaagctttttattttccgaaaatccatattgccgggtgagagtcggtgcaacgcatggcgcttcgtcaattagtcgcgttgttgacttgtcgagtccatttttgtcagggccgagctgtctctcacaacgcctcgtgtcgctgccaaaagtcctgcctgggcggaattatgcagtgtcctccaaaagaaagtacaacagtagccgtatagactttacgccgatagggccatacgtggaccttgtacatccctcctgagctctcttcctgatgtcatactgatcaactctgtaccacaaacccggtgcaagttcgccgcagaccaggcgatttaaaggatccgtcagattatttcataccgcatcctctctgtcgggtccgcgcacaccgctacaaaattcttgccattgaaatctaattccccaggcgcattgcctttcacgaacctggttaatcgataattgtgtcacagatctgctggacttcgttcatatgtggctggcagcatggcattggcagcatgaccccggctgcatgctgccggctcagtcgagtccgcgacaaccaacgcaatttgaacatcatctgcatgcagactccgagaccatcaatagacaacgggtacgggtaacggtcagctcacgcgacctccgatgaggtttttgcccaattcgggctgtcccagttgcaggcgtacaccgatacttcagatttcaccgtcccgagtact

SEQ ID NO: 1466 - DNA, 4683 bp, Emericella nidulans
cgtggaacggcgtggttctcgcgcggcagactgataaggtgggaaaggaatcggggactcgaccacggtccatgatgcattgagggcccgttaggatattttaaagctgccaacggtgtctcccgcacggcgcaccgccgatggcggaaagcacatcatcatagatgcaattcacgcgatgatggtgatggcagctgcgaatcgcaagggggcccatgtcgtgggggtctggattacaacagttcctagaaatgacgatcccacatggaaacacgacccggtctatcttcaggaagatacaaccaatgaatagagcgctgtgatctgaaaagaccctcaccgtgtgggtgttgttgatgagcaatatggtatccgcgatggcgcgattaggtaggaccccaggattacatggatggtggaattgccggccgagagacaaattgggtatagcgtgctttctactgggtatacaacctcgggccttggaccttttggccctgaatttccttattattcgctgctgcgactactacggggtactaacttttatactgccaagtcaattgcgtgagaaatgcgagtcttatgccagccgccatattcttagccataagttattcttagcctctttactcagcaagggctcaggattgacattttgatatggcgtcaaacacgactaacaaacacaattaatacatcatagatatctatcaagcactgaacttgtctttgttccgctccacccattcagaaaagcgcatcgctggacgacccagatatctctcgatatttcctctgatctctggagtctctgcacgcaacattccttggtgttggttctcaagcgcgaaaccatctgtcaagagtctggccaatggttcaggggttccagacttctcaaccatcactttgatgttttcatccgtgctgacctttgtgactttcactggtttattgatcgcccgtccgatagtctcaatagcatcggcaacagataggtctgtttctggcccacacagaaaaaccgaagtttcatgttcgcccttgaaagcaccagcgaggattgtcccacataccgcaccgatatcatccggagaaatatagtcgaccttcaggtctgggaacgcccacttcacttctccgtcctcgacaatctgtttctgccaccaacgcgagttacttgcgaaaaaagcaggtcggactgcaacgtatccctgaggcccaaacacggtttccagtgacaactcgacctacgcgtgcgcgtatccaataaagtcactttgcgggatccacgaatatcgccttgcacagtgaagctgctcaatagaaccacaagttcaattcctccagctttgagcgcctctgcagtggagagccagtggtcagatgaggatccaagtgccgcgtagatgaatgcatgggtggcaccggtcttagaaactgcagtgcggacggtatcaggttgcgtgaggtcggcctgcactctttcatatccagcactttgttcttccgtagcagtcagaccggggactggtttcgtgatgtcgcgcacgcgagaaagactttagcgccatgggagtgagcggttcgcgcagcagcagagcctacatctcctgttgccccaaaaacgatgaccttccttggacccatggtgagatttaatgatggtttcaattgaatgctttgagagtaaaacgtgccgtggaaggcaagtacagcatccgctcattcttgcttttctttatatttttgatgtgatcggcccaatgctggtcggtgttgccatcttccggccgccgagcactaagccatgcttactgccgtttttaaatgtcttaatctaggaatacgagacacatttgtcagcattctcataaaactcattatcaatcatcggtagtcggggctattgacagtgcgagattggcgcgacatatcacaggcgccttgatagtaatgctcttataccggaaatcggggccgtctgtcggtcttggtttctgcgtttgtccgatcctggcggagcataccccaaacttctataaagagtaaaagaataagagcacagacaatagatctcagcctgacaaggctctgcataatttgatcgatctcaaatcacgaaggcgattctgcaaggagacactgctcaacgtatgacatgcagatttcgcttattcgatggccatggacgtgattatgctgatgggtagtccacgtcctggaacccttgtgtcgtttattctgttgcatttgccgttggcagctcatctcagaaatcacgattgatgatccgtcgcctggtacattacagcggtcaccttggcctgctgcctgctttgtgagtcgtgtttcataccgagagttctgacgtacgagagtggggtaaccttatcggcccgagcttgcggcggggtcagccaaccagagtctcgggttctgtggccagtcccgagccccgatatggggtagtatttggttgcccaggctattaagggacagcttctccaactgccaacgtagcaagatctaagcgttctgaatggaattcactcgtaatcaaactatagccacttctcgaattcttctagcttgaatccagcaataaaagtcaatatgggtaagaacaaacaagccacccatactgcaagcaatgcataataactctaccgtcaaatagtgcctcctatgacaagtgccgtccttcatcgagatacccgctttgttcccaagaaggctgttggcggaaagggcagctaccttcggcttgaagatggcaccaagttcctcgactcgacgggcggcgcagccgtttcatgtttgggccatggccacgagaaaattatccaagcgatcaccgagcagttcacaaaggtcgagtattgccatactgctttttttggaacagaggcttctgaaaatctggccagtttacttgttgactcgactggtggaaaactgtccaagttgttcgttgtgagctccggtatgccctccagccctgtttcctttctttctacctactgggatactgacactgctattaaggctcagaagctgtcgaagcagcactcaagctcgctcgtcaatacttcctcgaactgccaacaccccaacctcaacgaacacgattcatcgcccgcaagccttcctaccacggcaccactttaggagccctaggagtcggcggccatgccctccgccgccaacccttcgagccaatcctatcccaaaacgtctcgcatgtttcaccatgttatgcgtacagagggaagaacgatggcgagtcagacgcggactacgtcgcccgactcgcaggcgagcttgacgcagagttccgacgagtcggtccagatactgtctgcgcattcatcgcggagccaattgttggcgcggtacgtgcagttccctttgcatccacaaacaccccaagatttgttgcgtacggtcgatactgacgcaaatttaggccctaggctgcgtccccgccgtaccaggctacttcgccgccatgaagaccatctgcgagaaacacggcgcccttttcatactcgatgaaatcatgtgcggtatgggtcgctgcggcactctgcatgcctgggaacaagaagacgtcaccccagatctccagacaatcggtaaagcgctgggaggaggatacgcacctgtctcgggactcctaatctcggataaggtcgtgcagactgttgacaaaggcactggggcgtttcgccatggccagacgtaccagggacatccgatatcttgtgcggctgcgttggcagtgcagacggttattgtggaagaacagttgctcgacaatgtaaagtctatgggtgagtatctggaaaagaggctgagaggtactttagaagggatgcagtatgttggggatattaggggaaagggattgttttggggggtgagtcccacacatataccctgcaatttttcacctaaatcatacggtgtggatactaaccgggccgtgctggcaggtcgagtttgtcaagaacaaagctacgaaggagccctttagctcagagactgcactagccttcaagatccaggagacaggtatgaaacctgaattcgggatctcgttgtatgctggcacaggcactgtaaatgggacgcgcggcgaccacattatcctggcgcccgcttataatgttaccaaggaggagatagatattatcgttgacacaactgcgaaagtccttgctgacgtttttgcgcagctttaggctttgtgatctgcgctggatggattctaatagtaatatgatctggatgggaagtatcagataaagcctgacacctaagatttcatttcccaggtcctagggaatttgagaggaataaccttcaccgtaggttcaataagatacgtatattacaaggcacatagcaaaggcaataaaactaagcccttgccgcaacttccaatccaggtttcgaagccacatcatccgcaccagtaccagcaatttccttcccaccaccattcgtaatggtcttcgaagaccggccgacagaccacatacttgcaaccgtctcaacagcccgctcaatcacaacccggacgcggtccctcagcactcattcgcacactcgacctccagatcctccaaccagacccgagcaacatgcttgtcaactttgatttcgatacccggc

SEQ ID NO: 1467 - DNA, 5036 bp, Emericella nidulans
aaaaagggaacaatattaaaaacatagaggaaatatagagggtaaagggtaacggagctatccgttgagaattccgaagaaacatttttaacggatttgtgagacattggccattggcctacagaaaatgatgaaacattaaatgagggtgtatacatgtatgccagccaagggcctctcttttgggagtatgggaaattttaagttctacccattacaatcatggggattccagcccttttctgttcttttggcttatttcgcccttgcgcggcctaaggggctcatgagctcactctctcttcctcctataaattcggcttggtggtcggcgagcatatcttaaagtacgcaagatcatggtttccgcggcgacattgtaagcagccacaagcgccctgggatttacccttctatgatatgtctttgcaagcagcagggtcgagggaagaaaggtcagtgttgggtatccaagcgctattgagacgttagcatcggaaatatcagaaatgaaatgtcctagagagaagctccacgtacaactcatttgtctggaggaacatgacagggaatgttctctcggcgacacgcttaccaccatcggcgtagtcttctctataggttccatcgggtcgccgagcggtgacgggacgcgagcttagaagactctgcggaagaatttcctcgtcgcagatgacggcgggccagggggggaagctgcgaagacgcgcgaggtagtattcgccagccttggcatccaaatgtgtgatgcggctcatcgacttcttgcggttgagcttcgatttggtatctccgcccgtagacttgcgcttagaggacgcctttttggtcgatgacggtgctccgttggcttccggtgcggcagcgggctcagcatctgctgaagcagcagcaccctcgtcggacttcttcgcctcggcaggctctgcgggcgcctcagttttgtcagcggtgtcatcggaagattcttttttatcatcttgagcgggcgcgctttctgtatgacgcataacaagttagccaagccacccgacacagggtacagcataggtacacgcgatcgccatctgacatcggcagaaagtaggccctgaacaagcgtaaactgcactcaccagcgggctttccatccgcgccattggcgtccttctttgtgttctccttggtgggctctgacgccgactcctgtgggctagctttgagctccgcagaagcgcgctcaacaggcgcctcaccagaatccggggcaggcgccggggagttggtattggcttcagccatcttgcgcaaccgaattcaatattatattaaagaagcaggtagggtcttggttgatgggaacgaagccaaggccttcctgcaggagatggtggaagggtcgaggtggttttcggtgggagagaaagtggtggagaaggtcgcgacgccgggaggcgggaagtcgacaacgcgttgcactggaaaagggacgctcgcagcccgtaaaatgacgcaacgatcaaggagagcaacagaacaatttcatccacgcacgagcttcactttcttgtctctcagagccaagcacttaattttccgatatttcagaaaattctctctgctgaaaagttagcgtggctccgcgaactgggatacgaacacttgccggctgtagcagcagaaagtagccacaaagtgtccttttcccaagccggtgaacacttatataaagtagagacgctgaacgtagtgagtacggctggggtgtattgcagcggtaaagtcctgtcgctggaaaattgacacaaattccgagtggtgcagtaggagcttcagccagcttccttagaatcgcggagagccgcaaaatgacgccagataatcggcccaagtgaatgatagaataaagaagcacgtaacttctttcaggtttctagctggtatcagttggataatctggttgtccagaaggtcaagccgttctcaagccggaaccgacgcgtatccttgcacacgcgctgagtgttggaagagtgatgagcgtcgcgacaaaacagttcgtctaactgggtagatatctgtcaaggacagttagagactttttccaaagccaggactcgcaagggaggtgaactgcaaacctatctctactgtatgtattcggtgacaagaagcgaatgtcagagcttgtaccggcggcagagagattgttaaaactccctggctcctaatataacgatgctaaaaccgcgggcggaagggtaatagatgggccttgtgggaggcgccttgaatcgtgaacccgactcagttcaacattgaggggaaagatgacggaagtggtttcccttcaaatactaatgatgcgagagacacgcaaaatgtaagcgtcttcaagctcacaaacatagtcattttgatccaactgtctcggtccaaaacggcttgttcttttagggctcctgctagcttcagaatattctgatattttatttgttggatagatgttctcctcgcatactaagaagcacagtacttcaacgcaaacaagccgaccctccttaaatcgaatgagcttatcaggcacagcctacttcacaataggcttgcacttgttctcttcaaggacaatggtgcagcaagtacttaaccgatagatccgaatgacgttcagagatgtttaaacagaacagaacagaaccgaccgagcaatcatatcatcatccctttgtctcattatattagatcctccgataggatgcctaattatacaatacccctcgtaaggatagggcaaaagagagaccctaaggatatttgttaggtgaagaagattcacccaaggtgaaaacatgacagtcatgacaagagaggggtatcatcgaaaattacagcacatattaaacgtgcctggccttcctcttctatgtttcaggcagtctcagcctctatttcatcagtccattcttcgagatccaatggtcctgccatttctgctggctcaggcttgtgtatccggactagccaaaggaagtagtcttccacaggaagcaggttcagcagaacgctgttgaacttccagccgagcgtacatactatcgcaccagcgaccgcatcgagtatgaagtgattcgcagtagcgacaatggcggcgagaatcatgaacgggtatgcaaagccaaggaatagacagaccaggcgttgacgggacggaatctgggcaccaaatgggccgattcgaactcgagtcgagacgcgatgatgagcaggcagcgggattgtcatgatggtgagtccaatcatgagggaatacccaaaatgcagagagggcatagcagctgacgaagagtcttagtaattgactggatgcaaaaaaagggtcaactcaccatattgattgcagaacctgttctcagtccacacgctgcccgcgccttcggctccatgcacggtatccacaaagccaaagctgcgtgccagctttccctcgggcccttgcactttctcatcgcttagcaggcgaggcggcatacagggccatagagtgaatacaacaaatgcgaggagattgcaaacagctaatgttcgtcggcgggcttgatagagaagcggcccagcaggtgagccacttgccgtccctcggggcttgccagactggggctcatcggaatggtttctcgtgattgtatagtaatatagccaaactaagaatgcgattgttccagggatatggataaacgaatagatccaattggtccatttcatgagcaacgggtgccggaggaagaactgctggatcggaacctcccagaacaacccgagggcctgttcgatttcgataagcttaagcgcatgttttctcgctacatcgaccgtgccttcttgtaaggttacggccgtgaatgctcttcctaattggtatgtctaccggccgagttagccttgttctcgtcaagttctcgtcaagacctcgtcaatcaaagaggaattgtaataaccatacccagtacaccaacgcccagtaccaacattcggccaggaaaggcaacttgcgtagcagccgactgagaagacggtcttggaaaacaacagtattcggagaggtaacttcggtggtccataagagtatcccgattcttcgcttacgccatgactcatgcccgcagtgagagctggctggagataaaggtcggtctttcaagaggccatccttggacgtgggcgaacaaaggcccgattcgatcgaatccggtgaaacaccacggtaacgatcaacagatttgcggcgagcacgacgtgagggaggaaacgagccagcggtacggttgatccaagtgccgccgaaaagcaagacgatgaccaccagaggttccaaaatagctccggcgcccatggtgtgctgtgtttctggcagcagccttggaaaagagggtggagaatgtcggccttaatgataaggggaaagcagaagacagccgcagggatggggatcacggtcgcaggaccaagtcggcatcaccttttggacaaacgaagggcccggcttgaccggtgaggggagaaacgagctgatgcctgatggcggccagagcgcagagctgactgataatgattacggagtcacggacagctgctgcttccctctttctccctacgtggacacgcgactattaatatttgtactactgcactcagggtcccggctgaaaagaacagaccggccgcggatgcttccatgtcacaaagcgtgcaggtggggtcagccagtgagcgagtgcatgggtgcgtgtgggagacgggataaacaaggcatcgttgcctacagagctgcaaaaacacaaggaccggatgaaccggagtctgggataagaagctgccattcggcgattgcctgcttccgagatacggtggagatcgacagccttatgaccctgtaaggttaccagggttgcaacctgcaagtgggaaatgtacccttccaagcttcccatgtctcagtcagctgtctacagctgtctacagtctgcagctagctt

SEQ ID NO: 1468 - DNA, 817 bp, Emericella nidulans
atcaagaccgtcggatggcatgtcgacctcgacaatagacccattgatgatgcgcgccgtacccaggtcagtgttgattgtgttatcacccttggttccccaggtgacatcgtgggtgttgcagaacgcataacactgcagtgtgcaaatatagctgggcagcaaggcgaaatactgcgcagacgacgtgaacatatgccaagggtccagatacatgaacgaagtgaaaaagtacagcccgaccgtggaaagtagggaaaccacgatgttcacgaaaagcgtatcgctcatagttatgggaacatcgtggccagtcttagccataagctccaacacgatcagatatagtgtgcagaatgcggtatacgccatgactatactgtagacaatcatgcttgaaaggtatagcttcttcgctctatagaccggttagtacgcctcttatctggagtaaaagagtcttacccttgcggtcgattgcccatagagaagatgaattgaagacacataacaagaacacaagcatatctcaaaacgataaatatgtatttgcccatgttgtggccaaatgggtcaatcttctcatcggtaagagaacccgcaatgaagaagaaagctaggtaaaagtttgcctatcgttggtagccatgagttctgatattttagaagtagggaactcaccagaccaaaatatgtaaagataagctgcagcagttggtaaacagactcgatctgaaaaaagatcttttcgtgcgagcgaatgatcggtttttcacagctgctttaccttgacaatagaataaaccacttgcaaaaa

SEQ ID NO: 1469 - DNA, 1110 bp, Emericella nidulans
cagcgatgtcttataaaagatactcccatgtaaaatgataacgagtctcttccattaatgccaatagcttttgtgtttagcatgttagttgctagagaagtaaggaccaccacagacatggaaacggtgctttgcacggctgtagccgagcacagctatgcatgggtttgacagggacagtaaatgtaaaaataatgaactatgtgttaaatcaagcctgagtctgcctctagaatttaaaataggtcgttgacttgaagtagagagcctcggcgcttaccgtataccggcatacagctatttttagcccaacagatcgaacaatgaaacaagatcatgaaacacatcgatccccatcctttcccacgcgactagtctgctaggttctaagttgatccggcttcacaaggctgaactgaggctttaaattccggcggttgctcaaacatgctgcgggatttgtccatggttaagaatagtgtagaaggcggctatcggttcgcgcctatggagttctatgtttctaatcatagcacacctgcagtgcaggaaatatgccgaggagcagcaaaagcattgttgggtttgatcaagctcttattggacaatacactatggtgtttgtgagttgtagaattcattttataattggcgattgaagtaatcgaagggagagtactgtgatgggcattgatgggcatatcgaatgccgttatttcgtaaaagaatacgaagggagtgcgggcttccgcgaacaaggagcgtcgagaatcctcaagaaagcacccgaacgccgagattgacagagataataacaacgagattattgtttgattaattgcagtagatcaatcaggcgtggtggcggacaccgggtgattagtgcctgagtcctccagaatcgccgcttggctctccttttgccccctcatactgacaagaacatctgcaatcagattctgtcagcgtgactgagcgaatttgccaatcttagtttttctcgctgtagactttcttcatgctgaacagcagatactgtacttatgatgactgtctatcaggatctctattagtgcatatgcttcggaaacgagcacgcttagaggccta

SEQ ID NO: 1470 - DNA, 2718 bp, Emericella nidulans
ggaatcacgtatttggcaatccgcaatcgagctgacattgcgcaacatcctgtagaatttggacttgtagatctctgacatgaccagccgctcaggatcagagcctgctttcttagcaataaactccttgagtgccttgatgctggagttcgtgtcgatctcgacatctatgatgatcggtttcttgtcaagagggaagtagaagatactcttgctccacaggttctcaatcggcagttggagcgtgaggttgttgaaaggatcgaagatgatgctcactttgtcgcagacagggcatacaagagtcgacttgtacatgccggcaaacagatccgtgatgaccgaatcgttgcgtgccttgtaaatgtcccagcacatgtcggcaaattccttagagcttctttattgtgcaccatctcgtccgttgagtcggcattctcgatgtagggctttttctgaatcctgttcaagtcctcatgcaaaccgtcaagtagcaacaagagaaattcttgtgagtcctgctgtccatagccggagaacgccggaccataccggccaatggtgttcttcaactgccttggtgcaaaggagccgtgtcctgcttcatcgtagatattccgaagcaaatttgcgtacgctttggccacgtcgccgttatgagctaaaggattgctggggttaagatctttcttatagacatcgtcttcgcaagtcagcagtgactcaagcagcacgatcattaacactcactcaggaagtactaagtcagctcctctacgctacgaacgcactgcagagcagagttcatgtagcaggtattgcccaaattgctaagaccggtattgcctcggggcttgccgtccttacgggttttcctgatgggttctggtactggagaagatcgcccgctggttgctgggctcttgctcttcagcttgttgggcttcaagctaccggacgggacaccgagtcgattcatggcttgctgggagaggtcggatacccactccgcgtcgctattggcgccaaacacgccctcttcaaggacgatgacgctgggttcgcctaggcctgcggcgtcgagcgtcatcttaccattatacttgggattgtttgactgatctttgacatccagtaattctcgctgagacccctctgaaagggagaggaatgtatttaggtcaaggacatagctgctgcctgcatttgaaacaagtggcgagaatggggctggggatgcgctgcgagacgcagcaggggtaatgttggttgatgcagcggcactgcccaggcctccgaggatcctccaaacacgaaccttcaccaaggggtcaacattgaccgaccgtttcgccttccgcagccaagtctggaagttgtcgtgccggctggccaagctcttaacgggcagcttcgctttgtctcgcaaagtgtccggagtaacgcccttttgtgggtttgagagcttcaggatagtgtagaccggcgggttgagcccatattggatgttctccgcagcaccgaacgggctggtgttgtgggcatagcgaacgatggctggcgactgctcggcgagaccataccattgcatgatgagatcccaaccttcctggggcacaacttcaaagtcttccccaaactgtaatcccggacgcagagggatgaatggttgctcgcgctcatccttgagccccacgttgaccggatcggtaaccagaacaaggtccgagttgtcgaccggaccaatttcaccctctgcagcgctcttgtcgatattgtcggcatgagtggaactccgtgcaagaacgcgctttaaccacgacatggaaactacgtaacccttctggccttcctgcagcggctgcatcataaaacacgtcaccttggcgacctggtcatcgtaggaaggccgctcattagacgacatcgaagcttcggtcttggtgttgttctgggttcctgtcacaggagcagtataggtcgacatgctggacggcgtttggtaggcgttgtcggacggcgaggttccatcattgcccgtggatgcttccgatgctgttgtatccatctgatcaggattgccgggtcgggattgtgtgtctttctcgatgcccatttctacatcctgctcagcctcgggcgcagcccgcttcgtacttggcgaggcttcgcgcccggtcggcgggacgctatcatgcttgttctctgagcccgacatatcggccgcggaatcgctaacaatgctcaggcccgcacaggcagccgaaggataatcgacggtgctcgtgggggaatccggcgtcggtaagcgagcggtgttggtttgggggcggttccccaagacttcgtcttgcagatgggcgggaatatagcgaggcggcggcgagggtgaagaggtgtgactgtggttggagccggaggtgggtgacaggcgagatctcgaaggggagcgagaggaagaggatgcgtgacgtcttccggcctgcgaggcagacgacaaacccgggagggctcctggtctgcgaggctccgctaccttgcggcgctttgtggaagacgtcgtgaagcgagccgcgcgcgtggcagctctaggtaacacgatgggaaggagtcaaagcagcgagcagggcggatactggcagaaatcggcccagagccccaatagaacacaagagaaagctcagtcgctggacggtgaggtagtcagaaaaacgattc

SEQ ID NO: 1471 - DNA, 3327 bp, Emericella nidulans
cccagcatgacccccatgtgcactcagtctgtttatagtctgtatatgcacaacaaacacccattagacatctacccacgtctctagatacgtcctcaagtcaatgtcctggggcttctttagatgcggcgtcagatcctccgcctcctccatctctctcctcgtccagccatttccaatccaggcaaatcggttcccactgggattagtatactcatattcaaagtcctcccatctcgggtcgcgacggatgtaattcaggctcgccgcactggcgggaaacaggccgtggatccttgctcccggtcgtccgccattataccaagaggagcagttttctgtccaaactgtccgcggaaagaaattgtcgctgtactcgataaagtcgtcggtggccgcttttgacggagcaaacgatttgatcccttgcgatcggaatttgcggatgatcttcgcgatatagacgatctggttctcgatgctattgggcacgctgccgccatggccggtggcattgggaccgccgatccagaggaggttcgggaaccccggcgtcgcgacgccgagatagttatatggaaatccgaaatggccgtcgtgcctccaggctgtcttcagatcgaggccgttggcgatgatgctgaagggcgggcagtgatcgacgttggcgccggtagagcagatcaccacgtcaacggagcgtaaaaaaccgtcttttgtgacgatgccggtctctgtgaagtgggagatgtgcgtctggatgtactcgacgttgttcttcgtcagcgcgtccagatagcccggccccggagtgggacggcggcagttgggcgggaagtcagggatgatcttatcggccagctctggcttgtctttgattcgcgagagcatgagctttgtccatgtctcgcgcaagttgatgttaatgggcgagttgcggaagatcgctccaaaccgactgaaatagccctgctcgatggacttgcggtacttcaggtacgtgtccgggtcattgaaggagtcgatttgctcctgcggaatgatatttggttcgaggcgccgtacgcccacagatccaaacgagtcggcgatccaggtgcggttgcgcgcgtagtggtcgacgtgggcggcgatgggttggatggaggggagaacttgcagccccgatgcgccgtttccaatcagggccacgcgtttacccttgaggtctacagagtggtcccagttagacgagtggaagagaggccctttgaaggtgttaatgcccgggtagtcagggagtttccaggcgttgaagtggccgatggcattcaggaggatgtcgagttcttcttcgtagagctggccctgtcaatcacaagcccggtatgtacagcatggttttgcgacataccttgtcctccttcaaatcgcgtacagtgaccttccacttacccttgtcgccaaaccactcggccctttcgactctatgctgcgcccgaacgtactggtagacattgtatttgcgcgcaacaccctgccagtactctctgatctcgtgtccttgtgcaaactcctccgtccacttggtgtttggctcgaaattcgactggtagacgtgcgctgggatatcgcacctcacaccagggtatgtattctcaaaccacgtccctccctggacgtgaatcagtaccaagactcttcaaaatcaggaaaaactcatacaagatccgcatttttatcatagatccgtaggtccagccccggcagctttacagggagtaaaatgcctgccgtgatacctgacagtccgccaccgattaccccgaccttgatcggtcggacttggtcgatagggtgttcttcaatctggaatgctggtctggttgtacttttactgttcgtctcgattgacacagccggactcgaagctgggacttgagctggatcgtgtacgtggatcggaagcgcggtctgggtgactaccggtgtcttgatttcgactgcagccatcttgtttaagagctggaggttgttgcggctgtttatccctcgggccctctctatttatcaatagcaaataatggatcagagcggggaatcccatggtgtgatgcgatgcctggtgttgaatgctgcgctgcacatggcaaaaatggtcgatggggttgacatcacgacattggagctcgggatggtgacagctcgcgccgtatttttcatttctctttcagttggagtagtcttatcttcccctcgatggtgtatgacaagatacactccaactgcatttgccaatactgctgagaaattgtgtaaatcgcttccactgtacttttcagtctaaggtggccgccagtcgttggacctggggtaagcgatacactgtctcagtggaccttcatcaatgcagaataggtcagcaagcagaaattcgttaataatccagtggcccggtcattcaatcattcaagcgaatggtgtgaataatgatttctctattatggattctccccgttccagatctcggccacgcaagagcagctgcagtatctggagaactcgctagactctggtatgggagatcccgagggaaatgacaaaagtccatttcatagatccatattcagctataatgtgttcatggaatgaagttgactgaacttggcttgctctgctgttttcggtaaaagccaacctagggcaagggcaaaggccacaatataggcaggaaaccgtccgtgattgtatacttgtagcagcgcggaaacgaaatttgatggccattccaccagtaccataaacagaagcaaaacgtcatttctcggacgtggaagctccctacactgagacagtggttgggcgtcgacagcgcgagatcagcagcggaataaactgcgctgaggccgggagagtctcgacagctctgtatcttaattctggcgtagtcacgatttttctttgagataataaccacgagtcgggtgctttaatagagcctgcaggggtgagtctagggggcaatgctgggttgggagcttacagtacagatagatgtgacttggctgcagcttcagttgtgtacctggtatatttcttcctcaagtatatcactcgcagcgacctttctgacctcgagttggtgctcactatcctggatcaaaatagtgtcatcaccagcccggaacaaggagagttgggtcactagttaatgtactcggtgactaaacgggcatatttacacaggagcaaaaatgccgctaactgatcaaggctcgcacgaaataaaaatgtgcatgaattcaagcacttcacagcaccagctcaatttcattcgttcccccgaat

SEQ ID NO: 1472 - DNA, 2075 bp, Emericella nidulans
tccagacataaaagggacggagtttcctactgctggtagcggtgctgccggtcgttctgcgtcgcacaacagacaggacgacaagcttcttgcgcagtgcaactgcggcggtgtctcgttcaccatctcccgcccgcgcgaggactttatgaactcgccgttgagcaaagggtggatacatccgtcttttaggacaaaatcgctcgcgctgctggatgtctgtgatgactgccgtctgctgacaggcgcacatgtgacgacctggctcttcgtgccgatagatcatatcacaccatccctcccggacgacctggttattggaacgatgaagcggtacgagtcgactccggggaccgtcagccggacattctgcgggacctgcggcgcgactgtgttctgctattacgacaaacgaggggggatagttgatattgcgacggggattctgcgggcacctgagggtgtgatgctgggtgattgggccgtttggaggactgcgaagctggggttcaaggacgatggccgcaggtatgataaactgtttacggaggggttggagaagggggtgaaggagtgggggaggagaagtcatcgggaggttaattatttccaaggaggaccggcgactgattagtttatctaacttcactctgcgcataacaccggggtggtccggaatcgagttcataaagaagagtagtgagggacgactggagtttcctaagcccgcatcgtactaaaatcttgtcttttggttttagttagtccccatatcagtagggagggatcacctagctgaaggaaggtcaaatcccaagggtgtcctacaaatgcccaaaactatgaaaagttcaaattcgctttctaataatcccgacgcttcggagtccgttgtgccaataaactagggctgatcgatgaaggacatctggaaccacttcaaaggatataggttggaaacgcgttcaccgatcagaatagatcgcaaattgatacctctctttgttttctatggctaggtcagcatgtgagaatgagatggttgttcgacggggaatagatcgcgggcgccgatgacgattacgagcagataatttatggatgtcgagcagtgctgggttgagatgatgattccttcgtgctaccagtcggttacaaaggtatatatcttttgatctgaacattacggcgaggatggtggcttgaagtgggttggagtggttttgcaaaactgtactaaatgccatcattagttccagttggaatgctaggtaaacacaagggttctggttggtcatcacctagccaatcacacttttctcctcgtttcggaatcatacgcaacactccaattggatcatagaggaatgatgaatggtgaaccgttccgccagtgagcttctccaaccgcgcgagcgcggcatcagccttgctcctcctacgtaaatgccgtatgcagagacagaagggcgcactggccctgggtggcatttctgttgcatttcacaggccattttttagagtatagccagtgagacaagagagcatgatagatgcgttggtctaactcaagacacggcatgctaacgggaaataattacacacccataatatctacccaagaacagtctccagtttctctccaaccataacctcagtccactgcacaaactccaattcagcattccaattggcagcaattgcttggaaatcagcgcgagccaaacattctccagaatatccaatgcccggaggacactagcaagtcctacatagctatgcacagcccgtagacgctcgcggacaaggtcacgccagtacagcccagtttcctcctgtgtcgaaatggataggatctcggaagcgagggtattccaagctgtagctgcttctgtttctggctggtacttgtctcttttcccgctttcccttccagcttttctggctccagtgaaggttggtgtgacggttggagagtcttcctgcaatgatgagtggaatcgtcatgacgcagttaactcctgacgtgcgcggaagacccataatgagagttaagatggctgttgcatggtgag

SEQ ID NO: 1473 - DNA, 885 bp, Emericella nidulans
cgggctggctataaaccacaacaatgtaaaccctgaccatgatataaaccgggaatgatattacctggcatgatattacctggcatgatattacctggcatgatattacctggcatgatattacctggcatgatattacctggcatgatattacctggcatgatattacctggcttggtatgggctgcccgtgcctgctgtggccatgaactgtaataactaaaacctgaccatgacatgacctgccttgattgcctgcattgggccctgtatctggctgggaactggcttggggtctgcctgcctgccttggtatgtgcttgcctactgctctatatatatatatcctgcctgcttggcctataacctaataatcctaaccctgactatgaccttgcctgcctattgcctgccaactactgcatgaccctaaccctgactatgaccttgcctgcctattgcctgccaactactgcctttgctatgtactctgctggctctgcctgctgtactctggcctggttcctgttgcctacctctgctctgctgctgacctggccctgcctgcctctaatctgcctctgctcctgctgccctgcctctgtactggctgccctgcctgcctattagtggacttgctatctactctgccgccctctgcatatacttggcctctgtatctagctggccctggcactgataattattggctgtgctcctactgtgctgtgctgatctgccttgccctaaatagccataacctgccatgatcttacatattgttggattaagactttgactgaaaaatctatcccctgactattatataactggctttaactgctgactgacctgctctatatctgggctgtatctaacccaaat

SEQ ID NO: 1474 - DNA, 4282 bp, Emericella nidulans
acatggtgaaagtgttacgtaccacggcggagatagtcgagaagagggcaacagctgcggggaatttcatcttgtcgatttgttgctaagtctggaagcaaattgccggatgcctagtctggtgtctacagagaatgtatggaatggggttcgactctaactcacacagcacagctttatatgcccatatttatatctctcggttgtctctcacttaaggcttcaaatatttagatatattaagatcgtagacgccccgtcttcaaagagctgatacatcctaatcggctgagaccgcatgcggagcacccattgtatgacgcttcacttgatcagacttggggttattgagggcgtatagatcttactaaaaatatctttgtcaagacagctatattgagagttttcttacggctgctgttccaaggcaatatggtcacaaaggcttcgctgagcggatggacaaagaagccccgtcttccttgttcccaaccacaaatgtacggtcagtgcacgaaaatcgagcctgtaatcagaaacggttacatttgatatgcagagcctcgaagcttggagtgttttgggagcgggggtatcagttcagggcagaggtatacataaagagattgagtacaacaaacggactatttctgggaatgttggatatgcaacaatgaactagagagcccctgtaagatattgatggtgctcaccactatcgccgtagactgtcagatcctgaagaacacctggataataggtgcagcagggaaggattggttgttacggcaatccagataactgatggttttatggaggaccatatacgtccgaagttggcaaggagctcattgcactgtaagcttgtctacctttatggatatgtcccgagatcaaattatcctggccctgctagagtaggggagccgcttagccaccttgtcctctcaagcgcaaccaaatccttggtgcatcgaagatctttaaactgaccgtccacaaactgaattgcagctcttgatagaggaagcttccttatcttctatgtttagcatgtcccgacccaagcctgtcttttcctctcaggtataccgacaagcatgtagatcgccagaggccaacgcgatggttatcatcgttattattgttttatttatttatttatttattttattttattttatttttttttttttttaaatatatgtttgtaagaaaccttttcattgctttccaatcactccttgatatacaaccaatgatccacttgtgatgtgagcggcacatttggtaacaagtaataagtcctagagccatttcagcgcctacggcaacacgccgcagcgcgtgagttcaaggtctgctcacttgttgcttcttgcggtatgccgggtatagagctatccgtattgcactactctccacaaccacgaatatatgacaaccagactataagcgacagttccgtacaggctccacatacctagacgctggatctttgagatcagttggcaatagtattgatatctacgttataccgaattcgcacgctcgtcttagctagtcgcactcgttcaaactctaacgaaacagttccacccagtacaaatggcttgcacagcgtttaaactgcagccagaccgcagagccaaagcctatgaataggtaaacatcctgggcaatcattccactccgctgagcctgcgcataccgctgtatttgatgtgtttcagcccctgagtgtcccacccagcgtgagtctaaggaatagtgagccctggtgaagacatcacacaatgtttatgtagtttaaagagtctttggatataccggcctattatataagcggaggtagttaggtctcaagtggcgccaggagcaacagcctggaagagaagaagtgggccttctcgttggggtactaagtatgctactccatcatggagtaactcaaatcccttgggcatcccacatcaactcccatgtgcaaggcttgctcaagtcagctggcgcaggcggccgtaagattgaggtgtccatttggtttcgagagttagacggactgcacaactcgccaaacagcaggaaccgtcaaagggggatctccaatgtaggagcgcggttagggatgccatttacgctgtttatgacgtatcagagggctctagtgtgcatcttccccgggtggcgaccccggcgaaaaggctcctctaggttggagaaccgctgttcatcgctgatctcatccaactgggaacttctacccatttgactgacgagattttgggaccacttcatgaccccgctatcgtctacaatatgcagggcacggacgcgccagtgcaaataccgtacctaacctagcagtggtgttcttttgaggaaatcctaagcgcttgctgcaggggtttagccggcaagatccccagtatcccgtgtattccccgcatagacaagggttgagccaatgctgtagaaagaattgaagtctccgccatgacggagtgggtgcttgaagatgcccgtttagccgctaatccgtgtccatgaggtgatggagcgatagcgctataacgctctacacaatcatcagtcattaagcactatgtccagcgaaggagaattctaacccttccccaggtgggtggagcccagtattaattcggcctcaattccagacttgataagcaactttcaatcgaggtgatcttaaggaaaaacaacacaagaaggaaaaagggggggaaaaaaaatcctagaatcaccagatccagctactatgcgcctcactcactgcttgtgcatgctcagcctgctggccaccgccactgcgacggcctataccaaccgctcctccatgccacggaccgtagtcacaactgatctcgagcaagacgacctcgcctcgctgatccgctacctcctctataccaacgagattgacacccatggaataatctactcatcaagtcgataccattggtcgggcgatgggaacgggactaggttcttcctgccagaccgcgagtacgagacaacgcagtggacatggcgatggacaggcacgcggacagtgcaggatatcgtgctcaaagcgtatgcagaggtgtggccgaacctgaatattcatgatccgttctatccgtccccggacgagttgctagctatggtcaaaattgggaatatcgacttcgagggcgagatggagaaagacacagagggttcggatttcattcgcgagttgctgctcgacgattcagatagcaggacgctctatctacaagcgtggggaggaacgaataccattgcgcgtgctctcaagtctatcgagtacgagtactcgagctcgagcacatggaacgagacccgagcagccgtctctcgcaaggccgtgatcctcgccagcggattccaggacaacacgtacgtcgattatatcgcgcccaactggccagccctgcgcgtcgaggactttagcgccgcatactcactctgggcttacaactgcgagaagggagagggtaacaccctcggtctcccggacaacaatgtctacttcacggggaactggaccaaggcttacgtgcaaaaggggccgctggggagcctctaccgctcctggcttgatgggcagcgcatgccaggcgacctcctcgacgtctttggcaacctcgcctggtatgcgggcaccaagcagagatgttatccgctagaaccatacgccttcctctccgagggggacaacgtcgtcttcaacccgctcatcaacaccggccttcaggacccggcgaatcccgcgctggctagctggggcggccgatcaaagcaaaagagcagctcgccagatctctgggtgctcgttgacgacgagaagaatgcgaccggcgctgccgacagcgagtacacgtatacgcggtggattgcaccaatccagaatgactttgcggcacgaatccagtggacgctcgaggcaaactacacgcgggccaaccatgcgccggaagtgcggatcctgaacgggacgtacgtcagcgcaccccccggatcgacgatcattctggcgggcgaggtcagtgatccggacgatgacacggtcaagacgagctggtggcagtatcttgaggagggaacctacgaggatagtgtagaggtaaccgagctcgccggtcaccaggcgagtgtcgctattccagaggacgcgagcaagggccagacgatctcgatcatcttgcagggaacagacgacggggagtttccgttgacgaggtatgctcgggtgttt

SEQ ID NO: 1475 - DNA, 865 bp, Emericella nidulans
aaagaaaagagatcctactggtataaaaaaactactcaaaaatttatgattataaagacaaaggcggtccaactttctagcggacttcaagtcaatcagttacaggcagggcaatccataagcgaacatcagaaaaagaaatgtcctcattggtctccgcaaggtaaaaattttccggttattaccaatatcgttgtttaaacagttcgtcctcactggcgggcgcggtacaccaccggctgagacgactctagaccctgctctcgcgatcggatccaggcttttattgaaccgagtagttatcgcatcagacaggcacaatcatgacgtctagggttcaatcctgcataaagcgcccgtcgtgtgatcatctgtagcactttgaagcagcgtgtagcgcaagacccaaataagagatataaaccaaccacatttactctcccaattctcgaaaaatgtccatccgctttctaaacccaactcgccctctcagacaactgtctatcactgctcccagatacattacacctctccagcaacggttcatctctcagtcgcccatcgctatgactcgcatcatcgacgcaatcaagcaagatcaccgcgagatcgaggactactacaacaagatcctctccgcaaccaccgaaaaggagaagatccaatggcagaaccagtttacctgggaacttgcgcgccactccattggcgaggagcttgtcgtctacccggtctttgagaagaacctccccgacggccgcgccatggccgacaaggaccgacacgagcacaacacggtacgtctcgttcatttcctaaagaaacaatactaacaaacgacaggtcaaagaaaagctcaagcagt

SEQ ID NO: 1476 - DNA, 2675 bp, Emericella nidulans
gctcttcagttggtaaaatctggtctgcgaatcacttccctatagcattcccactcttttcaatcatgcgttacaatgcccctcccgccagactcaataatgtgcgctcagcaactctgcagcagagtcacacggcgccccgaaacccagccactctgacccccacatgagcactccagagaccagcggccaatcctcgacggtttcattctcgacgtctctagagcctaccgttctacaggcagaagaatacctcacctcgtttcatactcaactactaccctacttcccgtgtgtatatattcccccaggaacaaccgcgcagcaactacggcttgagaggccgttcacctggctgtgcatcatggccgtgacgtgtagggctgcagggcaacggcgggcgctttacgaaaagattaaaaccatcgtggctcagcagatggtgcacaattctgccaacacagacattgatattctgttaggacttctgatctacctcgggtggtaagtttcaccgagcctgttaatatcgatgtccgcctctggctgacgaaccccgtcttgcgtcaggtcaaaccagcaagtatacaacaaatccaatatccacgtctttacccaactcgccaatgcagccgtatatgagctgggtatccataacccgtccgcgaagccaaaatgatggggcttgtgcgtgcatacggaaggggaggacgaactgtcaaattcacctgtcggtcaaacgatggaggagcgcagagccgttctggcatgctttctgatcacatcgatgtaactattccttgcgtaccaaggtggatcgtgctaatacctttcttccagtaactcgacgtttgtccagagaacggattcgatacgatggacaccttttatggacgagtgcctcaaattgctggagaaacagcaggaatgcctgaacgacgaaattctggcacaacaggtcaggttgcaactaattagcgacaaactcaaccttggtccgtaccatggagggctggccgcaaccccggatccaattcaagcaccccctgccttctatctccactcaatgcatgcgcaattgcgaagcatccaaccccgcgttgcaccaaaactcgcaaagccacagtgggtatccaagtttcgttatcttaatctggatcgcagctgacctttcccagaaattttactccttcaccaccactatacctccctgactcttaacgaatccgccctcactaatgctcccgtgatctccaaaaacctaaactttcagcagctggagcatctttatgcctgcctggaagccaccaagtcatggttcgatctattcttgaccatcccgccggtggagtacatcgggtttcccttctcaatattcgcacaaatggtgcacaacctcgtgattctctatcagctgtcgactttcgaggaccctgcctgggacatagctaccgttcggcaaacggcagatgtcctctcaattctcagtacagtgattcggaatatgagccaggttgcatccttggcgggcctggacggtgagcccgacagtgatgttttctcccgagtcgccaagatgtacagatccgtgcagatggggtgggaagtcaaactcggccctaagcccctttcgctcgcaagcacccactccagccagtctgtcccagaacctcttgataccatgcccattaacttccctttaatgtctgacaatgactggctgtccgatatgctcaattcaatcacacacaccaaccgctctgaagtctgaatgcctagcctgtggccctgcgtaagtgtccgtgatctggagacttgattccgatgattattatgatacaacacgctatcattttacgcccgtctaacgacgtgccatgctttatcttgggtatgatagatatccgttcacaggatccgcgttcgaaggattggagttatgagcatctcctatttacgcccggtgccctgtcccataaccagcataatgctactgcatatgtactttggcttacgttcctaacagtcacgcttcagcaaacgaacatgtagacttgtatatctcgggccttcttccatacgggcgggatgcattcagccctcctccatccctttccatatttcagcttcactgctgccgcgcatttttgtaggcatcacaaaagagatcgacaaatctcgaaatggaataccctcttgtccgccaaaattcacgataagaatgccggacatcgtgttgcggactaacattatagagttctcttgctcttcacgactcgagcggccggttccacggctgctggccacaccagatatggctcgaacatacttcaatcatcaaccaatcccaccctgcctgctcatacgggcgtctaatatgcaggctaaactcgctgaatcattgatatgttaggtagggaattttgtatagccttatccatggtttgtctttcgccttgttttgggctctggtaccgaaggcgctgagaagaatctctaagtttgtgtccgatattgacttgatgcaattaagaaaactggagcgttgggtcccatatcacggcttttggacatctttcttcaggggcattattatgttccatcacggatgtacttcacctaaaggaactttatcgaggcgtggttgaataggaagggttcttcttttgtataca

SEQ ID NO: 1477 - DNA, 3669 bp, Emericella nidulans
ttcatcgatgtcactgcaactgttgattcaccaagaactgcccccgcccccgcgtccgacctcggctctggcccgccgctaccatcgctacaactgtaggtttcgccctctacgcctgcttctccgatggcagttgcgggcccagcccggcccgattccgacctccgctcttcaatgctacccttggcggatgctcgcccagccccgccgcccacttcacttacattagatgtcgtgagctgagcacgactagtgcggcgtggcagcggtacgatctgcagctgcagatcattgactctgacaggaactgtatcggctggagcagtgcgagaggcctgatttctcttcctcagtacgcggctacatatatccataattggcttggcgtcatgaactaagttcaagttggtgattactggaagatgcgtatcaaaaaccaaataattttttgaatactgcaacctatttcctccaaagaaacaaccgtgatgacgtgctggctcagggttacggtgatcactcacggcagccccatccaacaagtgcccatcttcaccttagcttttattgctcgggatcaaatcccagggcgaagtttgtttttttaattgaggttccaaatcttgttttgcacttgtgttcaagaataaactcaataatttctagctataactacatcctgcacgaaacaaaagaataatagaacataagaatacgtatctcattctacttatcggtctatatgcataagccattatcccagtagccaaaacaccatgcagcagtcaatctagtttgttctaatcacatttgcaaaggacatttcttaatcataaaaacccaagccagcatttgaagtcgttccagcgctgccatcgcgtggctgatttacacctccatacccacccttgcgatctgatctaatgagcttccatccttgcacccatacgatcgaacatcaaatcgcccttgagagtggcatcgagtccaccgacggccgaatcgaccatacgtgacgacatactatctggtgtgagctcatcgtcctcgaatgaccgcgtgaggtcagtgttgattctcaagtctttcgatgttttttccggtgtggcaattggagtaagctccccgttggatttgttcactgtcatcggagcagggacgtaggttcggggcctgtagacaagaggaggaccctgagtgcgcgcatccgtcccagcttgctcgatagactcaaaatagcgaacagttttgaccttgagctcgagcgttgcgtcacgatcgcagacgatcagagggtgctggtgcagttgaagcgacgagatggtccacatgtggttcacaccaccctctaggccctccttgaccgctaatgctttatgggcgccagttgccacgatcacaacctcgcgggcttccataattgttcgaatgcccactgtcaaggccatacgaggcacttgggccatgtcattattgaagaaacgggagttcgccagaatcgtgtcgtaagccagggttttcacccgggtacggctgttcaaggatgagccaggctcattaaacgcaatatgtccatcagaacccactccgcccaaaaagagctcaatgccaccatagcgagcgattcgcgcttcgaaggaggcgcactcagcggccaggtccgtagcattcccatcaagaatgttgatgttctgcggaggaatatccacatgggagaagaaatgcttgtacataaagctatggtacgattcggggtgatcgcgcggaagaccgacatattcgtcctatatcgttagtaatcgaactgaccaaatctgaggaaaggtggtcaccatgttaaaagtcacgacatgtctgaatgagatatctccagctttgtaacgccggacaagggtcttgtagatgatctctgggctgcttccagttggtaggccaagaacgaagggattgctctcgctaggtttgtatgccttgatacgaccttgagtccagtagagagaacattagtatagcctaattactgaatatgccgtagagtgtacatactgataatataatcagcgatatactccgacgcctgcaaagatgtatcccggatgatcactctcctgaagcattcacatcagcacggccacaaggtcgaatgcggctcgcaacatacatgatgacaggctttggtgacgtataggtgaaaagccgatatcagagtcagctgtgatgacagtcggctctaaaatagagcaaacaaatgagcagcgtatggcagatgatgctgtacaaagaaaagagagataagacgacggagcttcagccagtataaggatggtcaacaggcccatcgacgtggtggccaacagctttgtcaacccatggctccgttgcactcgccatcctgggtcagcctttccggtggagagtgaaagtacttttagctagtactgtctgcctgctttggaagctcatgaagctcggtcctttaagatagcagtacgggatgatgacgataccgcggagtgctttttcggccctctgaaagatcattactggatcttgtctagtccaaactgcatgactacccatatcaatactggcttagcaagaatgatgcgagcgtcattgggaatgtaaatgtcctgtaatctctattctgccaatttggtatggcattcccccatcaactgggcctcggatggatcttggctgaaggggatcgtcactcaagttagagaataaaaaatcacgataacgagtgaatagcttcatgttgcagttgcaggtgggatggtacctcagccagaagccaccgtaagttagagagaatgatactatggagggttgaatgagacccacgctaaccccgaaccggctgtgacggctgtcgttgcattctcaagcacagtgcaaccctggctgtgaggtggtattcgcccccagtctgatgaccgaccagcaagaagtcagagtgcgttatagtacggtatcgatgtcgtaaatacgcgttagtatcgaactttaacttctctgtgaacttcattaaagacacgtgattctggaagagtcatgctgaagcttcaagccgatgacaaccgggctacggaagtcatattctcaaggaatcgattctggattctgtaagtaggattttgggttgactgatacagtcaacgccaaagcataagacagtggtcaaaagcggtgaccaaactgaccacctttacagaaacggtaaattcggtaaatggtgcttggactgaagacagttatcaagttgtcaaactcattggcgttcggacaaggtaagaggcagctaacgcggatcattccatgacccattgtcacggattggcttcggccagctcggagttacacaggagctctggcgcaaatcagcttgcgctctggcgctagtagccatatataggagtatcctaaaaaaaaaaaccgtacacttcaagagggagccgcaaaggctcccctctgatttcatcacaatctcaatccatacaatgatcaggagcaacgtcagttcaatcggatgcttgtgttttgcggcaaacatcatcagtgtctaaaaacatatcattttcggtacttggcagagccacatcagggtcatgcaaccaatagtgctgtgatttgggacatcatcaggcttgggatctttggccg

SEQ ID NO: 1478 - DNA, 3475 bp, Emericella nidulans
atgaaccgttcaaaccagcaaaggccagcccttcaaacaaatttggcactatcccagcaacaaaagcagttcaaggtccgttaaccgtactcgtgctgggctgccgggcgccggtttcctcgatccccgacaaggttattataaagtttgggtttttttttcaaaacaaccattgttgctttcaaagagtccttgttcatctcagctaactcatccttggtgaaggtctggaattcgctaggctgttggtcttcacccaaatcgctgatattctgcaaagtcagcttgctcagcttctcctgccagtaacggctacgcttttcgttctccgctaaagctttctggttctcctcgagcttgttgcgcatctcaatctccgtggcccgagtttcatttaactctgctaccttttcgtccaattctgccttcatggtcttgagctcggctttcttagattccaaggcctagcagttgttagcttccatcccgcagctggtttggccgtactcacgtcttgtgcttcgtccaccttctccttccatccagatgcatcgttggcttggttggcaacatcctcgttcaacttctgaagctcctcagcgacattggcaagttccttctccgcttccgcacgggcattttcgtgctttttgataagcttctcgttcttagatctcgcaacctcggcgttggagatttcttcagagagaagactaatctgctctttgagtccgtcgaccttggctttctggctccgtaatctaacaccaccgacctccataatcttgttctgaagcgcctggatttcttcctcgatcccacctttctgtgagcggagatcctcaatttgctcttcgaggccaacaatttgttcttcaaggacttttactcgactcgcatccgtctttgagggcttgtgtgctgcactcagctcttggacacgtcgctcagcatcagcaaggctgcgcttggcgctatctatctcaatcatgatcttctggatcttggtctctgctcgaggaatttcttccgttttctctcgcaaggctgactccacacgtctctgcttctcttggaagtgctggtacttcctctccatctcttcaaggtcactctccatctggactaattgctctttggtgatatcgccgacctgtttggatgacatcgcgccacgggcaactcgagtaccgccaccactcattgtaccagaagtatcaatgagctgaccatcgagcgtgacaactctccaccgcctagcgccgtaagcaattcggttggcctgatcaagatctcttgcaacaagagtattctgcatcacactatagaatgcgggagcaaatttcggatccttcggcttcaccaagtcgaacaatcggggaacgttgtcgggagtgaggattttgttcagatcgcgtttggggagacgatctagaaggatgaaattggcacgcccaagattgttctttcgcaggtagtcaatgcattgctgtccgacctcgactgtgtcaacgaccatattttcgagcgcagggcaagctgtagaaatggctacatcgtatttctcatcgatcgtaccaagattccctagtcgaccatggaacccttcaatacggccagattctttaaggcgcataagaccggtcagcacgcttccccggttttgcgtactcgcgacagttgccctagcctcttcggccttctgccgagcattggagacatgcgcgcggacgtcaggttctttcatgctatatttcttcaagtcgtgctgaagctgctcaacctcatcctcgagagtggaccgttgggtcttgcattcctgtagatcttcctctttccgcgcaatggtttcctctatggatgtaatctttgattgcgcttcctcaagtaaaacagccccggcgttgctcttctccttgaggatatccagctcactctgagccacagccagttcagattgcttcttgttgatcttctcgtcccatggctccaaagacttctgcttagcagcaatctggtcggagagcccttgggtcttgcctttcaggctttctcgaatttttgtgagctcctgttcctcatgctcgacttcattctcgtagtccgcggtttccttgctcttattctcaatagcctcgctgtgtctctttaccaaactttggcactccgacgccgcgaggcgagcgctagtcatggctttctcgagcttcttctgctttccaactaggaatttcttcttctcttcaaatttgaccgtttctttgtcgtactttgccattccctttgctagttcttgcgtctccttttccatgcgctcgtactctttcatagcacgcttgtatgctttctcgagctccttgattcctgattcattgccttcatgcttctcaagctcgaggttcaagagctcttgcatctggagaatcgcctcctctgtaacccggaggttatcggcacactcatcgatgtagatctgatacagcgccgactgcttttgggccaactcattctcatcacgaaggtaggccagggctttatcctttttgtccacaagggcgttcttctccttctcaacatgttgcacacggttattcttttccacacaaacgtcattaagggcttcaagttcagtcgccgcctcttcaataggttgtttgtattttgacgtgccaatgatatcttcgagatactccaaaagcccgtcttcatgttcatttgcggccttaggcttcatttgagcaatagactcgacttcaccctgcagaatcaaaaagcgtttatgatcgagatcaatgccgcgatcgcgaagcagcgtcgtcactgccgtgaagttcgtctccttgccattcatataatatttgctggtgttgtttttaaactctttgcgagagatgatcagttgggaatctgggactacttcatgctcccccccggggaggtcaatgatttcttggaaataaacttccacttcgcagaacggcaggttggggtggttggcggaattatggatcaatgcagagatcttgccctgtcgcattctgctggctcggaatccgaacacgaataataacgcgtcgatgacgttcgactttcccgatccattcggcccaacaacggaggagaaagaagcgtgaaatggccctactacctgtttccctgcgtaactcttgaagttatttagaactaacgtggtaatcataaggcggcttttaggaccttggggttcctccggcttaggaggaccgagtgtccgtgactttaacatgatatccattggcttctcgaggatggtcgtgttcggtttgacgatggagaactgcgatttcgtatcctcagtaggtttcgcgggcgtctgattcaccgcggaatccgtaatatcggcgagcgggggtacattatctcgctgggggagcgggtgtggttcgggtgaaagcgagggctccggagttgggagtgaggacatttccgggtgggt

SEQ ID NO: 1479 - DNA, 3848 bp, Emericella nidulans
agcttatgtggagatggcatccgactttcgagacgcttaccgtaaacagatcccagtgactcttcaagagagagcaaagcgtgaaggcgggtatactatctatctatctggtggtgggtttcgcggttggggatacctcctgctctacgtagaccaacaagatgagaatcactatccaaaatctcagatcaatggctatgccgttgtagagatagattcgagagcacggatctggaaaaggttgctcgcaaagcacattctatctttcgtgtttctgacaggcgacgagagaacaggtcccagcagtcgcgtttctagtgaaagcactgacggaagctatccctcacggtatcagagaagctcgcttctgccagggaggcgtacgcgaagggatacttttccgagaattgttgccagcgtacgtgctcaggatccactcgaagttgcaactttacgattcgccgacgaatcagtcaccgatctacaggctctggtttacaattgtatgcctaggtcggcggggaacgactggatagtgtctccggtaggtcatagagcaatatatgatgctaagccgctcttcgatcaacagcttctgtactagtgcacggagttggagatcgcagagtcctcattatctcctcttgaacctggccttggattatctgctggagtgccattctttttcttgccaaatcgtcgattccacgcgaagcgcttcctcagaaattttttgcttccttcccgaggggacatccctctggtagttgtcctgatagtaagataatagcctcctgcgaggcctgaagcccagcttcgagctgatgttgatgggcgcctgctgacgtgtttcgattcagccaactacatgagagtccttccactgactgagcatccgaatccatttcaggaatagggtctcactagacaagacgtgcggaggaattcgagcaaaaatttaagcaggatgtgcctcgggatacggtatcttttttgaataaagtaatattcagtagtattcaactatatgatctggtaatagatatcattttctgctttcggtcccactggccccctatcatcgtggggcagagggcgcgcgggacgatccgacaagactactgctaacaccgtccaggttgagttaatgtggatccactggaaaagttatctttagaatcttgtgctctccaagagtgtttctttagttatgtttgcatgctgaagcttctcctgtactgtgcttttggttaccaacagtatcaacatatcattcaaggcagcgccgaagccgcgtttgggctcatgcggataggttggccatttacatctagcagaagccttcatctctgtgaaaacccttgactgggtttagatcaggagaatatagtagttggtaaactagtctgatataattctcaccacacatttaactaattctaccaatatgatgataagacgcgttgtcctagatgagaacagacaatgactgggaaagctcctgcgatggtgaagaagtcaatcaataaaggcctcaaaaagggcagtggcaggtaaaccttaggtacgtacagggaaggaccatattactctgtaagtagattttattacacctggatgaattgctctgtttattattcatgaagtacatccctaccaacagctttctctttctcatcttactgtatctgccttctcccgccaattgtctcctgtggcttgtgtgctcctttatgtcaatggtgtaataggtaatcatggcagtaacagcactatagtccggatctcatgtgttcctcattggcaccctcgcattttgcaagccaaaaaaaaaagaaaaaaaaaattgtcgaatcaagagctatgatggttggaaagagaacgatgggtatttgatttgcaaatgttccttttaaatagtacaccagcattgaaaacgcacttgcaagacacgactcaaatgaatgtctttggccgatagcatgatatctataagtgactagaggcattcaataaaggttgccacatctgttggcacactgccttaaaaaagacagggcggaattagatatttagccgccttgagcacaaagctaatgttgcgcggaaatacttgccaatgtaatggcatagaaagccatcaacagagtgccaggaatcagaccctaacaagcgcagtttagatgaagattggaggccgagaccaagacacttggaatactttgactatttgcgtcctcttactggactgaccagacacagagcttccttttcttgacgtggtatgagtcatggtttacttcagtcttttaaatatagataagcttaattgccaagctttgcgctcgtttaacaagctcatttgaccgaggattaataccgattgaccgaacggtctgatgccttttctccggttacgtcggcttgtgggtctaaattcctgatatatacttccgagtacagggttggacaagctgtaatatcgacgtcattggatatataaggctacagtcttcctcaatgaccttgtaatggtattgtatcttatgctcttcacactcagcttcaaaccttatgtccacaagctcaaactctataatcatggccaagcccgaccccctgacctactcaactgaaactttcatcgcgggcctgcatgacaccaaaccccccgtaaccttcgacccattggcatgggaagctctcgcaaaagagcgtctctcggccgacagctttggctacgtctggggctcagcaggaaccagacagacagacgataacaatcgtgccgcgttcaagaaatggggcatcgtaccctcgcgattagtcaaggctaatttcacgaatctgaaaaccactttatttggggacgagtacgagtatcctctcgccctggcacctgtgggcgtgcagaggattttccatcaggagggtgaatcagcggctgcgaaggccgcaggggaggaaggcgtcacgtttatattgagcacggcgacgtcaacaagcctcgagaatgttgcgaaggcaaacagagacgggccaagatggtaccagctctattggcccagcaacgagcatcacgacatcacggctagtctgctgaaaagagccaaagagaatggatataaggtgcttgttgtaacattggatacgtatatgctcggctggcggcctagtgatctcgacaatggttataatccgtttctacgcaacgataacatcggtgtggagataggattttcggatcccgttttccggaaacgattcaaggagaagcatggagccgaggtggaggaggatgttgggaaggcagcacaggaatgggcgcatacaatcttcccgggtacaagccacgggtgggaggatatcagcttcttaaaggagcattgggatgggccaattgtgttgaaaggaattcagacagtcgctgacgcaaagagggctattgaggtcggcgtgcacggcattgtggtatccaaccacggcgggaggcagcaagatggtggagttgggtctctcagaggtattgcctgagattgtggatgcagtcggccagaagattgaagtcttatttgattctggcgtcagatgcggtgctgatatcgccaaggcgcttgccttgggagcaaagatggtgctcgtagggagaccgtacgtctacggactggccatcagtggacaggaaggggtgaggcatgttatcaggagcctgctgggggatctacagttgattttacatctgtcaggggtcccggacatttcgagcaggaaactcaaccggcaagttttaaggcggattctgtaaatatgcagtgacttggaggaatgaagcatgtgatagatctatc

SEQ ID NO: 1480 - DNA, 1473 bp, Emericella nidulans
ttttttcctccaccaccactcactattagtggcgctagtgcttgtgggggcctgtgggggttagggttaccatactgagatgagtcttgctgcatcggatagctgagcgtatgagcgattgaacaaagcctaagacagtaccgaaagcagagggtagtccgtaaatacctttgacgtaaatgatatcaggatcgaattttctcctacgtagtctcgcaagaagccttggagggctgctgattgaagagaaatttcaacgttggatttgcttctacctgtcattctctccacaaagaagttcgtcttgacgtatgcgttaagatggaaaccgatgatgaggagcttcccgcacccgataggcactcatggattcagaagtttatccagcaattcagatttggcgtatcagtcatgaagggtctaagtacgatacagcctatccgagcttttgcagaattgctgatgcccaaaaatcgccagtggttgtttcttcaattactacagaatgtatttttaggggttaaatacgcagtccagcgacaggtactgcttcataattgtgccactatagccgggcacaagttgaccaccggacgatgagttggcgcgctagatgcgtctattactcatctctcatcatttctatacctatgcgttggccgataaacacgaaaaaccggctaggtgatagccatagcaaatcagacaggacataggattcaatatcaactaaaccatgccccggatagtcacctcgtactgctccggttccctgcccaagatttctttgagggttggcgtcacaacagccgtctcaccgcgccgaatagcttcccaggctgttgcccattcccgggccaaatcaacgccgtgatatgtatgtctccccttatgatcgagctttgcatattcatccacgctgatttcccggattttcacatccttaccaacagccctccccagaatctccgcagtttcgttcagagagtaaatcttaggccccgtaagcaggacaatcttgttcacatacgggaacccagccgcaacattggcattcgtagtcgtagcatatttggcaacgagtttcgccgtagcctcgccaagttcgtcacgcttgacccacgcaacgccaggcccagacccatcatgcgggatggtaatttcgtcgacggggttgtgcagatcaaaccaatttgtgtagatggggaaggactcagagtagaggccttcccggatagaggtgtacgtaattggcctgggactggtgctgacaagttccgcaaggaacttttctgtcgctagatgcgcgcccatgacgtgggctacagatgaatcggtgtagtctccagcaaatgcaagagacgagtagaagatgtgctttacgccactcttgtgtgcggccagaatggcagctttgtgggcctaaacacgcgttagcccggtagcccttgaatatattgggtaaagggaccc

SEQ ID NO: 1481 - DNA, 3941 bp, Emericella nidulans
taagcgcgttgagactggcggctgacttgccagtagtgctgtgtattggggctgagcagcactgggtgtgtagtctggcagtggcagatgaatgggtttgcgatgccgcggccaatcaggagcagacgaggggctcgcccgggaggagcaactcgagatgatgtggtcaagtcgcgctgactactatggccgtggcgagaatgaaacagtcttattaatgaatgtcaatacgagctaaataaccgataatatcaatactccacagggcgaaagaacgaaacgtgcgagctgggctatagtgtggttgttgattaactgtagcacggcggggtgcacaagaacgaagtatttaaacgtacgacaaactcgttccatgtcccagtcctcgccactgtaagttcaagcaccagaagtttcgcataaggtccggaataaccatcactcttcttttatctacttttatatcaccttactgtaggttcaagcggatcataatccgagccaagctgattctcctatgacgattactgcagtgctcctattatagattcatgagttccagaccagacaaggcagcagaattcctaacccacaagtaggattaagccggctataatgtcagacacgtaggacaattcgagcaagctacttccaatcatccataatcggatgctgaataacataattgacctggatcagcctaggtgcggcttgaaccattgagtatatatagatgctgcgggtccattatatggggtaaactatccggtcctcttttgggtattgaacagtttcatgaccatcataacggggcagttgtgcattgtatacaattcatgccaaacggttcaatttttaagagttttggttttatcgtttccctcgcatagaagtgatttcccctttccctgaccattatctatcaatgtcataagattcagaatggaaaagatgttgctatcaaataatccatcccaccactcgtccaaatttctggggaccgaatggttatcatacagtagtgcagcctagcctcaactccaaggaagtctgtcctgaaaagttcaatcaagtggtccgtcttcgacttcataagctttcacgaaatgggcgcttctctccaggtttcccttctgatacgacgactgcatctgaaatcttcgcatgcaacgatcaaatctggcatgtatgtgcatgaatattatcagtagggcgcatagcctcgtccacggccgcgataaccgcctcgatatccaccacgagggaaccctccacggccgtatccgcggccgcgaccacgaccgcgtcctcgactgctcataccagggaggttggtgcgtttgggaacgacctgcgccaaacttgtcagcgaactgaatcagaggttctatatcttaatgtcttctcactttcaagtttcgaccgcggaagacgctctcgttcagaacaagggcctgcgccaccagactgggctcggcgaattctacgtaggcatagctatatcaccaagtcagtagggctagatctctagatggcaagagactcgtctggcaaccgcctatgactttgaggctaccacgtaccctttgggttggcctgtgaatttgtctagaagaatggtaacgcgatttatggaaccgcagctctggaagtgcgcttgaatttcctctggcgaggctccataatccacattaccgacaaaaatactccgggcgtcgatgtcttccttgtcttctttcaggctctcggattgctggtcgagggtagcttgcatttcccgtaactttgccgcttcagattccatctcagcgacccgtcgtttcatggcctcgatttcttcctagtttgcgcgaaagagtgttagcttttatttccagaaaatcttccgaatactgcttaaaggcgcgcatcaaactcaagctgctgccttttgtcggcgtttcgcaatcatacctcatcatcgcctccctcttcatgaggcgtttccaagcgctcatcctttatctcagcctcttctgtagtcattgtgcctgtgcgtaaagctgacgatgccctgttttcctcgagtcacgggtgtctgagataaagcgtgtgcaaaagcggaagctctccacctggtttgagttgcggattgcggcagtaaaatgtcttagcagaggaacgtgggcgccggcaggaccccgtgtcaagcccaactcaataaatggtctgtgtcagttataaaaagaaaggatgataataggagatattttgtgaaataatgagatacttgattgaagctgaacaccttgatttctacttcagtactagcgtcatttttgtcatcacaattccggggaccaactactattgcatcactgcagtggaaggataaatatgaatgcgaaaatgatcactgcacatttaaacacttgtaatatgctgatcactactccgatacttgtgtaaggatcatgtagaaaaagatgtgtcgcttaccaggggcttgagttaattatagtctaagaaagacatcctgtttcttgggtgcattgatgcattgcataagacaagcacaaccataaacttatatacagggctgctatatttggactgctggtgtgtactaggctctgatattagaggtttattatttcatgagcattgacgtcataacacagtcggtatctatatcataagcacaggcaagcaagaaaggatcagttcatgaggaaaggacgctattttttcgataagagactttctcgacagcaacagtctcgactccgttcgagtccgtcttcagctggtagacatacagcactaggacgtcaccctggatctatctgggtgtcagagagtgcccaaagttttggcttgcgcagagaaaacatcaggtgacttacatccattagacagaagctgggtgtcggttcctctccttctggccagtatcctgtgctgagagccccagtggctctgccgggattcacgaagaacctcccctccaattcgaaagcttcgaatcgatgagtaccaccccatagtaaaatgtctacatccatctggcgagccgcaatgaggagcgcatctgcatcaccttggggaatgattgtgtggccatgggtgaaaccgatacgaaggcttccatgggtcacaactttcgagagaggcaggttgggagaatcgacatcgaaatcgcctttgaccaactgtaggtccggcgcaacctgacggagaaactcgaatgtgctgcgatcggtcaaattacccagacacagaatctggccaatcttgcctggcgtgaggagcttccgaaactgcgatattgtcaataagggagagtacgaaggattaaccggagaagatgcgacgcggaggggtttgtatgtacctttgccgggagatcctaatggcgcaatgttagtacattgtgggtgatgttctgggcaacttgcgtctgatcacatacgggagctctgtcagggataaagaggtcaccgatgaccaggactagacgcgaggtcatcctaggggaagtgaataggtcaacggcccattccaaggtcaaataaattgatgagccaaagaaaagctcccaggaattgtcgtaagggagcaatcggtaactctgaagacgttgatatgcagctgtcagacgcgctggtacctagcgataacggtgaagctaccgcggggaaaactgggtctgccacgggtttggcaaaccctgagccctatccatgtgctgaactgggcctagcgccggtctgcaggagtattctcgaatttctggattcaagtctagaacctttgcagtaagactctcttgacatttaccacgggatagtagagattggcaaggaatatgactcccgttgtacagaatactccgtatacttgagcactgcgtggtagttggagcatgtgctccaagtacatagttaagtatatagttagga

SEQ ID NO: 1482 - DNA, 9664 bp, Emericella nidulans
gatgagaccttcgagagaatataaggaaggatattgatacaatatgaccgttcctgtcgcaacctcgttgatcaatattaagctatctgccatcatccttgagaacaacccatactagtagatgaggttccacaggcagaatccacgctgaatggtactgaggatattatctgagggtttgttgaggtcatagatctactgatgtaaattggtcctctctcaaccacagcatgcttccgtcaatttgattatagtcctcacggtgctcaatcaagaagcccaacagtgattgaatgagacaaacaagcccagtcaagttgaggactccgacgaaaaatcattcacccattgcagttgctctacctgcagcaggcggcagacatcattctagaacaaggcagacaaacggatttagtaagctcatcagcacaatgcagacaccttccgcctcttcctctgtttcattgaatgaaaagaatgtggcattggggaggatatcgtatttgaaaaagatctgtgatggtgatgtatggtgggattgagtgggcgatattattgacgagtagaaagagatccgatcaacaggagaagatgacgggacgggatgggtagtatatgcagtagagctcaagatcgtgctaggaatgatagaagatggtatgcctaccggactacggtaaattaaggaatcccaaagctgttgtaagctctctggggctatgataagaatgctagatagacggatagctcccaatttcctagagacaccgatacagtgaatacatgaacaactaaatctagggacagtgtgtgcttgcccgtgacatagcttcattctgcaccagttttgtaaaagctcaggtccttccagtactgtgttacaagcacatttgcatccagcccaacccttatgatctctcccctccgcaatggaccatatagaccgtttagctaggcagctccctagcaagtctgcacccactcattcagatccatatgcttaaccaccgtcgaaaacccctctgcccctttgaactgcgcacaaagggctaccttgtccacgcccgacgtactaacctttccgttttccgggtattcaatatgaaagaccggcttgccctcgtccacgaactgctgaaagacatcgcactcatcatactcagcacactgttcgttcacactccactgcatattcgcaataacccgagggatgatggatcccgcgttcttcaggccaatcgacaacccccgagcatgagcttcggcagcaaagccagttcacaaaatcggcagagtcttcctcagtcagccccaacccgccctgaccgttgttgtacgcgtcgacgttatcgggatctacaccgtcgcagcccttttcgacggcctgatcgagccgcgacgacatgatagctcgcacattctcggagcgcaggtcgatccagttctcacccggccagtcgtccagtccggcgccgagcgaggaggagtcgaatgaggaggcgtcaggccgccagtcttcgtaagtgccggcggagaagtagcagatcactttgatgccttgggagtgtagggaggcgatcgtgggcgaggtgttttcgaagaggtcgatgtcgtaaatcgggaaggctggtgaagcttttttggaggccgtattgggggacagagcagaggagaggatgatttgccaaggggaaccgacttccggttgccagatctcgttgctgctgctgctgcttgtagtagggccggctgcgtccgcgttggcaacagtggtggcctgggtggcggttggcgtaacacttggagtgaaggttggggtgggagcaaaagtatgagtgctggttagggttctggtcctggaatgatggccgtggtcccagtgggcatggcggataggtactgcgttggtcaaggccgccagggcgacaatgaaggtgatcaggatgggcatcttccagagagttagaggagccatgatttagaaagaaccgtttcaaacgatggatgatcctagatcgcttagccattcacctagaacaagattaccgcagacaaccaggagccatcctcacctctgatatacgaaaagagggtaaaaaaaagggataataagcaaaaaagactgcacggcagacacaggagaagagtgttaaggagagacacagaagaagatcaaaaggagtgtaatgcaaagcctgctttgctgaagttgccggctgccagttaggaatcgatgctagagttgagcatccagaccaaggaccagcgcacgttttatatcagcttccagccctacccggcgacaaccctgccaagcagagacgtctctcgaagagaggtgagagcgggcaaatacaacccttggacaattttactccgccaggccaaggcacgttccggtgggccgactggcacgatggcgacatatgtcaagagagccgagtggatcaatcgagatgttcgagtcaggatccaacatgttggtagatgaacgataatgattgggtgcccagagtatgtatatcataaaaatcagagacggcggcttgctccgagggaaattccatcgccccttgacaaggattctgggctgggggcatagcggctctggccactgggcatgctttgctggttatacagacaataacatgaaacggccctggtagtgaccctacataacaacgtaataaaactccgagcaagcgctgagtggcgtcagtggcggatgatgaaacacatcatccttcctttggtctgccaatattaaagcgggaagatcaggcaccatcccacctccagcaaatctggcccatcatatctctatgggcagctagccgtaagcaggcaggtttcattttctttgtactctggtgttctagccctcaaggtgacagtgccaggatgcagggtctgtctcggtaattcatgctagtatattcacctcaggatagattcccccgtcaaatggctcggcatcgttcccctcattttggccggttgttcaacttgagcaatccagtaccagagtccagcgttaagggatccagtgttaaagggctcagtgactcggcagaggagtatacttttaatcaacatttgagggtatgaatcctactactccggagtgatactgtggacactagaagtccacgagataccttgatcatatcgctacattatctggaatagccgaaaaaagagtctagtgcttctagaatggaagcatggcgaaatggctcaaggagcctatactatacgggtattgcgtccctgggctcgtcgctctactcgatgacaggagaaaaaaaaaggcttctctagcgcgataagaattccatctgcaggggctgtcttccctgatacccgatataatgaacctggcccttgccaacgatagtgctgttaatagtgctgtgccgtggcaaagacctcttcaacaatgctcactagcgtggtcgagaaattgagcaggagcttaaggattctaaaatctctttatcatgacagaatccttagcagtgaaggttggaggttgtcaagatcctggttatcctccctgattcttgatgtaaggcatcaccgtatatctggtgtgtctaaatgaacgaggcgatggctaatgagaatcgaccaataaaagcttgtattgatattaaaaggattgcttggagatttttattaaagcgatgccaggaaagcctttgtatagccaccggcgccgcttgctttggccctcaagcaatgccgccgggcccgggccctgtggataacagttgccgttcgaatctctggttgggataagctggcaggacggcgtcggcttcctggtgcctagtacctcttttaccgagagattttgctggatattgcctgacattgacgtgggcccatggcacatgggctgtcaaatatcgtctcagaatgcttttccatgctgtcctggttatagagcccctgtctatttatctggagtatatcagggtgcataataggctagctgggggctattaaaagtgtattcatgctgccagattccaggtctcacatatctcaatactctagaaagaaaatggacctgatatgcatatattttagttattgaagaaccaggcatccattataaatacaaaatgacatttcaagatctccattcaagactaagagcgcaaagcttttggctcgtgagttaaatgtgatttcaaactgaaaaacaggaagaactctcccctctccactccctcccccctcccattgcgggttactgtaggccactatcacacccaattaccaatatcgcgccattgcttcattgcaacttcacctcgcaaagggtccctaacttcggctgtagctttacttcttgcttcgcctctcagctggaattttgcgtcgctgacgatttccgcttccttcaaatgcctgcaatagcgggggcatctacctcctgtgaggcgcttagaacagtccgaatttgtgctagcccaaggctttgtgtttgttggtaagataagagggtggcaatctttacaacctgcttgatctgatggccattcaacggcagctgggacaaccggtcatacaccttgtctgtgatggccgcgtccgcctttgaacgagcaatagattgcctccatatctcttttctagcgggtgcactgagctcgggaaagtgcatggtgaaatgtacgcggcttttcagcgtcttgtcggtggtatctgcttgatcggtggctattatcagaatcccgcggtagtattccagcaacctgagaaaaacggcgaggatcttgttatgctcaaggcgatcagagggccgctcttgcaggagagtatcacatttgtcaataaggagcactgcattccacttctcagccagcatgaatgtacgcctcagcctttcttcagcgctcgacggatcttgttcaaattccccggcactcagaatgtacaagggcttacggagctcctccgcaatagccctggctgtcagtgtcttgccggtgccagagctcccagcaaagagcaagctgatacctagacctttatcttcaatgagatcgtccaaggcgtccttgccgttgctcagtcccgccacaaatgagagcaccagatctctgtaaccaggtggcagcatcaattcagcaaaggcactatcattccacttgatctctgtgatgccgtcaaggtcgaactccagccaccttttcaatttcagtgaaaagcctcggacataaggggagcaaagccgtaagtgctcctccatgatctcctcatttggaccgtgtgggtcgccgcttacaggtgcagataggataggcatactgccattggtgatccgagtcgcagacgcttattacgaaaattgggcatcgttcctctgctcttcccgttgacgcatagtgtactgcctcccttcggattccgtcacgctctcgtgacagtgctgctcatccacggcataaatttggggcgcgtctgtgtccgaattcagaggcatcaatgcggcacggtgttcgtaatccgtttcaaaataagaggccgcatcaatgacaacgcgatcgtcaagcttaggtcaccaacatgagtagacgatctttcaaacctttgatagagtgacttacgttccttacgatctccttccactccacctgataccgaatcaaacccgagaacgccacgtaccgaacgccgcagagatcccggaagcgttcgccacggctagccgcattagcctctacctcttcccttgatgggtgaaatatgaccgggaagacgtcgagttcgactatagatttgtcgccgctgaatcgacgaatctcaaagctttgcatgacatagccaaagcccttgccgtcccagtccacgaaccgggcggtaatcttcagacaaccttcttcgtcgtcatattcacaactgcgtactttgaacaagcgctcatgccccgcaacctgggaaacgacaaggacgtccggctcaaagagtgcccacagcatagagtatgtgataatcttgtggtgtagtaggttgttgatctctgccaccgtaccctcgagtctcgttctgagcacgtctataagcaactgcgtatatgctgcagccgcctgccctctctttttctgtcgtctgagaatctcgcctaaccggttccagcgatgtataaatggatggaagggggcatagaaaacaagcttcttgagagcgggtgaagtgatgcccttgtcctcgaagacttcgcccaatgtctccttcaatgacgggctctggacgacaatagagtgcagcgttaaggcgttactggcaccatctctgtggctcttcgccatacgcacaatcaaggccatccgcttcgtcggaaggtattgctgttgctcattcactgtacgtgaactaccgggatattcggttacccagttcttgcaacatgtgcactttggcggcccttcataaaccgtttgaatcgcacattcagttccaccagtcaggggaagctgattgccgccagtcatctcggttgccggccccttatcctgcgatttccgacctggaagccgtaccggcatggttgatgaggaccgtggagaaccgtgctattgcccgcacactgttttacccagaacgtgtcctgtgttgaataagggttcccggtatagatgctggattgaaagtgtgatgctttgtctgacctgacttcgtaaagaaattcccatgatcacgggctgactgtatcgctattttaggcagtagtgttgtacagcattgctcaggcgaatgggggccattatggcaatgggctagggcttatccaggctacttatgccactgtcagccttgcattcctggccccggggcggaaatgacttactctggtccctgaatttcaagggtcaatggactcattctggtctgcctgagcttcgcatttcatgcgttctttcctgtctaaatgatcaactcgggccatcgttgctaaactttgtttattccaacacagctgctgcactgttcgcccaaccagcgcacaacacgaaatcatctaacaatcttcacgatgaatttctcttctcaatggacttctcaatctcttggtattgacctcgaatattctgcaataaatgcgtcttcgtctattctgtaagcaatctgcctagatcgtgcctggtaacttgagcggaaactgacatcgactactgcatacggtagggttatcttcatcaggctgctttagacggagaatacatgataggaaagcatcaattaccccacttccccgcaatattgttatattgactacctatatcaaaccgcctcacaccagacattacatccaaccctaaccacttattcctgctgctagcagatcaattcttacctgcatatttactctttctaccacatctaagcctcaaagtctctacaataaggctaacacctataacatatatataatagagtcggtatactttcctgcagtaggtagtaatataattgtaaataatcgtttcctatttttacctctatataagagaataaaatttcagtccagctcatgaattggatattgtaaatattcttacctaataataagctgaagttgatggtgttatatacttgcagcaatgatcaacaagtggtttggagattcaaataacagcgccaacgttatcattctaaaattgctcacgacctactgaagactgtagaaggcagctaactcttcgcgaatacgcatgatgggtgtcgttcaggaactagataaacgccgattgattggattgatcgatacacattttgcccttgccaaaagtgcatactccggttgagtagtggcagacttagaagttagtaattcctgaaaggttctatgctgttctaaagagcaaggtgtgctcagagcgagcgtcttttctgaggagaagggattgagaatgtatagccactttaaatactctcttccatggagccctttacgatctgcgggcttttgactggtgcggaccgtgttaatcatgaatgggattcattatcagaggtaaggtacctagtgaaattaatcctggccttggctgccatcagaggaagatacgcccttctcagatctagctccaatcgaacgttaagtaccacttttcaaactaccggggggaaagccagatcaggtgttaatggtgctgttcacagcggctaacattttagccaatacctcgtggtatatttctacaaacattctctgccacccaaccaatatccgtgccgaagcagccggattcctcgagagcagtgctggaggggtttctccaatatttagtccgaacctcccaggacgagcatctcccatacatatcattagcgaatgccggaaataacacaaatctctaagtctatcacaggattagagccagatgtcgcggccggttgtccttattgaactccatgcagcaatcatagacgctagccatatgcaatatgttgggcaaatggataacggttgttatatgatgctcctgaataccccgcggtctaattatgccactatcaatttaagtacatagcaaatggattacagctatcttacagctctgcatctttgatttatatcacttgcgggcgcagagcgggccaaagcccagaccaggcaactcgtgctccgaccatgatgaacttccgacacaggtcgggcagtagaaaaggccttcggggtcatatttgttcttaatggcaagaagcctcttgtagttggcagcaccgtagaagtcttctcgccaccaaggatcgtttatatcggcctgggatagtattagcttaggtattttgagaaagagaagggcggatgtacctcattcatatagctgcccattccgggggtaaagcgacgcattgccgcatacttgttgtaggtgatatctttcttgacactgttcccatacgcctctcccatggactccagccagccacgcgcaacttcgtggacaagatacgttgatctccaggcagggtgtgcgccgctatactctggcttctcgagaaccttgccgccaccgaccataatgacctggttgatggtcgtttcagccggagccccggccagcgtcccaatcaagctgcgcagcgaattgtggttggccgtcaggtgggttttgtcaaacatacgagacgcaagtgccatttcaggcgacccagtctgctggtggactccagacagcgtgcggtagtacgctgcgtaggaggggaactcaaaccagttaatagaaacggccacagagctataggtcgagagtttcttcaggactggcgctagagtagccttggcttcggaaagtgacttgtttcttgcggccaacgcatgttggtatcctgcggacgagttgccgtaagtagtggtcgggtccaagattgaccatgagccgtaaccggagaatccgtaatcatttagtgcaggataggcttcatagaggtccgtgatagcgtccagcagctggcttgtgttctggccggtttgtgacgatagcacaagcgagtgagcaaccattggcgttgacgggtacgccttgatggtgagggaaatgaccactccatacgttccaccgccgccaccacgaatcgcggtgaagaggtctgaatgtgagcacggacttgcggtgactatccttccgttggcaagaatgac

SEQ ID NO: 1483 - DNA, 2304 bp, Emericella nidulans
tatacacctacgatttaggtgacactatagaatactaggatccttccttgttggcctctccctttgcccacttagggagataactatggtgacggcttgcaatactttgccgtgcgcggaggttgcattggatgatcagcgttgtaaaattccatctcagatccatcgcaggactcaaaggagtcggagtggaaaagcggccccagccgcggcgtgtcgactcatgaccaaggcgagctgacgagtgcagcgcaagggcactaaacctcttgacggttgtttacgagcacagccgggaccgggttatgaccgtttgtgaagggtgccagacatgttgcagaagtcgcagccatgaagtgacccacctcttgttggcccttccacccattttgcaggaattttgactcgcccctgaccttctggaattttgttctttctgttcttggtggaaccgagccccgcaattggctttcccggcggttcgccctgtaataatttccgccacctgatttgtgggaagcagcccagcgatgaatctaagagttatgacccaaggtcaattgtccgataggcggctgcttaatgtcgattccatcgtgctatcgttgcacggggtcttgttttttgttttttcctggccgctctggagggtcttggaagctacgcttaggctaaggcgaggttgaagagacgcaagtcttcgttaggggtctcagactgagtagtgtctcctttcgacaatgtctgatcgcgcagttctgttcttactgtatcaggcatttgatattccttttggctgcgcgatccgttgctaaggagtagccaggcacaggatgcctaatacggagtaatccgtcacagttacccaattcgcagttcacgacgcgctccatcgtcggcctatctgtagcttctcccgtgcatgcacatttttattgcacatcagtcatccgcagaaaaggaaatttctggtgctccaacagagtacggcgcagtctcggcaagacggtgtacaaagcatatctgccgcctctccgcggcaccgctgggctcgtcacaggtactccgcagtggcacgtttaatatagatactctaccaatccgatgacgatgtggccgaatcgagcaacaaaaggtttccgtgggaggcgcttgcgcgttccacttggcatgagctggtcttggttgggaaacaacgatgtccacagtgcaaggccaactcggtagagcggcggtcgtcctcgtagccgaatcttccgtcgattgatccttcacccttcaccggtacaaaagcttcgagcggaaagggtgtattgttattcgccccagtgtgcggctggcgccatggagtcaggcgagtaaaaattggtggtacgaagggcgctaacggtggttcccaagtgtccgatcgtgtcgttggctggatttggtatcagatgtgggtagccccgtttatcgaagaatgatcacatcatttggatcgctgtctcggccatttccggttagactagtgactatcccgcatggtttagattaagttgcgaacagactctggaggaaatcgcccgtcaggacgctgacggtacggcgtacggtgtacggtcgggaagaggaagtcgggaggagtgtgagctcacctgtacactgtcgtccctttcgtgagccacgcagtcaatagcacaatgtcgaaaatgcgtctgatcattctccaggcctcagccaagagttaagagtaatcggtagtccttgcgtaacggcgattaacgggatagaaacggtgaacttgtggagactcagccagactcaggaatccttgggttattgaccagggacaagggataagggaggactgcgatggatggagtacgtaatgctgaatggatggcacggaagaaaccttgaccagaacctgcaaagtggaaggatctaggctggtcagatggtgagaggaacactgagcgtggtggtagtgggaattcaaggctgtgggtgggtgggataggaataggaaacctgacaaactttgcctaattaggcatctgtttgattttaaccttagatggattctgatggattctgacatggatccctggctccggcttcatctggactgccgggctttgctggactacaacgttgtctaaattatcacacatccagtccttccttcgctccttccttcccaagttgtgccagcgccttgcttaattcacctgggcactggcagccagggccccgcccagcatgtgcaggccgcccgcgctagtatgacgacggggatccctatagtgagtcgtattatcg

SEQ ID NO: 1484 - DNA, 2329 bp, Emericella nidulans
aggagaaagagacgcgagtatatattggccattgagatgagagggtggtgaggctggagttatggtagcaaggtgagagggagactgatgtagggtgccgtatcaagatggtagtttgcacgagaaggccttgtgctacagacggtgaagcgaacttggggtggaccgggtggctaggtattgatgatttgtctacgaaggctatagggcatgtctctggcaggtttaggcagctcaccattttggctccattgatttcattccagggttgcaagtttcaatgcaataacccaacatcttctttgctgccgtcgggacgcgtgaggccggagaaatgcaaattgttgtttcaaatgtcgtcacatacaaaaatttaggtgccattcgcctcggcctctgcattcgctgccctgtttgcctcccatccacgacccgggatggccaattcccggtgaatcatcacctcgctaggctgccaaactgcgttctttttcatcttcttgcgaagttttgtcatttcccactccgtgagacgcagccacggtaaatcttcgcttcccggcttcgcatcttccggagggggtttaagcagtgccagagcgctgctagtagacatgcccgcagacttgagggaatggggcgcctctccagatggcctcgaacgacgggcctgcttctcctttttggtttgagccacaggttctgatggcgtagtcttagactccgcctcattatccgagtgctccgtgctggcgattggagaatcagggtgcaatcccgcaagatgctctgccgcaaccacagatcgtcgtgttctcgacttcttatagcttctcgcaccatccaaccgcagtgtaattcgtgttgttgtcggcggtgcatcttctttcttgcttgtgcgcggacgcttcgtgtttgtaaggggttgtggaggaggagtgggctcgcgctcggcaggttttggcagcgcttcgagtttctgcctaatagaatctagacggttgaaatggcggtccaccacatcgtataatcgacaggcttcggcgtaagcggactcgcgagcgttgatggcgctgtccagctgcgccgagatatctcggcgcaaagcggtagggtcggggcgcacatcaggagggaggtcggggagctgaccgtatgtcttggtgagatcatggacactttgtgcgctgtccagatagcgcttatctaggccgcgaatgagggtaagagatcggagcaaatcagcagggaggtattcggtgtaatcaataaagtcagtcacggtggcctgggcatccggatcaaatgggccatccaaaatcacgccgcccgtctcgttaaattccgccattccagctagtaggtaaagcgacagggtatatgacggcacgggatgattgtggatgtaggatgtcaacgtggaaggaagcagaggtagtcagggctcagcaggcagcaccatgcgcgacggtgcagccatatgggaaaaagtctcagtggaaaagcatgagccgagagcagaatgagcaaacgtcaaatgaggatgttagaggccaggagaaccagggttgatgggctgttggagaaaggtgagacaacgacgcggagttgctgttagatactgcttagataatcagatgctgacatctggccgtgcacgtgataacggacgactcctgtaacttcttttctgtaaagagtgaccttgacaaagcagcttccaggcaaatatggatgtgacgcagatttgccctcttctcagggcgttcaggacctggtatggctccctaaatcgccacctgtttgcgtgttgcagtctttgtctttgattgacaaatctgtttgttcataatattatatatctgcagctccagtgagggggaattgctcacaacgccattcgagtattagaaataccatcccacgccaagacagtttctgaggtgaatctctaggttaataacagaaacacgcaaagtatgttagctcgagacatgtaaatacgtttgactgcaaccaaccacctttcctgcaacccaacacaattcataacctctcccataccatatcgcattgttacttatttgtgatcttttggcccaaagagcagctcagaatattaagctgatccaggagatacatgcattacaatgggtgcttgtaaaacctggtgactgctatcgggcttagcctcatttctccaggccagggttactaaccttcgttagtgtctcaagttggacgacagccaagtcatacaacacaagcaatgaaagcctacttgctctgattcttctccagtggactcccgttagcatctctcaagcag

SEQ ID NO: 1485 - DNA, 3310 bp, Emericella nidulans
tgtatgtccttgatcgtgtgcatggtcgtgggcatggccatgtaaaatataggagatttgtcgtggacgatggttccgatgctagttttgtttagagaatgtgagtcggaggatatataaagctactatatcattttctggcaatagtgccaagtcaacttttcactacgggcttgagatattgaacatttagtatcttgctaattagggctaaaaacccccacaaaacgtgcatatgttgtctcataccccaacatcccacactcctccaagtaatcaagaaacacctccatcgcagtgcgatcgtgccgcgggccatgccttcgaaatctatcaggatcgagccccggcagaagaatctccgatctgtaggtacacattccctgcttgtaccgctcttctgcagcgtcactctcccacgtgacaatgtagttcattcgccgggccatctgcccctgatattcaacttcgccctccatccatccataggattgaggcaaaaagcctctcagggcctcggggcgatcgtcaggccctcggctctcagagatccaaaataagggaccttcaatcctctccaggcatgtcttgtcttcctgcgatagcgtcgcagggaagtatgctgtccatacttcaaagtgtggagggccagcgcttgaataggcatctatgattctccgatcatccgttttccaaatcaggcttgttgtcactgtccgcccacgcttggcttgtatttgctcaacaaacgccttgaagggcctggaaagctccgagtccagaaagtgatctcgtgtggttctggaggcccattttggagagtgtccagcaaaggggtatatggaatgggaagatcagcttcaactaaccaaataacacgtattccgtatttgctgtaggatgggaatgtccaatgttgatgctgatgcatcctgacctccgagtctgggcaatggcaatttattagtccttctcgctcttcttttccgtgtcttaaacatcgccgggaacgtcaatggatatccattcaaggatcgggcttggaatgagacttggagtttgtgtttcttgtgttgcccccgtagcgctagtactcggaaacagagctggaggctgggactgttttcttgctcggcccgtccttttgggttggacttggactctgcatgtgtccttcacttttgctttgcagagcgcgcagccgagggggtgacggggccatggtggaggagcacttaaggggatgaggtgaagaggttaactgacccctccggtaacgttcagcgttgcgcccctaccaatctggcgagccacatggccaacctttatacatgcttccagtaactccatgtttcgtttctcaacatacactgaagatagtgaattcaaaataggtgcaagtttgtagctctgggcagttaatgctaaagttcaatacttgtggctaaacaccgttcaggaaagcgctgcatagtactgtgatcttatacaatttgccctaaatcagcacatacgaccatagggtgagcctccataacccacaatatcgaccagaggagacctcttcttactaatcaatatccagcacctcgctcgtccaatcatatgatgcaatcacaccgccatagacggatcgcaattaaccatatattaacttaattatctactgatatcgagaacattcttttgaagcctttggaaatgtataaattagctatacagatcatagttagaagatcaagaccttcaatgcagtcgctcattacagatatcaatcacatgatcaaatcgacgctagcatccaactcaatagccaacagaatataatctgagacctgatgatttatctctttttaaaccaaatttgagcttaagcacagtaagcttgatctaataaaggagcagctctctattagtgaggctgtattagctgatcaggcagctaaacctgttcttatactttgctgagcttgatctgattagtgaagatgaggaagataaggaagaaggggggggaagcagatgatgttgctgattctgattcagcttttgattcagatgccgaggcggcctccaagcaagtattacctgcaacccagcctacagtatgggtcgatgagccatctttctttacagcacaaatgtctgctccaccacggataagttcttacactgccgaggggtatcaatttgacggcatagaagaggcggtggtcctgttaggccccggggtgattataacttgcatcggctaagtatcggatgtatatgatgacctttcagtttttgaactctttgttggaccttagattggcgtggaaagcttggaatgggtagttgtagcatgggttcgcgggctcgtagggccattgtagattctgctgtgctgcgattagctgtatacagacttggcaacgcaagatcaacattaatgaagctggtgatggaggtagctaccagcaggttccccaaactctctgtcttccactgatgctttcagactctgagatgcaggagacgggagacagtatatctctcaacatggtgcgagtgtgttgaggaaatttttctggcaatcagcctgttttcacgctgctaggcaccgtcgtttcttcaagtctgggtcgctacggattaagagtctcttcgtctttcagaagtttaatcttgtggagagtttagtccttgctgacttgctctcccgctcttaatggaggagctggcaccttttggaattgtcagccaccagcctctctggagtctacgatacgcgaatgtatcatagtttgagtaattttgtacgaggactcggctcggcacgacgttaaatcaaggttcatattgttctgattttacccaaaaatatcaatcaatacagcccccagtcaaccttctgcttcttgatattaccatcacactgcatggttcccttagcaccaacccgaccatcatcacgtccgaacttctcgatggcatcgttgatgatatcaatgatatcctgagcaccggtcatgaacaaaacattgccgtggatgcctttgcccgtgacgccaaacttgcacgagccgtaggacacaagcgcgcgctgcttctcgagcggcgaggtattccactcgccgtctgtgccttggatgttcttgatgatctgcttgcagtcctcgatcaggggcgatgcttcgcttccctggtcctcaaaagtagactccccgcagtagtccttgccgttggcaatgttgcaggggaagtagtccacgtttctgacggacggtgtgtcgtcggagttggtccaagaccggcgggccttgctctc

SEQ ID NO: 1486 - DNA, 4969 bp, Emericella nidulans
tgatggatcctccgtgaggccgtagtcaagccactaccagagctttgttgttttctgctcgctgcaatgataacgataactacctttcgagtctaccaacgtaaagtatcgacagaactagccctcatccgggcacagtgtcgatcaaccctgtgaagtcacgaaaatctccgtacaccggcatgactcaagctggttggtgcatcacactacggggtaaatgctccgtgaacgggaagtggcatgcgatgcccaacatggagacacgtctgcattctcttgaatgtttcacactaatcaagacatttaagcgagcttcttgagttagtttggtggggatgccatgcgccttcaagttttcggtttgccgggcacctatcgcatatcagccctcgctggcggcggacaagtccatttcagaataatgctgctcgcctgaatataccataggcatacggccgtagcagcggatgcatctttaaaagctcaggcgttctacactgaggtacattcaagggccgagtaaagtacattaataacgcctagtgaataaccgaaggccggggaggagccaagagacacaagctcagaacgaaataaagacagtcaattgctaagcctgcatgaaacctttagtttctataacatcagagagttttgatacacaattcatcagcttggatcgtgcagaaggccttgtagagatatgatagggtgatcaacaacgcgcacccttcattcatccttgctcgatttcttgttccctttcagctttgggacaggctgaccataaacctcaaggtattcgcgctcatatcgcgcccggtcagcattggctttttctaggtatggctgtccccaattgttagttgaatcaatgatgattccgagttcaacccgattcttgggaagtgacttacagccttttctgatgccggcaagtttttccactgaacagcaacatcttgagccatgtccgagactacaagtgcattcttgtcgcgtttctccatgaaaaagtaaatccaggccgatgttggtggtttgaccaatcggtcatcatggataattgagaccctgcgtttgccctgaagctgcgccagccgacgtcgagcattgttggcttccaggatctgcagaggagtgtgagaatccacccatgctttcaaagcagcttcgttagcggctttgttggccgccgcttggtcgacatagcgctatagactgtgagcgaaggtataagaaacacaagggaatcaagtcgacaaacctgtctctcttcgggtgtagctcttcgggcaagctccgttgctctagaaaacgcttccttgggagaggggttgtcagatttgtctacttccgacaacttatccttcatagcattgacccagggcaaggtaggcagtaacttcggcgtttgcaaagcggctgccttaagtttccgcttggtctctttcagctcctcggccttccttcgttgcgcccgagcttctttttgctcctcagtcagaacctttctggtctttcgcacagctggcttctttcctgctttcttcttggtcttcttggtctttgtagtctttgtcgacttagtagacttgctactagcttcctccgaagggccatcgtgtgttgcatagcttcgggctaaagtggtcactgtcgagctagaacagggcaggccgcgcgtgaccgagattggggaacgacgcgcgacaaaggtgatgcatcgaacgcgatgttgcggtgagaagacacgaacagggcgagcaagagagccagtgccagggaaattgcggaggatactcccaccacgtcgaatgagtttgagaggcatcgcgaggttcactgacggtataggatgccgtcagtaatggaagggataaagagtgaggaaggataaagcaatgttgatgtagcggtcaagttgatgagcctggtgctcgtgcgaccagatgaggacttgtcccaggggcctggcgcaggagcgattcttgagtttgagctgaaaccggactaaggtgatcactactactgttgataaggcccagtgtttggactctgccggaaggggttccagcactatcacgtgagattgtgggtcgcatgagtgacttcattcttcagtcacgtgataaatagtggccaagctggtcgggctactggcctaaaaatgggcgactgaaggtcattgagataacccgataactacatcggaaattccaactccaagagcaatattcacaaatttggcattaaatggaacgttaatataggaactgcatcgctcacctagccgcgtcctcgggtgttctttttgagtcccagtaatactcactcatcactcattgctggcctgcaacaatggctcgccatggggatactcgctcaccatcgcctgtaggcagcacatattcatcatcacgacgcagtcgcagagatgatgaccgctatgagcggaagcgagacgatggccggagttaccgcaggtctcgtagtcctgaggttcgtacttgtgctcctgtgctccgactcttttgagtactttcctgacctgcctttctctctagcggcgatatcgtgaacgagaccgtgaccgcgattcataccgaagacgtgaccactctgtagacagacgcgacagtcaccgcgacgaagacaactatagacgacgagaccgctcccgagatcgccgccgctcaagagatagagatcacgaccgcgactatcgccgaaggagccgcagccgtgatagagattaccggagcaggcgagatgactcccgcgatagggtccgaagacggacagacgattctgctgacttgaagcgcaagtctagacgggacgatagccgagatcggaccaggggcgcagagccaaagtctcgcgaggtacgtctcagccaaatcctgtataatggatcactacttatactgaatgtccaggcctcgacacctgcgatccccactcgcactgggcctacggatgacgaaaaaagagctgagcgactggcgaagctcgaagcatggaagcagaagcaagctgctgagaaagaacgaaagcagagagaagctgtagcttctgggggaccaagaaatatcttggaagagattgatagaaagtctggattatccccagccgttagttcaccccagtctcctgccacgcaaggcgttgatgccgccccagctgcatatgctgaaaaattcgatccgaaggccatcgcaaagaatgctgctcagaccccggctgctccttcagtcctggggaatgatgtggctgttccgtcctctgccaaaacttcgaatgcccagacagccagggtgcaagccagcaaagcttcaggcaacgccccctctccaggtatgtttgccccactttcttgagtgtacgcctgatgcttacgcaatgtattagccgtcttgaaagcaaaaggcaatgtaggaagcttcggacttggcaccaagcaagtagcggataatgagaagtccatcgccactaagacgctaggattcggtgaagaggaatcaactcgaagaaagctcgaacgcctgccaacaccgccgctagatgatgcggacgccagtaaaacagcagaaacgaatgcggatgatgacgacgatgttgatatgcaagatggggagaccgaagaggatgctgccgctgctgctcgtgtagccgctgaacggcgagaagaacgtctacagaacgaatctcttactaagacaaccaacggcaacacgacggcgaaagcagaagaagctgataagatggaagtcgacgctcaggaggaagagcttgatccattggacgcattcatgtctgaacttgccgagtctgctccgccgaaaaagaaagctggtgccaagttctccaaggcacaagaacctgaagctatctttggcgatgagcatgatgtgagcatgactgctgtcggtgaaggtgatgcggaagacttccttgccattgccagtaaggctaagaaaaagaaagacattccgactgttgaccacaataaggtggagtatgaaccgttccgacggaagttctataccgaaccctccgacttggctcagatgtctgaagaagaagcggctaatctgcggcttgaacttgatggcatcaaagtccgtgggttggatgttcctaaacctgtacagaaatggtctcagtgcggcctagggatacagacgctggacgtcattgacaagcttggctttgccagtttaacttctattcaagcccaagcgatcccagccattatgtccggtcgtgatgtgattggtgtggccaagacaggatccgggaaaacaatggcgttcttgatacccatgtttcggcatatcaaagaccagcggccgctggaaaatatggaaggcccgataggtttaattatgacgcctacccgagagttggcgacacagattcataaggactgcaaaccattcttgaaagctttgaatctacgagctgtttgtgcttacggaggtgctcccatcaaggatcaaatcgccgaattgaaacgcggagcggaaatcattgtatgcacaccgggacggatgattgatcttttggcagcgaacgctgggcgagttacgaacctgcgccgggtcacttacgttgttttggatgaggctgaccgtatgttcgacatgggatttgagcctcaggtcatgaaaattctgagcaatgtgcgtccagaccgacagactgtgctgttctccgctaccttcccgcgaaacatggaagcgttggctcgcaagactctaaccaagcccatcgaaatcgtcgtgggcggtaggagtgtcgttgcgcctgagattacgcagattgtcgaagtttgtaacgaagagaagaaattcgtccgcctactagaattactaggtaacctgtattctacggacgagaatgaagacgcgcggtcgttgattttcgtcgatcgccaggaagcggccgacactcttctccg

SEQ ID NO: 1487 - DNA, 2978 bp, Emericella nidulans
  unsure (1)..(2978): unsure at all n locations
tctaacgcggaggacaatatgcatgaaccgacagtagattattcctcggaccgattcagatcacatctctcgactgtgacgtcgcgatggtcggccgaggaaaattctggctttgtttctccttcgaacagtaactcgagagccgtatcacaagagctttcattgccgcccgcggcactgacacgccaaaggcttacctcatcctccgtttggatggtgaacgagtcggaggatgacgagtttttggatagtgttgctagtttaccaccgcgtcccaccaaccctggtgttcccaacagtcaatcttcaagctcaaggagcagcagcgtgcggagcaatcagcgtcccggcacaagctctagctttatctcgagcgctcttcctacgtgggccaagttctattatacggtggcagaagacgctgggaactctacactcgccctggtggaggaaagtagtagtcgcccggctccagcgcgacctccgacttccaactcgagttatatccaacggattgccagcgtcgtcacacgagccagaacctccaccaatgagtctcgtggtagtgtcaaccaacaacccatagccgatctccgggacccccgaagccactgggcgaaagactccgaagtttctgtctcaagaaccacatcgactcttcaccgactacgacatagctggtcgccccacctgtttcctgatagacgtgttgttgcgccaaaaacgagcatttggcgtgcgccatctcttgactctcgcacagaaccgatccttgggcggcgaaacatccaagtctggtccttttgcttgggattcatctgtcctcttagtacgcatcacctctccaatgataactcgctccttttctcacctagcattttttaaatttagcatggctcatgncctcctttcttccactgccgagaaaaccggaaatgataatggaggaaaaccaaggacctgaccttgaagcaacactcaagatgcgactctacgaccttgagcggaggcggtatttgaatgctcgatggtggagaaatctcaatcgttggaagaaccctctgggtctagttatttttgctatcgctgtatgtgccaccaccccgtgggggttgaacctaactaatattcctagatcacattggctgttgtaggaacaacagtaggcttttaaggagcccatgtcttccgtatctcttttgccattcatcggcgttcttccggcaggttttttctcgcttcctccacaggcattgcttgttctttttaccgggttttttttattattttttttttcagtccgcagcgcgactgccacattggcggcttggactacccaccttacattccgaaatccgaccttttaccttcacaataatcttcgtcttcaccttcttatcttctcctgactgcttttgcgcttctggtccaaaagaatcctcgacacgactgcacgacgtgatgcacataatgtttatacatattcccttcattcagcccggcgttgttcttgtttctgcttaccctttctccatcacattataccgatggcgggtcatcattcggcgtggagtaaaggctaatcatcctgaccgcgggtgttttttttttttttttttttttttttttttttttgcttccacgacgacagatacggacgcttatactggttggtttcacttttactggctatattacatcagctaggagttcttgcattgtcttcttacattttccatacaccatttctgcctcaatgtataaaacatttgagtattttgggtctggggttgtgatggaagttatagctagatacaattatacattcatttgactaaggcgttgcgtttggtagactcttaatattcttctatgacaatgtgattagacgagtatgagtgattataccgtatagttacctaaaggtaacttcatagctgaccctagatatgcgtcagtttgccctcagaaagttctttaacaaacaatattggtaggggttgatttaacaacataagattgaggtcaaaaattatttctatgctgtcggtggtggcattaatcgtctatctaaaaatactataactcaagatatctcatggtaatccaccagtaggcatcatcttcgaacaaaggaagggttgaacccatcaaacattgagcccatttcctgactgaggaacaacgccagtaaagtaagggtagcacttatcctagcgtacggccaattttgttctcgatggcagccttgagttcttcgcctgtaggcattgtgaccacgctgccctttctgcgtctggactcgatttcagatcggatttcctgcactacatcatcaaattccttgattgcatcgtcaggaagaccaagtgttggttcctgaatgctttctgtgcttggtgatcgcacggccttggggcgatcagcgcgggacttcaatttcttgatgaggaagccctttgctggcgaagagaagaaagcaagagaggcagcaacggcgatgataccgtagtaatagacgcttccccaaacgtggatggaatcggaaaatgataggtaaatgaatggtaggacaacgaaagacatgactgcctgggttacgagccaactaacgacgtcataataacgcttgtaaggtccaggtgtggttccatccgtagacagaaagaagggacgaacataacgccggaagtctaggcagaatgagcaatatggacaaaggggaagatacgcaaggtgttatacttactcttggccacagtttggacgaaggagcctagaacaaatgagaagtaatacccaggataaaagccgtgccagaaggcactagttgtaaatgtagccatgctggcgcggaaccctggtttctttcctttgggagtgacgcgcaagtagacataattccgcagccagtgattggtgttcttattccagtttcccaagtaagcgtgggagttttgggcagtttcgagttccag

SEQ ID NO: 1488 - DNA, 548 bp, Emericella nidulans
gctaggttgatcgatgttgtgcggcgcgatccgatctgtgacacctaggctcacatcgtgtaaccagttcaaccacaaaattcattgtatgcaacgctgagcggagtttatttcttttttagagtctatatcgagctgtcaagactcactatgtgcagtcgctttactatctggctttttccagccggaaatccccgaattatcgtccttaatttcgagatcgagcacctgactggcaaattcgacctgttccatgcgctcaggcacattttcgagcaatagtactcggagtagtaccccgatacccattagccatcgaggccccgacactggtctgccatggctacggcgacgcttgcgcattgaggcccagtcacccctcccagcaaaacctgaacggagattatgaacggcatccatgaaccatggattatgtctcatgcgtgtggcgcttggcattggcaagggggtctttggactcttgggccaattttcatcctttggtctgggtcccactgatcctaagcttgggtctcaactatagtgag

SEQ ID NO: 1489 - DNA, 2583 bp, Emericella nidulans
agagtgtgacgcaccgcatcacctagtgcttgaccatgcagacctgcaccaggtccagatcgatctcttactggccatctactacctcgcctcgggccaggtgaaccggtatgtcccccatcaagtacaatgaagcagcctctaacgtcccaggtcatggcgggtgaacggcagcgccgcacgctcggcgctctgcctgggcctgaatctccgtgcattcagcgagcacatcgatccagtttcgaaggaaacaaggacgcgtatctggtgggccatcttctcccttgagcatctactttctagcatgaccggccgcgtaccttgtctagaccaccgtgccatgtcgctgtatccgcctgtcccgtatgacgaggacgacttcgaccatcctgagctgaagacaatcctcggaatgactgaacagcgtgaaaaacggctccattatacaatatatgctaccaacgaggagctagccaaactcactgcttggctgcgatccatagagccgaacgggtctctcttcttctttcacctcgtcgacctatcgatcattacccatgccgccgtgatggccatctacagcctgcaatcgactcgagagagtcacagcggcctcggccaatccgagatcccgcgctaccagtcgatgctccaatcgtgggtctccaatctgcatccggcgttcgcatttacggataaggacatggagcccagtctctctcgggactcccgcgcacaagttagcctggccttatcctactacagctcccagatcatcctcagtcgcccgtgcctcacgcgcccagacctcaaagaagggacaaatatccgcttcccacgctcgcggttcggaaataacaccgcaggaacgtgcatccactccgccctctcgctcaattccgtccttcccgacgagccaaatcgacgtggatgctgaaaaggcacatggtggtgcatacttcactatatcatgcaagcgctcacggtgttgttgatccagatctccgtcggctttgtcccagacgacgtcggaaagggcagaaagaaaaaaggccacgaggccgaggaaagcaaccaagaccgaagcgaggggattgcacccgaggccgtctggaatgcgtctaagaaggctctccgctggctccatttcatggcggacctggacccgagctggcaccgggctcatgagataagcgaggggtttctaaggcggattgcgaaggcgaaagatctgaatatggactttctaccggggattcgacaggaatcccagatgtctggctttgattacagagggcctgggcatgagatgggcgggggtgggagtgccagaaagcaatcatcgtcatctggtctgttgcatgaggaacccatgaattggggccccgactgtactatgtccgagggagattacggacaagagcatcaacagcatccgtttgtgttggatccaaccctgttctcggtgggtatgtgattttcaagttgagttcagatatggtgatgttttatagtttagtatggatctccttagctttggctaaaaacagctgtattatgagcaaatacccagcttactgtattaaaggagttaattctgcaaataaccaagaaaggagttcttcaatgtagttcaattatcctcggaaatcataaatagtgctagtcagggcattgttcctgctaattcggcatacaggtatggcaccataaaggctaaccagaggcgaaaccggacaatcttcatctagagaaggggcaccccggtaatggttatttagaccttttccctcttctcgcctgcagctgctaccaatgtcatcagcctttctgcaatatcaacggcgaaccctctatcattcacatccctcggatcttgcacaactctgaccttgccttccagtccgaccatgagaacgttcgcaagcgcctcatccgcctgtttatcctcaaagacgcctccagtcgtagaaattttgctcactccacccttaggaatcaccacctccacaagcccagctttaccctcccgtacacacccattcaccttctcaacgatgaatctccctacggcctcgcattcctccctggacgtcctcatgagtgttacactggggttatgcacaaacaatttccttccttgatacttcggcgggaccgtctcgatcgggccgaaattgaccatatctgtcgcgccgacagagatgatagttgggatacccttcttcagactcgtttcgagtcggcggagatcacacgccatttcccctcccgcgatgagatcgcagatctccgttgtcgtcaggtcgagcatcgcgtcgaggtgtccttcctccaccagccgctccatggctttccctccatgccctgttgcgtggaagacatagacctcgacagcgtagttggtttcgaggtgcgaccggatcgtgtcgacacagggcgtcgtcacgccgaacatagtgactcccacacggagtctgctcttttctgactccgctggggtagcggatatgctcgccacaagacgcgccttgtatgcgcttgccatcccgaccatcgccccccccgcgttttgagaacatc

SEQ ID NO: 1490 - DNA, 2191 bp, Emericella nidulans
agcttgtattatgctgacggcttcgtctaggtacagcatatcctgctcgtcaaataggactttgtttattacaaatctcgaagaaacctttgggcgccatccaggaattgttcacaccgaggttgttctgggatagaagcaacgataccggctggcgcgcgtgcctgattcgcaagaggcgagatagatgcctggtgatgatcgacaggatctgttgactattgaatttagtggggcttggcttgtgctgccacgctgtgcaggacagaacgccagaaggatcttcccttttcgtgtttttgtcatgctccaacatggaatccctcaggtcgttgaatgattggcagatcctagagtccaggatcatcgcccgaaaaggatgctggatgacaggcatggctggcgatccgtgcttcaagaatctgggctactgactcagattgtagcctgggttgccacgcgtccggtagggtaaaagtgatccaagactgccgagtcaaggaaaaaagggcattccaacagcttcccgtagaaagaaaaagtacatatgaccgtcgactttctggtcaagtttaagggctcaacttttgaagggtgagacgtgtcttctaaggccctagatcttaccctacggaggctgaaactatataaacccccgccaatgtatggtgaggcacttgaaaagcgactaatggcttttgaaaccaggaacctttaagagacggtcatcgtgaaggaacccaccatcttggagctcccgtcaggattgtttcgcagcagacgcagtgtaaaccaaggagtttttgtccgagctcctggcgctgaacgcaatcacaaatttgggattaatggggaatggctggagtcgggtttggtcacctgaagaccgtcttggcgccggcccgtcgcgctaaccggatccagacaatgtgttgtcatcccgtgaccgcccgcgggactcgaacccaccgagttctccaactcccaacttcccaagatcctgggtctgcgcagtccgatccaccccagatgttaagagtcatgtaaatcagactaggacgagcctacgtccgtcgtcaagtcccgctttaaagcctggctacgaattcgctgactgtttagagtaccaaattacgcgacgctggagcacactgcaggcccaactgcgagtgataactggtccctgcgagacgacgctaatgcaggaactgatgatgctcgatgagagcatctccagaaccccaacttatcacaattacagacttcatcaatcgatcagttgtgcgctcccttgaaactccgagagaaggatctggccgcataaggaggacggacagaggcttcgagaacaaactcggacagcccctggctccctttattgaccatgctgctgccacctctccacgcttctgacgttgacaggcctagcctcgccgtaccgttcttgtcagccgacggccggcatcttcatacttagagtaaggcaagggaagggttcagatttgcaagcgaaccacacgactcgagcgggtcagcaccactcagatggatccgatgataacagaaaaagcaaaccgcgcatctcccaaacaagaaaaagaaacaaaaaaaaagggcaaaacctaaacaagaagaaacaaaggtcgtacggtcaccgccagtggacactgctactgagcgctggaaactggtagggccaagatgccgggtcgggtatcgaattggcccctggactgacgctcagacgaagcaacaactgtttccatcgccatgccgctatgtcgccatattgttattgtacttttttttcctttctctcttaaagaaggaaacccaagtagacgagcagcaggatagtttaatcgtgcagcagcctgtaagcagacggcgtactgtaagacagataccgacgcagtgcgcaccgatcccctcagttccgggcgacgatcatccatccaatggcacttttcccgtcaggctgtctgaatgtttctccttcctccttctcacacacacctcttcctctccttctatcccatccacaccacactcctttccctctttcgttccccttaatttttttttattgataccgctttgatttaaatccattccttaattttttccaatttttttgtctttttctatttctgctgctctgcagtcccgcatcgcatcctacaccagtcac

SEQ ID NO: 1491 - DNA, 4524 bp, Emericella nidulans
gccaggagtccagctggcatgcgcaaagtcgatcagacgaagatcatgtactttcggtccctcctcatcgtcttcttcttcatcgggatcgcccatctgagcggtctgggcgtcaatggttatgtttatggctccattttctccagcgggcaaattggctatatcctggagctcgaggccaccaaaatcatcctcgtcctcatccgcctgatctgaatcttgtggaggtgcttcttttgccttccgttcctcctctagggcaagctccattgcctctgtgtccccttcgtagattattagcacgctcgatgaatacatgcggctctcttcggattcaagaacccgttgcacgcgtctcaacccagccgccagtctgctggctaccaatttggatctatcagttccagcggcttttgcgcctgcgagatatgtttctagcccacttctgacgttctcggcagtgagggaccgaccataccacttgtcgtaacgcttataaccgtccagctcagtcacttcgcctttggcgcccgctgattgttgataccttgtaatataagggtttgttttgctcccctcatcggcctcgccattgacgccggtccaaactttcatccctgcgatacggaacccaagagaagagctcgtcgtctccttggacactgcatccaatttcgctcgctttgcggggatagcatcgtcagcccagagtctcgccccaagcttgacgtctagaacattcggccgcttgaacccagacgcgacattttctagtactatagacaaccctgtatccagctttttcccagcagatgtggacggagtccatgttacgtctgatgctgcttcagacgtactcggagcggttgatgtggacaatcggacagtttcgctggtgaccggagtttctgcgggtgttgagtgatcggagcccgggatgacgatagctccctgctgcgaagcgtgcggcagtgagggcagcagcgggctctttctgatcggcggaacttaacgttccaatgtacgtagggataaattcgcgaaaggtggggtgggcggcggttgattcatagaaagcgatttcttgagcggtacatggttttgcgatgaaggacccggagagcgtacaccgaacaccgtcactgccacgaaaaaaagaaattattgtcaaccttccatagttgtaaatccggggaaagtgacagatcaggcctggatcgagaaaccagtcgatccaggggaatctccatgcttgtcgttcacagggctgagtcacttactgtccagccgcggcatggtcgaaggcgacgaagctgtcattatccagcttttggttttttaaactgtcagacctcgaagaagacggcatcctcgatcgccttgtgcaaagggtcggagagtatccctgtttaatataacaacagcaacgtaaaggtcatgtaaagctcagagtgtgctgccaaacgctcgacggcattccgcagtcgcggcacaatgacactaacagtggtgaagaacagcgctgcaaggtggtaacaaaggaaggaataggtcagaagtcggaaagagactgttcaaaatggactaatgacacaaagagaggaagcgggagaaaaggggaggaattggagagcaaatcaggggagaaagcacaggactgggagaggatttgacaaaaggtccgccagattgcgacgcccgtttgccttgagcgcaaatccgatcagcgcacaattcttgattattgcagctgaaaagtacaacacatcctactctggcttatgaatcagctatctacattcttaccctgcgcaaaactggactggtgcatccttcggcttttgtcactggtcgtaggttacatgtctgggcatgcatttaatatattcaaggcttacctcttagcttcacctcagctctcacccgcttctgaaattctctaataatgtaaccataatatcttgtcagctgcaaaaccgaacgacacgaatattactctgacactcaaagatcgagagcgcattaaaaatagtgtatttcttgctgctactcattgcgtcaccttatcctccctatacggagcgttttagggtacagatcttcacctccgatactcaaccgggaaccagctaagttctgtataaacaagtttagtctatcagatcgattgttttctgtgtaatatctgtagtcaccaatattcaagcttgggcgggaatactgctccgctggataccggttgaccgcgtccatttgaaagtgaatgctgctcaatgatgcacctcaaaatgcctgctggccccattacctttgtctcgatcttatgtttacctttctatttctttcattcttctgccctttaggcttcgagacttactccgctgaccgtattcgtcgaaacacatccctcacactgactagcccttcatggagagaccaacggcagagccagcgaagattgaatagcccactgtcgctgcagaggctcacaaaaagaaaaggaagagccgcaagccaaagagcaagagaggaaaggcacagcattcccttacatccccacacaatgacgcgccgcttacctttatagaacaagccaacgggcttcgaagagtactaagttgatgctcccatgacgatcgaggagtgcaagctcgagaagagcctttatcatatgcaagccctctgctctgataacattggatcccgctgatatctagaaagatctcgacctatcatccagtgagctcaacacagtctcgcccttaacccaatactaacactgctccagccgcatggaagatgcactattgcgcttctacaaaaatcgtcgaattgagtcagaagattagatgttttctctaaatatcttgtctatggaggcattgatgtggcacccaagatgtttgcgggaactgatgaccacggtttaaaggagctggacaatgacgcgatcctcctggcaagagggaaaactgccttcaccaagaccgtaccaacctgcttattgactttcatcttgtggtgaaagggtcttgtaaggcaaacctctggctgtatttttgctgagtgtttactgataattcatgccaggacttcattctttcctttctatttcaatccatataacgaagacatgatcaagctggctaccgttacgattcaaagcttcctgtcttacctcctttaccacgacgtctgcccagaattcaatgagaatatcaatgaggcccggaagtcctgcgacatcgtcaccaagtagctttggaaaaaccagcagattacggccaacggaccgggaaacttcaatacttcctgttctatactcattggtggtttcgaacacgacttgtacgtcgagaacaactagtgggaaaaccccaaggacgacaaggtccagttgaccaaagccatggcgcagaaaatagtgaggtttggattgactgttgccggatccgacgagcttgcgtcttcgtttcaccaaaagttctctacggatactctcactgtttcgaagctagaagatattcacggttttgaagtgacaaaagtgcatttctttgatgacaagggtcggaggttttatcaagataatgtcctgacctgattcctgtcggaatattgctcgggagagcctactacgatccaagtgagccggaatacgatttgtcaccagaagagcgcgaagaatggatgaagaagagacgacagatgccagagctgatgctcttcttggaggaaggcctcttggagcattgttaccccggcatgaagatcattactacgatctgggaaatgaactgcggacttcactacttcgaggagatcaagcgggcttacagctctatctatacgccgctttgcaatgatctcatgcttggttggaagagaccacgcgacctcaccgcaaacaacgaagataaagagattactgtggaggatggatcggcgcaacctgacctggaatgacacggctaggcatgcgccaggtttagcaagcatcagcagtgttcaaaagatcgattgattggtaatatatcactatttccttatgcacccgtacttgatctggcagaagagggagtttacgccttcaagagcaactttactgtcgtcttccggcccttagatcactgtgtgcttcgggaacctgttccaaggatacactttgtggattttacctggggttgccgactcgacactatgacacttattgctagaacctgattctctttagctgatgtagcaacactgggccagcaccttgcacactgggttagtgtttccggttgataaacccgctttttgaaaatacctaagttggggacggacttgattcccaaacaattctccttaacttaatctctcatcccacaaaacaaaacaccctgaattcctacactacttctaatacaacacacttaaagctttctctcaccccattcacactaacatccattaaacaataatcacctcttaccaattactctcttttcctcatctttattccccacttccgtggtcccg

SEQ ID NO: 1492 - DNA, 4187 bp, Emericella nidulans
aattgatgcctcaggcgatttacacatacattgggcttatgttttagggtatcaatacaggggggtcgcgggaggatcttcattctctcacagctattcagaagagtcggcactattcaatgcgcaactccaaatgtcttgatataagttagcagtcgcaacaatcgctcatcccgtaccttcccgccattcatttgtcggctgagtgcgtccgacgccccgaaagatttcttcctgccagccagaccatgatggaggttcaggagatccttcggagcgtacggcctctcgtcgggggagtgagacccattagaacggtgcaagaaacccaaccggttgaggagtatggtaggaatacaccacccctgaatctcgtgacccgtctaacgacctcaagacaacgcttacgttgcgggcgtgaacgtgaaaagcgccgcaaaggtcgtcaagtaggttatctcccagctctgcagaatatttcgacgctgacaagtgtacacatagagttcttgatgcggcctatcctcgcgatgcctctcgacctatgaaccatctccgccgattcgcaaaacacaataatcttcctaaacccctgcacccaattctcttgaaggataacccctcaccacagacaatattcgtccttatctcgccacctcttcccgacgtcgctcatttagaagaactgctcgcaccttaccttcctccgcctacagaccctgacgcgcaatattcggatcctacaggccaggtcaaggtcaaactgcacacgattcgagtgcccacgctcccaccactcagcacggcgcaggcggagaaatggtcgaaggatctgtggcccgtcgtgtataatccggcggctgcgcggctaacggtttccccgcctgcccaggtcctaagccgggctcgcgagttcatccagccggatgcgggccggtatttggcatttgcacgaaaggtcgctgaggaggcagagcagtgtggtcgagggcggggcgtcggcgccgtggttgttgacccggatatcgtttcgaggatcctagatgccgacggcgacatcgagtctcgatggccggaagctattgtcgctgttgccggcgacgcgaggtattcccgtcgtgaagcaggggctccgtcaacagccgaacgacatacaggaccaggaccaaatccagccacggctacatataacgcagacgtagaaggcggcccagacctccacgcacttatgcgagcagcagagataatcgcctacaagcgacgcgccggtgatcggaatgcagaaaacgataaaccgtctctgagccccctggaatcatatttcgtctctcaatcagacctcacagcgccggatccacagcccgagcccaagtccgcctctgaaacaacagatatctccccagttccagagaaataccaaaaaacgggacctcacgactcccaggctgtgcccgcctcgtcagccacagatacgggaccaggcccccgcatacgccctcgctcccagggcggatacctctgtacagacttagatgtgtacctaacccacgagccgtgtctctgttgctgtatgggtcttctcctctctcgattcagggcggtggtatacccccagcgcgggaggatggtcacgggtggtctcgcttctgaacctgtccctgtcgttggacctgtttgcgatgaaaataccgacgtgcgcacgagcggcggagaggtcccgcgagaagatgagaatacccagagccagaagccaagcagactttattacgggctccactggcggaaggagctgaattggcgggcgttagggtttgagtttgttgaggagtctgtggagaagagtgctgtaacgctggctgaagaggggcttgcgttttatgcatgattccggttactctatttccttactctctgtgggcatctgttttcttctactggagcttttcggagtgaggagtaaagtatagggtatgagtgtatatattaccgagcagcatcatatctacatagatcttaagagttaattaagccactagacgaattccaaggaccagtggcgattacgaagactttacgtccctgttactgcggatagtagccaaatattaagagatgaaatgaagaataaaggccagtacttccgacatcaaagcaacatcgtctgcagctgttgtgacaatgcaaggcttaccctttatctttttgctacatactaccgaaagcatcaaaagcaccgggaaattgcagtgtcaaaactcctcattagaaaccatttctatgctcaatatgtatctcataatcctataacatagcaaataccactcatggttttgcctagtacgcaatgctatggatgcatatgcatacgctaaaaaaactgctcccatcttcattcataccatgtcgatcgccccaatgcataatcattaactatcattagagatccaatgcagatgcattacgcattcaacataacatgctagtcgtagtcatcatgactaccgctcccaaatcaacttagttaccgcgaagctcggtggcccgacgggcgagaggcgggatgcggcgcaggatggggctgtgtggggagtctttagcaacggacatgtagagctcgtttagtcgcgcaataaggatatccataatcttgggagcgacctcttggatatcggtatcctgcagaaaattagtaccgcgcaatgaacggggatgggcgggcgcataccctcaaatcaacggtctgaaggactacttctagccatgcaagacgctccatcacatttgtctgcagagaggaggtaaccgcaacaccgaccgacagtgccacaataggagaaaggctattcagatacgaggggttcaagcgaacaaagagacgatcaaaaagatcagcctgctgctcggattgaagccactggtgcgagttagaaacattccgttgcgtacaggataacatgcacaaaccttgacggaaccctcttcatatttcccctcacgcataagctgcgcaatctcggtaatttccctatcttcaggactaatggagccggtaagcggagtaggcgaggtaatgcctaggctctcggagccctgcctagcttcgggtccacgctgcgcgagaacttggttcaagcgcaatacttcgttctgaaatccggtctgggcagccgccatggcagtgacggtgtccgaaagtccccgaaccaaagaagtgagctgatcaatcttgacggcatcagcttggcgctgggcttcaaactgtttcgactgagcctgcattcgcttctccgcatcgtttgcgaccttttcagctgcccggagtgcaacgttcttcagggtaggagcaaggctgtcatgcacagtctttgaaatttgactctcaacctgagtgctcagcttctggctaacagcatctgacacgactttgatcacctccggctgctgcaaagcgcgagtaacggcgccaggcagagattgccgcaattcatgagagataacgccgccagaccgctctgaaagaacggtgtttagttgtttgctcacggctgcagaggtgacatcgcccagtgcagggacaacatcggattgaattgtctgcttaatgatacgcgcgagattcttctccacattgtcagagagcgtgctcgacaccaagcgcaatacctggtcttgcttcgaggcagacgcagcatcccagctgcgtcgctcttcgtcgaagcgggcgtagagtccttctagctcccttccgagactcttgttgaattgggaggtgaccccttcttgtagggcttcaatgtacttattccagtctgtagtcttcagagcctcaccgttcggttgttcaacggttgacgggccctggctggtggcaaccacgggttccttcttgacctctgatgctggcactgcagctttgtttcttctctggtgaggacgcttctccaaaggggattcaactgtttctacacgcccggagaccatctttatagcctgcggttcttttttgtgaaactacccggttaatacctttgtgggggggaagttccactcttccatttctgggccatctcctttagagggctgccctgttttttcagggggttaattgggtggcaacttattctgaaaatcccggtggccatttgtgtgttaaccatctactttgtttcactgtctatatttttttt

SEQ ID NO: 1493 - DNA, 4922 bp, Emericella nidulans
tcatactataacctagcacagagaaaacaatcactgcattccaacactacaccgctggaacagaatccagttcattattgtttactacaccaacgtcgcgctagtgttcaaccccatcaaagaggaaggactgagtcagggataatccgatcccggagatttggtactggtaaatagctaaactttatactcgaagatcacgaactctggaggctaatcctcagccataagcagcgagcttgacctgctagttggactatcgactcactaaccatcactaacatacacacatggggttgaaattcccgtaaacccgcaagaaccagcctccgtatgcggtatagagaaatattggcaatcttatattgtacacgctcatcctcttttgggactgaaatccagtccatttactccctcaaactgcaataaagatatgctgttttccgtttcgagcccctgtcaactgctcggaaatgacaattagttggtacttgctgtgggccggcatatgatttactggatttcagtttcaactcttcgagatcgacggacagttcgaaagtgaacctgaaacgtagacacagacccgcttttgcaaacatgcttgagccccatcttgtaaccttaatgtagtagtagacagcggtcgatgacgcggttattcgtctccgcttgtctccgcgccaacgtcaatgaaattagaataattgctaactttgcgtctcttttgacggtcgctgcgtcggtggccctcgctttcgcgctcaaggtcagtggttgttgactgcgatggagtgatcgggcgaggttcagggccgatttgggaggacctagttctcttacgcgtcggtcccggtgtgtccttgacgggttgtggcgtgagcagggcttgggcattggacgatctcgtcctacgctgagagctggaagcttgatgaggtgagtcaatggagctgtcgcggtcgtttgctcgttgttcatctctcctgttgctcctctctggtatgacattcgtctgagaacttagtttgcccaggccgtcagctccgctaatgaagggagcattgagtgcctccatgggttgagggacatattgtgttgcgtactaaatagtttagcacatgtgaaaatggttcagagaaggaaacctacatggtgttgaattttcgccatgggatgcatgatatcctgcttgatcgttttccggacactctctttatcaggaatgcaatacggtggcagccctcttcgtacgctttccttgggcgtggacccaggcggagaatgaaagattcccttcctctttaggaactcctttagtcgggcaacggccttgtcactgcagtctgtacaatgttagggtgcagtattgcaaacaatatcctgtgtaacttacggattttctcgccgaatgtcatgttagaactaggaattccttcatctgagatcaatgtcaaagcccttcgagctagcactacattgttcaagctctcaaggatcttggtttcgctcggttctagcaagcatcgataacaagcgtgcacgtcggaaactccaaacttatacgcttccacataaccgtagcaaagtcggtgttgtcgtgtatggcagaaactgcacataatctattgggcttagcgcggtctcactagcgagcagttctctgcataccatgtcttcctcttctcctttccagtcacactggcatctaacagctaacgggtcctgaccgttcactttctgtgctttagaagtctcgcgcaattccgcaattttttcttcacgaagaacaaacttctcgatactgcctattgtttcagtatctccgtttcccgtggtgagcaacggcttgacgggctgcgtcgaagttaaatccatatttgaagactgcacttcctgggacttgttgcgtaggttcggttagctgcgggcatgacgatagaatcacagctgttcttacaggcatcatcgactgtagcctttctcgttcaacaacgtcctgcgtcgcctcttgcgaggttccgactttgcgacacacgagttagcaactcatacaaagtataacagagacggcaacaagtataccttcgctttgggaacttggcagtttattctcttcatcctcaattccaatatcctcacctcgggtcaccgcatccgtatattcgatgtgagctggtatctgtggtatagactctgattcctccggctctggtccaatccacttgagagaagtcaccttgaggccaacgctgcgcctgttagtgatggctcgtgacaactgttcaatagtacgtacgtatgccatccgctttccatcctaccacaagcttgagattcttttatccagtgttcggtcagtggatattttatgatatcatctttcgcaccgctaaaaccaggcggctcgtaatcaggagggcagtcatcggtataaaatagatggaccccaagcgcacgtttatctgcttgcgttagcagcagtcaaaacgaagacctgtaagtttgctcactcggaagagtagggagaaaggagctgagggttatcaagcgcctaacaatgctctctagccctgctctggctgtgtaagcagacttcatattagccacatagccacatggctgtatcgataggctttctaggcgtttgctcaagtcccctaacttttcagaatacctgaatgagaaggtatatgactcaagcacattttcgggtgcctctttgtccgcaatgatggtaagttggatcgcctccagcacacttttgctaagtgcgtcaaaaatacccatttcctagatctgtcagtaagctcggcgctcattagtcgaatggcataccaaaacattgaggatcatgtcggccttcggttcggagttgcggataatgatctttaacggctgccctctcttgcctgttccaaatgtgccattggcaatcctgttagggtcactggtgttgaagtcgttatcgatgaactcccgatatgagaacttctgctgccgttgcgccgttttaagatcgcgatcatcgaaacattgcagcggtaaaaactctctaaagattagaagacgttagctctaagggcagcagagcaagatatccagacgaaccgtagataaaacaaagttccgatctacatatagcaactattagtatggggtgcaatccgggggcggagtacttacggatacatggagcatgatcttcaccatctccaggctttgctgctgctgcataacgaggccatcctccggactcacatttgtcagggcacttgccgcagtttgtggttcgactggcggagaggacgcagcagttattttgtctgaaagcaagtcggcgcgagcctgagcatgctgcggccggaccgccgttggtgggccggtaaatttgattctgaccatagcggcagaggaaggcgtgcgaaagctcgctatcgccagactattcccagtctcagcagtaggcaggttacagacctcaatacagcgtcagaagtcaaagtctgagggtggactgacggaagatccggtcacgggagttgaaaatgctgtcgtgtctcgattccgcgaacgcgaccgcagtgaatgatgtctgtttgacttccgcctttcctgatctctggggtacaagcagatctgccatctcctggtatttgattttaccattgattttaagctttatcaaatatcattttttcttaaattttttatcagccacccttactactccaactccccttacttctcactgttaatcccaaccttgcatattctccttgtgtcccgctttgccagggttcagaataaccgttgttcatcttctccatgtggaaattcctgatttatgctcagcttagtgggtactggctggcgttacttgcggacagttgggatcaatctatgtcgttattccagatgtgacatattgatatcggagcaggctcgcgcacttcgttcattatgaagtcaagaaattgggtttccatctattcattgccaacagcacaaattagataaataacgccgcaaatttgacccccatatatcctttatatatatatataagctctgttctgatgatgttatatatagaagccgaccgatgaagttaaataaggcagcctaatccggacgattgaatataccgctagtcgtcctaagcgccgtttgaatggtatgaaatagacgctatatcgattcgacagtgacttcccgttatggtcaagacagtgtacaaaggcatcgctttaagatattaatggtgtccactacggatggctcatcccgaatcaaccggcccgttcttctgggccttccccgcaatttttttttctttccttgaccatctgaccataatcggccatatctcacatggcgtcaggactctatccaacatcatacgcaggtaaactatactatcttcacataaaaatacggtcacagcttccggtcggtttgcctgctacaaaggaggctacagccttcagttttacatcctttccaggctattccccacggtagaagttggagacatggtcattacccccactgcggcacgtgatctagaccacactacggctaccatgtatagctcgagaccacaaagtatggaatgacgtatcatgaggaaaattccgccgccctcgtagcatcttgttcctgagctttcaacaatttattgggtcatcggagatattatggccttgctctgcatgtgctttggtgggataagtacggtgccgagactggtattattgtcagaagccgcgaggcgtttcatattgcggcggcaaactctggactcaacgcaagtctggtatctcgctgagactcttacttcttaataactagcccgtataaagtggaattttcctagttgcgctcttcctgccaatcctatatttttgtaagtgacagag

SEQ ID NO: 1494 - DNA, 2991 bp, Emericella nidulans
gcgccgccaaccagttcgccgatgatcaggccgatgaatgccagtccaccgacaccaatgttcatcccgtacacctgctgaaaaacaacagggtacgcgccgagcagtgcatacataagcccgtacacaaaagagatatacagcgagactaaaagcagaatcggctcggtgatgagcatcttcagcggccgcgtgaagttgttcctcacaagctcgatgaactccacctccacctcatcttgcttcgcatgaatcccccaattatgcgtctgccgccgcaagaccgcggccttgtgcaccagtataacaggcgcatacgtctcgtcgaggaaacaaagcgccagcacaaagcccaggaagaccatgattgccgagatataatggatccagcgccagcctagcgccatggcgatgaaaccgcctacaaagggcgccgcaaaaggcccgatgaacactgccatacagaatacagacatgacgatcccccgctgggccgtggaaaacagatctgcaaagacagcgggcacaacggacacgggacttgccgcgaacagtccagcgaagaaccgcgttagcataaccgtctggatatcttttgctgttccgcctgctatcgtgaatatcccgcatccgaatacccctagacagatcggtaaccgtcggccgaccagctcggacatgggcgcccaggcaatcggaccggcagcgaaaccgaggacgtataaagtcactccgagcgagccgacttccgtcccgacgtggaactcttctgtcacggcagatatacccgctgagaacacggcgctcgtgaaggatgtcgcgaatgtactatacgagaggatgcaaacgaggaatatcctgaccagccattagcgacctagacctgaccaagccccagccatactgaaacatacctcctcattaaaggccagttatacggatgcaaaggatcccctgcgccgtcaaactcgaccacaaagtcctcaggatccggcaggagcggcggatactccttgcccgcgcccatgggcagccatgtctcgcgcggttgaagcccacgcgttgacccaacagtggtcttttgttgcagtcggtgtgtttcgatccgggaaagttcgagagagtcaggttggtcgagggtttcggtgtcgctgttggcactggcactcgtgctagtgggtgaataagatggataggcatcgatatcggtgcttgttgtgtggaagtctttgtcatctatatgcgttgcatggcaatggcgatccatactgatatcagccgtccggttgcggtctggccagatggacaattgcgttggtttgatagccgttattttctctgcgagaaaacaggcgacagcagcctccctatatacccccattgacgacctcccttctagactccaggcccatcctggtgtgcgattgcaaattttctccccgattctctcggcctcccgagtcccatcgtactatcatcggtttttgccgtctcgggggcggaaagcccacagggccacagtatttcaggcgaggacccgtcggcggcgcaggtttcatataatctctagcaaaccaggctccatacttttccgcacgggcacgttgacatcaatgccctaattttaacatctggtgtcaagccacagttgatatctgggaattggccaatgagcatacagtattgtagagcatgctcggttccgctcggagatgtggctggtgagcctcggcactatggcgtacaccgagaaaagccggtgatagccgctggcggttactttcgctcgtctccagttttatacttgtactccagttttttcttatcaagaattgtcaaaatcatcaagctagaatcaatcgtcaggcgtaaactggctggacttgggtatcgggtgtagctcttttgccacatcgtttattaagccgcgaagttcctcgactcgggtcagctctagtagcatagataaaatctgatcagactgaattcttcgggctgtcgtttgtcagtaacaactcctggtgcctgagcttcaaggtcgaagccacaacggccgtcgtccatggtatgcttggtgggtcacactatgggtcaaggtacaatgccatgcttgcgtcaatagtcaagactcaatggctggctagtggcctccgaatcctgggagaaagcagcgatgatttcggctacgtaaagtgtctttaaccggttacgtatgacctagctcctgccgggctgttatatacagtactttctacggagtttcgccactagcctcacgtgcctatggatcatgtattagctactggtactgatactggcgctagtaggctaacgctcgatgctaggagttaggagcgaccagtttaagactgcgtggatgtgcggctgtctcgactagctggctagccctaattctgtatttaggcggtgatgtaatatgaactgatgcatgagctactaggcaaccctacctgccaaaaccgagctgggaacagtcaccgacctaaactgcacgtaaccgcgatttgtaggctcacttttgctttagttttcgttttgggtttggttttgtcatcttcatcgccaaatacgaaataaacgccgcaaccctgttcttcagtcgtgacatctcaaattccaacccttgaccctttccgggtacggtgtcatgaacgagcggacatggacacgaacaatccagcttcaccgcattaaccgcgtatatgctcagcgagaagggtccttcttgcaaagagccggacctgccactgctgcctgatgagtatagagtctgacggaaaccatacatgagtcagagagagaaaggagttacctataaatcccaatcctgaaccttctcactttctgcagatccagctccctcggatgcgcgctcataaacgtgcttgtccgccgacgctgtggcaccaggtccctgaaccggaggactttcctcgtggccgtcatgaggcccttttcattgatgcagcc

SEQ ID NO: 1495 - DNA, 3212 bp, Emericella nidulans
gtatcgatggtagatgcctcgtttaccagcctccgcatccacgtcaaagtactgcagattattgtaaaagtcaaccgaacccgcacagagatatcgaccgagtagtgtcgcgtgagttgtaaaaatagttgttaggtccatatgccttttcttggtcaaaggaagagcgacacccgcgagccactcgtggaagtgagcaacaactgcacgacggcgctcgtgagcaatatactgctccaggttagtagttggagccaattagttgcaaagagtatgtacctcgcccaagaaccatgccaccaaatatccaaaaacaatcgcctcattcgtctcatgatccgaagcaggggaaggaataccggcagtattccacagatcacccttccattcgtccaagtatttgtatccggtgccggtgtctatgagaagcacacgcggcgcaccctcaatgagccagcgaccgtagaccatttcaatgccgcgctccttcatcgactgcatcgtctctttcatcgcaggactagacggtgtgagctcctcgacctccacagctgcagaattgcggttcaaaggcccgatcagagtgtagcgctcgccatactcggcggtagtgacgggggctttggacttaagcaccgagtagataccgccaacgcgattggcaacttcagtcgcgatctcgaagagcatatggttgcggacatcgcgccttggagggtcttggtcatcagccatggtgacggtatttctgaagctgcaacgatgaagctgcgcagcggcaatgtggccaggatactgaaagaagagaggaaaatgaaggggatgtcaatgtgagaagttcccttcgtgaaaaaggagcacacaggcaggttcaggagtgcgctgccttggccaggcgtgtgggggaaatcgaaactgggtggcggggaaactgagcttgtagctgggtctagacgggaggaacctggccctggacaagaatcttgctttggggcgaaaagtaagccagaaaaaaatagaaacgtttctctcgatcactgagaaacactctgctaagatcaaaaattgagagaagaaatgagaagaagaaaacggggagctggctttatccggcagaggcggttgcacggactccagaccctggctgtggaaggctcagtgacgataccttggagggaatagcacagcaacccctcctcgagctggccaatagttaatggttagatcacccgaccagttgaccatcaacctacatacatgaatgcaatggattgagtgcttgtagcgctttcttcgaggcggcgctgcgatgcacctaaggacgatggccttgctccgtaccgttggatctgagcacatacctacggttacggttgggacgcggcatagagaggacttcaaatgtctacaaagctggttaccggttccacagcggcagaaatacggaaatctaaaccatactctcatagagagtttctcgtgtcgaattgagttcctgtgacctttcatgacgccctccacgatgtctggggaagctctatagccgtgacgtcatgtctccagtcccacctgtcaagtaaaaccaatcagtacacgctccttcacaccacaccattgaagatcactactgctgaggatcattactgggaaactggcaactgggattactgtcttcaagcgtccagataccaagcttgaaaacgcccggcgatggatagtgcaagccaggcaggccaattggaaaatcaccctgccacttgcttcgtacttcgatattatgcagccagatatgcatagccacagactttgcgaactgcgcgcaatccagcatgggtaatagtataaagcaatgagcgcatgatgaagtctggtggagttcatatacatctcttacattctacgcctgactccgaaaacgaaatcaacttgggagcgggcagcaagctagtgctgcttctcgcgcaaactcatattactatgcgtactcggggttctcacgagccccggcctaccagtgctgctaccaggactagctagtgagttctgccaacttgggcgattgctcatgcctggatataggaaatctggagatagcaaagccggcgacagtcgcggattatccaggtccgagatctcaacatcgctatcatcactctccgtatcacttgcaatgtgtaagccaacctcgcgtccctcgttcccgtagtagtcctcccagttgtcttcctcgtcctcgccccggtgaccgggatacaagtagcgataccggcgcagccggacacatcgacagctccggagacaaattgcccaacagcgacggccgaagaagtagatgcaggcaccgagtccgattgccgcgcagcaaatcgcgaagaagatgacttcgaaatgatctgtttcggcatcgctagattgcggaggtggattgtttgagtggactattgtcgcattgaaggggaggacagccgacgtgccgatgatttggccctccttgtccagtgcgcgaacgcggaggtacggttgttttgtatggaacggtatgtggatgatggtttcaaacccactttttgggactttagtgatggccgagaagtaataatctgtcttgccagagctcggatgatcgtcgggctcggattcgtccggcttggtattgtgaatgggaagtgcgactcgtgcaccctcaaggacccagctcctgacctccgtcgcaccattccagctaacagctgcctcgtgcccgttgatctcaaaggccggtgtcgtgtccggtttgcctatccagggatgtttcctaacgcgatacgaggccgggcttccggtgccaaagctagatatggagccgaactgggtgtggcacatggggacacccatcttgctgaactcggtccacgctgcgccattgcggccgtaagaaacgaggacgtgtccgttatccagaacctggacagagccatctgattgaggttgcgattctggagtgaccccagcgtgtccgaatgcgcgaaactcgctgcgcagcgaaacgttcctgttcgactggtccacgtcgatgatgaggcctcgattgactttgtctccgggagtcgtattatctaaaagcgtcactgctttgtcgtcgtggaagtgcgcatcgtgtggccaggcgaatgtcgaggcccttcccgaggacaaatcgtcaaaatcggtgtgattcccgccgagtcgccagc

SEQ ID NO: 1496 - DNA, 4392 bp, Emericella nidulans
cagatacacaaagaatattgaggaatattcgcaatacaagtatagggtgtgacgacaaggtgaggaggagcgtgaagaagacagagaagacctcctagaagcagggcacgtaagagagaataactagcattagtgaaaagatagaagtgagagagcagggagagaaacgatatgtgtagtagcgaaggttaacgagggatatgaataaaaccactcggagagagagaacgctagtacgcagatggcgattacggagtgtcaaaggaaatcacaggagggcaataagaaaccgtcgtcaggacaggaacacgagactatggttgagaacagaggcttgtaatgattggaggaggccgcgacagaatgaacatgcgataaagagaaaaagacgggggtgtcaacaggaatggttgaggggctgcatagataccggatcccctcttgcaaaagatcagaatagtgagacgcgacctggaagaacaaaaagaacccctagaacaacaatgagccaaacaaacaaggttataaggatatataagaggggaggatgcctcaccctgcccatacttaccaacgtctcatcgaaatttccgaatcggaagaaagagagtttattaatcgggagatcggtgaacgaagaactcgcctcggagcacgtatcgaccaagttactctggaggtaaagcgagatgcctacaggcggagcgaactagaagagttatatcggggaatcgtcaattggtcgcacgatgaccaaattcgacgcacatacgaagagaaactactacagagggcatatgatgttcttactgttcttcccgcgaatgagaagcatgcaaagagagaagaggtgctacaggctgctcgagatatggttattatcaagcatccgtttgaacttgcttggaagatcgtactggaatggcaagacgtcgagaatttctcccaatgggaccggccctttcttgaagatttcatcgagttcttccctggagatgatcttaccaaggtcctcaaaggatttttggcgagcgacctctctccgttccccaaagagccggccaagcggaatgaagaagctgagaaatccgaaaatggaaatggagaagaggtggctgcacaggatcgcctcctcatgatggtggaagggttcgaaatgtcttccgcatcaatcgttgcccacagaatcatggcggagctttattcgtctctcgaggagtacgaaagtgttgtcgatgtatgccgtaagggacttcaaaatgtggatgaccttgtcagaaggacgggtatcagtcttcaaaacacttccgactctctaaacatagcactggcaaactccctcatttaccaccagtccccacgaaatcatcctgaagctcagaggatcttccaggatatactacaaaggcatccaacttccaccagctgtcttctcggcatcggtctcatcctcaaggtcgatgaagattacccggaagcggtcaatttcttggaacgtgctttggagcgggaccattcaaacctcaaagttcgtggcgaattgtcatggtgtagagcactaaatggagatctttcttccggcctttcaggactccaggacgttctcgaagagctgcaagcttcggaaaaagaaaatcgagttttcaagggcgagattctctatcgcatcggatactgccagtgggagattgatccatcacctgctgcccggaaaaatcgggctggtgcgtatgccagttttctcgcttccgttcaagccaatataagctttgcgccggcttatactagcttgggcctctactatgcagattataagaaggacaaagttcgggcgcggaggtgcttccacaaggccttcgaactatccccgtctgagattgtcgcagctgataggttagcgaggacctttgcagatcaaaaggaatgggatcttgttgaagctgtctcgcaacgtgttgttgactctggcaaggcgaaacctgcgcccggctcgaaaagaaaaggctacagttggccatacgctgctctcggtacagtccagattaacaagcaacagtatcctaagagtattgtttcatttcaagcggctcttcgaatctctcctgatgattatcattcgtgggttggtctgggtgaaagttaccacaattccggcagatacatcgccgctacaaaggcattctatcacgcccagcagttagaacccacgctctcgaacaccgaaaaagggcaaatctggttcgctcggtacatgcttgcgaacgtgaagcgggaacttggtgaatatgacgatgccatcgcgagatacgaggaggtgctcaaaatccgtccgaatgagctgggtgttacgatagcattacttcagacgcttacagaaaattcctggaagtgcctcgagtctgggctcttcaatgactgtgccgagcttgccagaaaggcaatcattgtggccaagtcgctagccactgaaagagccgacattttcaacctatggaagggcgtaggcgatgcgtgcgcgatactctcatatgtcaagtcaaaagcagccaaactaccgatgaaggaagtccggggtctactttccactcagctcgaagcttccgctctgtgcatcctcacagacgtcgatgatgttggagaaaatcacttgacggctttggacgatgggaaagatattcttacactggcgaacgactgcatgtatgcctctattctggcatacaaacgtgccatccatgtctcgctgcaagacactcatgcccaggctgtgtcctggtacaatcttggctgggcagaataccgagcgtccaggtgcatcaagcttgttggtgagaaaaagaagcagtcgcgcaggcttctaaaggcagcaatgcggtgcttcaagagagccattgagctcgaggctgggaattctgagttctggaatgctcttggagtagtgaccacaagcatgagtccgagagttgcgcagcacgcattcgtccgaagcttgcacttgaatgaccgaagcgcacaggtttggacgaacttgggaacactttacctcatccataatgacatccaactatccaacgaggcatttactcgcgcacaatcgaccgatcctgattattcccaggcgtgggttggtcagggtttcctcgctctactgtttggtgaaccacgggaggctagggggctgtttgagcatgctttcgacatctctcggtcatcatcaagattgcccaagcagcagtatacactaacgctgtttgatcatctcgttgcagacgcttcagtgtcaaacgaagtttcccaattgatccaaccgctcttcacactctatcagctgaccagccaagatccctccgacctaccctttgtccatctcttctcccttctagccgagaggataggggaattctcagacgccgagtcgaacttacgcaacctcagtttgcatgtcgaggcaccatatgaagtgtctgaatcggcgacatcacataccagatacgcacaagcaaatgcggacattgcccgtgtgctcttggctcgccaggaatacgaagaggctgcagagaaggcagaaacagcactgatgttgtcgtcagaggaggactccgaaaagttcgagcctgaaatgtacaaaaacttgcgcttgtccgcgcatctgacagccggtcttgcgcattactatatgagagccatggacaatgcaatcgacatgttccgcgatgcacttcaagaagcggataactcgccagacgtcgtttgtctgctcgcacaggtcctgtgggcaaagggcggcgaagaggaaaggaccgttgctcgacagcagctgtttgaatgcgttgagagctacccagatcatgttggagcggttacacttttgggggcgatcgcgcttcttgacgacgacagagacgtcatcgaggccgttgagtccgatctccacaacatgatcaccagagacgatatcgagattcatcagagagcgaggttaatcaagctcttgactgcaatctccgcgtgcgttgctggtgattcagatgtcccaagtgagacgagacgtatcggagaggccgctgcggcggtaatgagagcgccttacgaccctcaaggctggctggaactatcctcggctgcacaagaatcacaccctgctgaaatgggcgtcaagaccgctctgcagagtgttcctcctcgaagtaatcttgacgctagcgacttgtcaaaggcatattcacagaccggaaaggctagcgatgcactgcgggcgatcatggttgcgccatggatgcaaggcggttggcaggaactgagccatatagtctcagctacctagtcaaaattgtaggtatatagaaataataaccattagaaataaaaccacatccgggagactcacattta

SEQ ID NO: 1497 - DNA, 2308 bp, Emericella nidulans
gaggaaacaccttgacatgatccacactctagctgactgatgaccaatccatattttaaagtatgatggtgtaatgcaatataattattgttaggcccccaaggcgagccactctgatcccacaggtcttgggtcagtctccgcagccgcttctgtacataagccaacttcaggagaggcaaataatgggtggtgaggatgctatttcaagatataattatctattttagattgtgtctatttaattattatcctagtatttagccaaacaattactactactactactactactactactactactactactactactactactactactactactactactactactactactactaattattgttgatttacaaatcttttcataatttttgtactagatgagcgccggaacaagacatgcaattcaaaagtacttgagaatattgattacttcttttcttcccctatcgctatgttaacaaagactctgattgaaagaagtatatataaagcaactaggtgaacgaatgtatgtattcatgtagagtgatcatgttccggaataaaagtcaaaatatagtccatggcatacatatactcgataggtactgatgacctatacagagcgctatatcaggttgtcccagtcggccgacttctcatcgcatacacagtgtataggtcgagcgtcacaacaattccatatcagatataaacacccagaacatcagctaggggttagcaataagtgtacctagggatcccagagcctcgtcttggtaagctggttcgcaacatccgacgtcgccaggtcaaagaagtcgttcatgataacaagaagatgatcatcaccaagccgagccttcacatgtgcatacagccaatccagcgtcaagggatcagttttggccttctgcgctaaaagaacccgattatggaacgtgattgccgctgccagaccataggtattcgagctcatggtagtttgacactgcaaataagtcatgggtgttcccttttgtttctcagccgacatctcgctgagttcagtgataattccagagctgtcagcgacggcatgccgcttcgtatcgaagttgtcgtaagggttgtaaccatcgttcttaaaagacaagataaagcgcttgttttcctggcgcaatgtgtcgactgggcgatccaaatccgcgaacgtgcctcgttccagcgtcacacctttagttttggcatcattaaagcagtcctggagcattttcaacacggtttcgggctcggggttggcttcgctccattggttccaggtaaaccagaccacgatgatctcggtccgctgcgcgcacaggaagttgacggcgtcctggaaaaaggtgaggattggctgacctggaagcatgccgtggtgaaaatacaagtcattgaggccggtcaagctgcgcaattgcgggttgagtcgggatgctcgcacttcaaagaaccgagcccccattgccaactgatctgggacgttgtctttctggttgcgcgacgtcgcctccataatgcccagtgcctttgacgcggcaatcgggcccaaatgtcctatgaagcccaggggaccaaggagagggagcaggacctcagtgacaagggctgcaggccctagtttactcgctattaccgcacaattgtccatagtattgaagccgaagttatgggcagcgggtagaacaaagcgatggaacggcttttgcgcagtcggtgatccaggtggcattaccacggccatccacgctgaccgatctggagcgacagtaacatagcactgatgggcgctcggcaggtcgtcagtgtgatagttgcctgcgtcataaaaggtatactggataatgaggccatcggcaatggtaatcttctgctcgccagggaccttgcccatatcgccatcgccgagattgccagtgtacgcattgatgtcctgccaacgagagactagggtcttgccattgcgcacaactcggaattcaaacttctcagccgttccgcctttgactttcatatccgtgctgctccaggggttgacggtggtgctggttggcgtcacatcatcgccgagaaacaaattgattccgtatccccaatcaccccacttgtccctcatgtggaatcgacggacatcattcttgtactggaagataacgtccacttcggtatggttaatccacacaccgcaatggattcccttctcgtcccagcccatgttgcttccggagatggcttatagaatgcagatagaatcacaggattgaacgtagaggatataagtaga

SEQ ID NO: 1498 - DNA, 1753 bp, Emericella nidulans
ttggctggctggagctgagagcgccagtaactgtaagaaggtagaatatctgtcttcctatctagtatttctgttacggttcgaggagggtcgatctttaggaatatttatgtatttcacgagcgactgagtcaacaccatcgagtgaatcaccacccgctcatcccttctaataggccaaatactagagccttcatcaaccaaacaattgcatttctatctaagattaatcttctgccgtctcttgataggaaaaggggtcactagtccctcagaaacggcaatcggatagccatcgcatatcaaagggagaaaccttataaagtcctcttccagcagcagctccttcgaagaagcgtagattttggactacgggccgaaaacacattgtaagcaacttttgtaattgaaatagcgataataattcattattgggggttaagaaccagcccatataacgtatcccgtaagcgagccgccactgtaagcgagccgccacctcacactcttctatctaaacatcatggccctcattgaaagcacttactacccgtcccccgacactccaatcaatcagctcgggatcaagccagatttttcccgcgagccgcgtggcatggtagtaggattataatgcggtaagtttcgccggagagtcctgagatcttcgacttcatcatcaacctatcatgcctgtggcggggacggtagaggagagccgtgcatcctatttgaagaatacctcatggacaacaaggaagttctaggaatttaggatacactgatgaaagtgaaatcactgtccccggccgtaaggcctacctacgtttactgttgtcgaagccctctaatatattctgactctgctgtgaacgatttagtcctctacaccacgtatctcaatatcggcgtcgatggcctgcaagccctcaaacactacaactttcaaagcaagacgtgaggcaaggtacatcatcaggtaataaagacttgatctttcccctctgctcctcgaaacagaattcctactactcatcaaggctcacttctctatcctcaaacatctcctgcaaagcggctccggcattgtccatgccactcatgaaccctcgacctgcaccctcaccgtacacgttgaccgcaccaaatttcagtcccatggaaagccagcgctagcggactatctctgccgccttcacatctggcgctgcacagctgacgtttctacctgcaaggagtattatgaacgtctatatgtggtcgacggcatatacgaggagtggagacaaattgtatgtcccaacccgaaaccgaggtgaaaattcgtgcagccgaatacagtagttagagaagataatgtggaggtgaaactgtacgaggcggctaatgagggacttataaagtcgtggatgtaaaggggtgtttaagtgacgaaatagagtaggcagaggtctcatttctggaaataagcttgggaatcagcaatcgaacaagacgtcgacggaactcctctatcattggctgcagcacaggggagtgagagagctgttaagctgcttttagtgacttaaaaagtggattggagttcgaagacttcgcatctggtcgaattcctttatcataggtttccttgaggcagttgttcaactgcttcttggactagataggtggatgtggagtctaaagactttgtgtttaatggaaatcccttattgtcggctgctaaactatggacttggggtggttgtctagt

SEQ ID NO: 1499 - DNA, 2410 bp, Emericella nidulans
gccaaaaaaactcctaggtttcccgaattattaacccggtcagagtctggaaaatttagtcaagaaagtttagaaaactttttggcccgggttatttcaaaaaccacgcccgaatttaaaaaaaccataaagttgggtgttggaaattgcccgtttggcaaggttcctgatatccaaacaaagccaagggagggtattgggccaatacctttccaggttggggtttgttgtttattcctagataaaattctataacccgccgtccctagttgcgggcactaggggcaagagcctcacggaggtccaggctttgcttcctgggtctgtttctaagtggtgtttgcaaacatctcagattcctgttatagtggcgcgtcctccgacgaagagggagaaaaagaagaaaaaacgacttgccgatcccaccaggcgcagctacaatcacattttggaaatgagcgaacaacggggaagccatatattctctgccccgtcgagccgaaatagcagcgtttcgaagttgccagatgaagaagctgcagtagcagcagctctcggtctccctcaggcttatactacttcacgctcttcactttctacgtctgagagaagcagcgtcagccatgatggaccacttacaccggtgcctgattctctcgaagccattaacaacacactcgcgtcagatctctccatagcatctgacgatacgaaaagcaacggaaatatcaataagtcgccgaacgagatatcatcccctgctagtgataccccgtcgccggtggaggggtcaaacaattccacaccagaacccaccaattcagaggtcaacatcccagttatagtgacggacggtgtcacaagtgacactaagactaagcgaaggtcggtctagtcgcgattttatggcacgttgcctacggactcttactgtcccaccttaactgttccctgcaactccggtcattctcttaccaagcacaaatacatcaaacagctgccgtttatttgaggcgctcatgcaatttggacttatcatcatattatagcataagattaactacatacagttagatacctaaagcaagcatggagttgttctatgcattgttcaggcagatacaaatatgccgacttttttttttttccttcatattccctctgggtcgcaccatctagtaaggcattttcgagcataattagattatcaacaagcacatgtctgttttccgtccgcatatagcacaggtctgtaatacgacttgtgaggtgaagcacttcactgccaagctgaacagcccagcaagccggttaaattacgtgcaaatttccagaccaggtaataccagaaaccagctgaacattttcgttaaatacaagctggctgatcaggccatatacaacagagcagtgtaatggacaggtcgttcgtttgttgagaacctagttaagacctgaagaaatagaaaggaaacaatgaccctaataactttttctacgcagaagattttgtctaaaaacatggagatcagaagaaaactagaggagaaaaaagacatcgccaagcttttcgcacttgaacttgatgaatgcaatacacaagacatgacatgcaggaacgacgacggcgaaagaaacaaaaacaacctagtatgaacatcctagttgagtcatcaatccacattgagggattgtcgtgcgcaattaagatatacctttgccctgaggtatcttttttttagcacgacacgacgcgagatggaacagatatcgacactgaaggggaagggtaaaaacaactgtcagagctcgccgggtattgaatagaagacgacaaaaacaataatttgcgagagccagatacagagacataaacgagacatgaatatggcattgaatggcacaaggcatcaatagaaaacacaagacgaaagcagatttagattgaatggtcttttcctacctacctcgctggacaatgcctggaatgcacttttacccatgcccaccctttaggtacaggcctcttgctcgccatgctttttgctctctcgtgtatccacatctccaaatcgtaacaacagaacgcaagaaattgtacaatcgaaatgtagatagaaactgggaagaattgacccctctctataataccatgccgaacaaagaaggaaatgagcgatcgagaccgacctttctcgcgtctgtgacgtcgtaatcgtgcgtgggcgaagaagattaggtgggttaagtaagttcaaatgacaagacgaccatgtcggctgagtgtctcaaaaaagaaaatagagaaataatgggatggaagagaataaaatagggtctttccagaacagaagaacggaatcattttcattatcattgccaaagaacaaacgatctatgatgctttttc

SEQ ID NO: 1500 - DNA, 5783 bp, Emericella nidulans
cacaagcgatgccgttgtataaacccaatgctcatgtttatgctcggggcttcctccttaggatacttcgacaccaaaacgctcggctttctgttgaggatcagattgcatagcgttctgttaagccacagaaagccactaatgtagacgcatacccagagggtcggaaccatgcagataacaaggaccggtactgacagaaggaacagtatctggaccaagctcagaacggcttggaacactacgttggcaatattggtcaacgaggggtaaagctcgtccaattcattagaatgctgatgtttcaaaggcagaagcacccatgggatggaccaggatgtgcggacaacaaggagaatgtcttcccacatgagactccatggcgatgccgtgtaaggcagcggcttatctgatgtggattgcgaatggaagatcgttgcaaccatggccgacagagcagattgacgagactcacgtagtaatgttagaatcgaagcgaaatggggaagaaagaggctgaagtgggttgaaatgggcagagatgaggtggtactggaaaaggaacaagttgagtatgcgcgtgatgcgatcatccagaaggtacctagacatgtcattctgttcaaccaccggcaacagcgccttccatctcgatcattccagcctttctttcaccacaactcccatgcagtgcctcactccccagcttttgtgaaacacaacggtggaccttagggactcatgaaaggatagccctaggtcatcacggtatacctctttgagccagctctgccacccagcgctaactaatgcacacaaagaatcagatacaatgagcttttcaccctcaaacgactgttctaagcgaccaaacagttgcttgcaactaaaacgatgggatcaaacaagtataagcggtgtccgccgcatattcgcgcaataacacccatctttcgtccctttcgattcagcttcaaacccagaaatactactacaaacacgaatggaatcacttccaccttgatatatcctctgggaagtcttctaatatgcctaagcggagaacaaagaccgcttccacagtccaggactaccccctgaaactgccaaatctcagccgcgctgatctacaagcactaatcgaagtcctggccatagaacctccgcaacctagccatcctctttatggagaaaacgtcaagcaacagattcaggaagctgtcaacaaacttcgtccggcgcttcgcaagaggcttctaatattctcgccgtctaccccggctcccgccgcaaccttatgcatttcccacaagcgcttgaaccagtatataatcaatcacatcttcaggctgatccagcgggaagtggaagaccacctagataatatcacccaacggtatcctgggtacccagacagcctcgaatctcatgttctcaacatagtgcgcaatctacaatcgcttcgaggattgtggtgggatcatgcttcaagccgtagctcccctattgatcctgtcccattccagcaaaacaaatgcgaagcttgtataatctccagaatcatcgtgaggccaggagctctgcaagatctccgcacagccctcctaagccgaacacgagagcggtgttcatatagacttcctccgaagctcacccgctttgttgacggagcgctgtattaccgccagggcaaatcgctgttatccctcatccaatacagtacgaagctctcgtcggacttaaagcaagctcgaaagaatgcggcccgtcgcactacgcgtcaacactcacggaggtgcgacggctcgaagtgtgagcctcgtctgccgtcaaggatcgtgactgaccatcagcttatcagtaaaccaactgaagaaccgtctggatcagcgctgactagcttaagccctaacttcgaatcgggcggcagagaaagtccccaaacaatcaagctctggcttgtccccaagacagtatcaccttttgaactggagaagaaactaaaagaagaccagaaggtcaaagaccagcgcaaaatacaagacctactgatccaggagattctcagtgcctatggtcctttcagaacgagcatggaagtagcggcttccttgaacctggacagtcgggatatctcagacgctaccgccactcaaggatatgacatcaactccacgaactacgcccctcgcaaatcctcttcagatttgtccgattgggagaacgacctgggtgacaagtctatcactatcgattcgggtagtccggttgttgatcagctgataacgcaaattgggagtcttcttctcgaagatgcgggtccagatgatcttcagtctgacctatcgccaaggtctaagtcacaaatgatgacagtgagtgactattcggaagggggaataaaatggagcagttggcacgattctaacgaggagagtgacacagaagcggctgctgagccgacaaaaagcttcaagacaacggctcagggtgtgattatgacggaatagtaagcaacaccgaggcaaagccaggtagcagttatcgataatgaatgtctatgagaagtctggcagcctccgaaatgactggacaaggaataacatgcagactagaaggtattttccattgagatttacgtggatcggttaggcatgcatatgaaaatggactatgttacaatatggacttggaagagcaagttattctgcagaattatggaaatagttgaatcgtggatcgcatattaacttcctcccaatttccactaattataagtaatccacaaaaaaatattcacctagacatcattgtacagagcatacacttgaggcagccataacgcccgattattaatacatagtattcggtgcaaaccagaaaaggagacacccactgtgcctcggagacgacctgcagctccaattaatgcaacggtgggtcgaaagaaatgaagagacaaagaaatgagtggacatggtgcagacttcggagtactcgggccgaatgtaggacacggctgagtctataagacactgctgggcacaccatggttaacccccttcagcgagtcaacagacggagagaagctggcggtcttcttgcgcaagcgagtccttgcgtctctgtccgaaggttcctcgggggacacaacggcagcttccccgttaggttgcgcgaaatcagatgaactattctccatatccgagtcttgttgcattcctccctcgctaagctttttttcagcggcctctcgagaccgctcataacggagcttcacctcgcctttccattgggtgttgaagaggcggtcccaaaaagtgaagaacggctgagaaaagtttgtcttgatgccccagctttggtgatggatatcatggtaagcagcgttgttggtggttgcatgctgaaggggatcccaagggaaagcgtagccgcagtgatcatcgacagtcttgatagtggagaaggtgaagaaccacatgctctggcgatgtgtcattcccgatgtcaggaagccaatcccagctgcaacggtgtctaagaggagcccctccactgggtgattgtagagggcgccatacgcgtatggaacgtacaggcggtggtgactcgagtggaagtgaactgatgcacagctaatgctcatatcctcataaggtcgaactacaggacttaccatcaagccaacggttcagatgcattgcacggtgaaggaaatactgccatgtatccacgacacagataccccaggtgaactgcagcgccgggatgaaataccaggagatgaaagctgccagagacatttcccagttggtaaaagcaggcacaactgtctcaatgccaccactggagacaatggactgggtagcaccagggtaatatccaccggcaacagctcccgctagcatcttgtgtccgttccgagaaaagttcgcagccacaccagaggcatccaaaccgaacaaagccaacaggtaggggagacctctttgtacaaaacggatccggcgcgcccaaaccgcaacgtcatattcttcccgtccaatgtattcctgctcgtcaaagtaggccaagataaggcctgcgagcgtttgaactacctgctgcaggacgacatctcgtacaacgtcccatcgagatgcgcggtttctcgtaagaacttcggccggagtatgtaaacggtactgcgggaataaatcatagacatcgatgacatggaaaaacatagacacggcccagtaggcaacaaccggcaggattaacgcgaggatattgtctgggattccatcaacaagcgaagggcgcggtgtcaattgatacgccgggagaggagggagatcatagagcaaagttgtgtttgtagccattttgagaaggcacaggcaaaagtcgagagaacgcgatcagaatggtgtggcgaatggcgggttaaagcacatcggaccctaggtttgacagttaacttcgtgtataaccgctggtgaaacgaagcaagcgtaggttaggatcgtataaagataaaaggagtgacgagaaggcaatcgtgtgaactgaaggagaggatgcgatttatagttgcggtcgaagtatccgcgaagcgacagtaatcggaggcggcccaccacaatcaggggactgcgggagcaggcggagtcggcaagggcagggcaacgtcaattaggacgtcggttgaagttcttagagcttgaaaccccagaggagcgctggactggggaggaaagaaaataagaatggtgctgaggaggagcgtaggtatggttgaagtagtcaagagatcaaaaagggtcagaaaagtcaagacccaaactcggcgaccgatggatgatgggtcacaccacggaggatcgaagcttaccgcaaccattgattttttgatgttgttccctacctgttaattacagttaaattacgataaatatatagagtaaggctgtatgtattgtcagatcttctgataacgctctcaggagcagtgcagtgtagcttgcctgacatctgaaattagccactgctcactaattactcccagcatcaggcaatgtccgctcaaattcccctgaatgaatctggttgccgtggcgttgaccgtataactgttatgcccactactgtacttggagagttgttcttttcgggcatagtgaatgttcatgcttgtgcctgagtccagaccaaccccaaagtaggctagtgcgatttgcccccctcagcaaaaaagacagcaaaatgaaaaaccccaccgaacccgctaaataataatcctcattttttccaggttcccctcctctcttctctttctccttctctccagccgtgtgccaatccatcaatccctcttcatttcttcctctttgtttctccttttttgtgcaggatctccatctccatctttcaaaatgattatttacaaggtttgtccacgttctttctcaccgtacatctccaaattcatgttactaccccactttactacaacgtcgcaaagaaaaacatcatgaagcgaccatgagggaactcatgttattaggcaagcaagctaacatacagttttgtacaggatatcatctctggtgacgagtgctctcggacacctacaacatcaagaccgtcgacggtgtttctacgagtgcgactgcaggaagtacctcaagaagacgaacgaggacttcgagctcgagggagccaacccttccgctgagggtggcgatgatgagggtggtgctgaaggtggtgaggttatggttcacgacattgaggac

SEQ ID NO: 1501 - DNA, 952 bp, Emericella nidulans
tgcttccgtcaagcatggtatatccgggagggctagcgggaacgtcttcgtatactggcggcatctcctcatcccagctgataccgagcccgcttctctccgtaacgtgcaggttaaactgcatgcgaaggacgcgggcagctcctgttggagtgatgagtctggtgttacggtttggacagaattcctccgcaacaatcagttcaatgaccaaattgtgcttcgtctccagtccacccggtgcctcaagatcacacaccgggttggcggttgggttaatgttggcttcaaattccatgcttatctcgcctccagcggtatcaaagtctgtcttccagccatctttctcctcgttgtgtccaatgatccgcgtctcctggtgcagaacgccctttccttcgccaccaatcttgtgcgcgtgcttggggcaagcggttgagacaatcttctggtgctcttcaatccgccacatcatcttgcgtagcgccaacgcgtttgggtctcctcgcctttatccaagacaccgctcaaggtcatctgaacgggaaaagtcccaattgggtggacaacagatgggaggacgatgcggccagttagattggtgggtggaaagatacgaattgaggatttgtcgttccctgggagaatggcgcggcgcatgtgtagcggcattctaaaattgtactcttcaccgttcacattgtgtccgtgtgcttgaaggaaatattcaatctgtcccagggaaccattacacgacgccggcaggttacctgggaacagataactgaaagggaagtcgtggtcaccgctcctaaggtggagaggttccgtcagaagttccagtttgtcagttcctcggtcttggaggcgcaattggggcagtccctcgagacgggcttcttcgtcgtctttctaatcatcaagcgcatatcgaacttgtcaaggatgacat

SEQ ID NO: 1502 - DNA, 4350 bp, Emericella nidulans
acgcgggcggatgtgctatttctccgcgcactaataaaatagcagccgctgatggcgccattcagtctattttcacgcctaaaccagctgaggaacaacgctctgcgtctgtgccgcgcgtgacaacatcaaccacaccggcaacgttgaatgaagcaaaagatatacgacctgcaatccagccactgaatcgttcaatgtctgcacagcccacatcagtccgcgaggaagcaccccaaccggcagatgacgtttacgatgcatggggagctatggatgatgaggacgaggacgggtgggggaacgacgaggacccatttagtaccccgccaaccactactccttctactgccaaacctaaagttagcactgtcccatatgatgatggcggtgaacctgatttcgcgggatggctcgctgcacaatcaaaagcaaagaaacccttaccaaaagggttgggcaactctaaaactacgtcattcacacggactgctagtccaagttctacagtgaaacctgctgctaaggttgcgacgcctgcaaagaagattgatacgaagccgaaggatgtggatgaagacgatggttggggggatgcatgggactaatggcataccttttgtcatccattttgaggttaatctctgccagggtccggaatggagtttggtgcttgagtagacagtgctttgggcttgttgataagataccatgcgcatagtaacatatatttgcaatggacgtttaagatatcctattgacctaattcaataattttctgatattgttagatgatctccatgctcagccctataggtgtacttactccaattgtatagtatggctggtgttttgaccaatcggaccgcggaagccccgtgatcacggctgtctccaccgatttgggagagcttcatctttcgactccttcgcttctgaccgttgtttcgtattctgcactgctgacccggatctcacgacacacgagccaaccggagtcaaatcgcagtgttggcattgtttagtcaagttgtgttggcgggacaagccaggtgcctcgtgcctttttaatcttgctgccttggccgcttcaacctttacaagagaacggtctccagagagcgcgtctgagggactggagactcccttaacaatctgcgcactatgtatggctttctaaacgcgcaacgccctgtctatctgcaaatcctgtgatcccatctctcgggatcaaacattccccgccatggaccctgacgaggcacctccgccgccatactccgccgtggaccctttacttgcgccgtcaaccagcaacagaaatgtaacctcatcatcagctggaaccccaagcctccctcacatccgagatggagatgcacagctgcataacagccgagggagtatgcccatagcagcatctgccgcacttccaactcatttcacatcagccgctgcgtattttgctgaacggccacctcctgcacttgaagatgcagagcaagtcctggagcatcatataaccatctatccgcgaagccaggccaaggatttcccgcggcgcccgcgatgctggagtccccggatggagaacgtcacccagcaagattgggatatgttcttacggcacttgtttcctccgcatcttggccttgcgtcctcgtccgctgaacttccgcggcaggtgagggctgagatacgtcgggaccggaaagaccggcctcaggagacagatgaggagcgggaaatgcgtatcgctacggttatgaaggagtggaaccagtacttttttgagccgcgcgcggtgcggatcgtattcttttacgttacagatcccaggaatgcgccgatctccccgctctgtccgaggtgttatcccgctgctacgagggcgtcgcaggagaatcgcggtactcaggtaccggaaactggcaggggtcatcctctgccaggtaacatgcaccccacgattacgggatatccgcaggctcctatgtaccccgggcaggtaccagggccatacgggtggtcaatccctaacccagctccatacccaccacagcaaggttctggattctttcacccggcgaaccctcatgtctatcattaccaatacccgcagtggcagccctgggggtggggcacacaacattcgcagcaatatgaaagctcgatcctgaaaggcggtccattaggctggttctcgagtcttgccgcgcaagcgcagaaatacggcgaccgcatctcggagcaggctctgcattacggggatcagataacggcccatgcacagtactacggcagcaaggtcgaagaacaagctatggctcatggccgctggatcgaagagcaagcaggtctcagtggtcgaaaggctgaaagcgccttttctggatggaaccaacctccgcaggcatatccacactactatccgcaaccacagccccagcatcagtctcagacttccggcaccgctcaatatacccagcaaagtcaatccgcaccggagaccacagtagcccagtctcagcaactttcttctgaccaacaaccgcagcaacaaccacaacagtcagcaaactcaacttcctacaaccgcccccgaagggattctacctcgtccacgacctctgactcctccctctcctccatcgattccatttccacaacatcagatctctcctcttccgacctcgccaccgtccgcgcccaactcctttctctatctgcccaccatgaccgtgaactctacgacgcagccgtcgaactccgtcggcagctcgacgctctccgcgaatctcgacggcaagcccgcgtctcttcaacccgccgctggagaccgggatggggacagtcgcgaagtgatcagcactcaacatcgcaatcgtcacaccaaggacggagtagctggggaaggtgggagtcaccggcagatcggcagcggaatcaggcggaacggcgggccgcgaaggaggagctgagagctacgaggaaggcgtttcgggatgttgtgaagagggcgcgcgaggagcagaaggagtcgaggagggccaaaaaagccaaaaggaagccaagaaaagaagggaaaggaaaggagactggctcagggtcagaatcatggacaagaggagacggcttccgaggctggctctgtgcctgcgccgctttctgagtcgaatctggagcagcggttgcagaatcttgagctgggcagtaattcgcaaagtcgcgctgtctcagcacatattacgcagcgcgccgatgccgatgccggctccgagagtagtgcgattagttcgatcaagacacccagcgccaactctgaggaagaacctgaacctgccaaggagaaggggaaggaacaaaagcctagcaagggaaccgaatgagtaaaatgatcgacacgagtgtaatatggtgttttggtgttcgatttattttggttactttatatactgtctcaacgtgttatatctcctcttgaagatcttcgttacatgtagtctctcgctgcgtagctctaaataaagccgcaatcatctgcccctctacgactcgacatcctaaactgacgctgtctgcgcttcgttcttctccaccaggtcaccgacccctagactccgtccaaccttgaccctcaccatcttctccttctccttctcgtcctctttcttgcccagctcccccacctcatcgccctcgtccgcgtccttctcgtcagccgcatgggctcccggtccttccgctcgatctccgcccaatcaagccacatgtttgaaagatccatgcgcatcgcgtaagcatcctccccatcagcataatacttgctctcaacgctatcgacctggaagcccagtgtatcgcggtagaggtgcagcgcagcggtattggagacacgcacatgcagagaaacgaattgcgcgcggtgcgactcagccatgccctctctaaaaaccaaaccgtcagcaacaaacgttacaaacccaccacccccctgcggtaaggagtaaacgtacgggacatcctcatcagcctctccgcaattcccagtcgccggtgtgtcctcataacgctcaaactggtgatatgcccatgctgcacaccatccgtaggctcctcctccatcttggcaagcacataccctacgactttggggtaattgcctgcgatcttgccgtcggggtacccattgcgggggcggacgacggccacaaaactgagctgcggccaagtaagggcgtggtaaaggtagtatttcagaaagtagttctccggaaggtttgtgatgttgcaagtttggatggaggggagaaggtcgatgtaggaggggtatgaggagagagggacgat

SEQ ID NO: 1503 - DNA, 3619 bp, Emericella nidulans
caaacccagtagttgttagcgtaggtaacgtggagctttccagagtcctcgtcttcgttgctgttgctgtggccgacgagcgaagccttccagtggtcgtgaataaaggagttagagacggtgatgtagtcagagccgcgcttgaagtcaaggagaccgtcgtagtagtccttgtcgtggtcacggtcactggagacgtcgacgtggtcgatccagatgttgttggagtattctgagcaatattagtctgtgatgcttgtcctagatcagtctcgggtgaggctatcccagcccagggactgaattacgtgattatcgcatgatacataccagcaccgatggcgtcgccgttgtcggccaagaccttcgcgataccgaggttgcggataataacgttctcgacctccttgaggcggagaccgaaaccggtcaggacggcggaagagtcggcaccaaggatagaggtgttagagccgacatcgacctgttcggcggtctcctcgatgggaccgctgacgatgacgattttggggtcgtcgccttggacggcggcagtgaactcggcgtaagaggagacggtggttgtggtaccgccggcaccgtcggtagtaccgccgttcaggctggcatagccaaaggcggactaaacatggtcagaacgacctatacacactatcagagggtttgaaacgtacatcttcaacggaagcacgcttgttgaagttgctgttgataaagttgctggtaggagtcggagctgcaaggcccgcccgaggcagctgacggcggcgatgaggaacttgaggttctgcatcttgaaaggactgaaaaaaacggagaagtgaaagaaggtagaatacaaaaaaagggagtgtatgaggaataattgacaggctcgctgttgaggaagggaagaatcaacgtgcgaagaggctgtttatatagtcctcaccaactccagagcccttctccggaatgactatgataggtggaaggactgaaacgatcaccccttctgactcctgaatatggccatagaagctagtcaagattctccgtggctgagctatgaccatgacggatttgggtctgcgttgcaggtagaaagcggttcctctgcgttgccgccgagtaactcgtgtgccaagcatccccaaacagcacaagaccaggaaccggagagacgagtattcggtcccttgggttttcattaggaaagcgatcaacgtgagaccggagaacttccactatggatggtagcttgtttcaggacgaggtgccaagacacccgggtgaagcggagataccactcagcgtcaggaacggctgggctgggcattgcgctatcaaagctgtcatgcgaagcttcggctcggtttgcatgattcatggattcgtaggagctttgcgcgatcgtcctgttccttgcctcaacgcacacgaaactgatcttcttcttcagccttacggctcttggaagggctgtttcacggggtcggccgcggatgattacccacgaattgcacgaattgcacgaattggagttcttttgcatcagaaaagatgcgaatattgacagaaaatgcgtggggtataatctatttctcgtcgtctgctgcgcgagtcattcacggaacctggcttctttcctgttaggatcttgcggggcccaaaattatcaggggctgcattctcctgtgctatagtagtagttagcaccttggtggatgtcggaagagtgatgcgatattgtctcaccgtcgactcatacacactggagacagcaggtcccatgaaatcaatacgcatgccggtccacacttgggcaggatatcgagcccggcgcaactaacagcataatataacacttcgagatgtatgtattagaggcttataaggcaaacacatgtaatggcatcaatcgtagtgcttcttgccttgagacggcgtcactgcatgatcgcattccgtactctgtgaacccagcagttcgcacttgccacacctctggtagccaaccaagcccgcttgtggttccgggaggctggccgagctctggagtggacactcgcgtgggtagctatggagtcgacttcgtctcagctctggtccggtaggtactccggagtgcaatcatccccctgctgccaagcctaaacgtctccgctgcgaggtatgttgggtatctctttatttttagggagggagaattcaaggaggtcatgatccagctgcgttgcgtcctcacgttctcgccatggctgccgagaatcgttaatatgggaagtgtgggtagttgggagccgatgggtgagctgagaaggccggggcaaggttgttggccagctgacaatctttctgaaccgactttcgtttcctggcttgaaaagatagctcaataagttcgccctgtcccgtattgaagttgtctgcggtttgtgttggaagttcgaagtgaggggaaatctgaagagcaaatgttcttccttggccgcctttccatccttcaccaacatagaaacttggaacttcgtttctccagctttcaccaattcctttttatcaatcatgttattatccgcgttcttctgtgatattaaatgctggtttttataaaaagtcaacaatgacacaacacttactgatcagctatgtcaatgctgctctgcaaccgtcgcgatgcccaggacgaggatctgttcctgacactccacaacccgcatgacatttctgaccgaaagccttggaaaagatgaagtggcaataatgctttgagggagaagctggctacagcgaggaacaagcttcaataagaacctggcttgtatgaggaatcctgtttccctaacagtcgcaggtggatattgaatcgaagtaaattctagcctcaagttttggacatattggctaatcttgttcgtcgcgggccaaccaaagtatcagaagtcgttttgcatcatccataatactggggtgtcgacaatagcatcgtccctgtgagatggcatccgcaggctgaagtctgttttccctgggtctcaactgcggaacaacacggaacgcaacgcagagatactcttctatatacgacactgcagtgcagctgcagggtgcgtaaagcaaatcctacgttggggcacggaaaggcgctagatgcataccatcttcgctcggaaaccctacgggtcccaaggatctaccgcgggaagatgaactggttacatgcgataacccgccttggagggagatagaagaccgatggctgacattatgccgctaattgccctgaagacacctcgagggaataaggtccaaggcaatcttgaaagcctgaaaactcacactcttgtgacccggaactttattccgggaaacccatcccagaaccttctatagagacattttgcctaatgcgacaggaaatatttgcttaatagaccattaggctccaacacctaactgtgcaaaacccctacggacaggcctcctgagaggcttataaaggcatcagggtaacttttcaacattcaaactaacaagggttcccgaaaaaaggggccctaaaacctctctctaccccgcgggtacccgaaataacgctctaagcccccctttgtaa

SEQ ID NO: 1504 - DNA, 2036 bp, Emericella nidulans
taatgaggacgactttctcttcgcgagaacgatggtcggagtattcaagaacattgagcacatgtgttcaaggactcgaagcaagacctggggcaaagatgcctggaagaagattgtggtctgcgtcattagcgacggtcgtgctaagattaacccgcgaacgcgcgcggtcttggctggtctgggatgttatcaggatggcatcgcgaagcagcaggtcaacgggaaagacgttacagcgcatatctacgagtacacaacccaagttggcatggagttaaaagggaatcaggtccatctcaagcctcgctcgggagtgccggtgcagatgattttctgcctcaaggaaaaaaaccagaaaaagattaactcacatcgctggttcttccaggcttttggccgtgtacttgaccccaacatctgtgtcctactcgatgctggcacgcagcctggtaaggattcgatctatcgtttgtggaaggctttcgatgttgagccgatgtgtggaggtgcttgtggtgagatcaaggtcatgttagaccatgggaagaagttgttcaatccactggtcgctgggcagaacttcgagtacaagctcagcaacatcctggataagcctttggaatcggcttttggattcatttctgtgcttccgggtgccttctccgcctaccgctatattgcactacagaacgataagaacggccaaggtccgctggagcggtacttcctcggtgagaagatgcacggcgccaatgcaggcatatttactgccaacatgtatttggccgaggaccgaatcctatgtttcgaaatcgttactaaacgcaattgccgctggctacttcaatatgtcaaatcctcaactggtgaaactgatgtgccggatcagatggcggagttcatcctccagcgtcgtcgatggctgaatggtagtttctttgcggccgtctatgccattacacacttctatcagctttggcgcagcgaccacagcttcattcgaaagttcatgttgttgatcgagacgatatatcagacgattaacatgctgttcgcttggtttggcattgtaagtcctctctttggatacattggagcctactaattgctatagggtaacttcttcttggttttccatatcctcacaacgtatcttggcgatgcagacctcctaggaactgctggtaaggtcttgggagtagttttcgaatggctctacctcgcaaccctggtgacctgcttcgttctatccctgggtaatcgtcctggcggctccaacaaactatacatgacgatggtgtatttctgggttttcatcatgatctacctcgcgttcgctgcggtcttcgtgacggtgcggtccattcaagaagaagttaaggatggctcgtttaccttttcgacgcttttcaccaatagcactttcttctctataattgtctcgctgggctcgacgtacgtcatgtggttcatcgcatcgattattttcatggacccatggcacatgtttacatgcgtaagtctcgacttgtgatgttcttcaatatggttctgacatttgcagttcattcaatacatccttctaacccctacctatatcaacgtcctgaacatctacgctttctgcaacacgcacgacataacatggggtacgaagggtgatgacaaagccgagaaactaccatcagcaaatctcaagcccggtggtaaagtcgacgtcaacattcctcaggatgacggtgatcttaatgcccagtatgaggcggagctcatgaaattcgctcagaaaccacccaaggaaatcaaaaccatttctgaggaggaacgtcaggccgactactacaaggggttccggtcctccgtcgttctcgtctgggtattttgcaattttgctctgggcgctgttgtcctcagctcggccggactggatcgcttcagtgatgacgccgaggccgcggagacagataggaacaatcgggccatgatttacatggccgttgtgctatggagtgtggcaggtctctcgatcttta

SEQ ID NO: 1505 - DNA, 3076 bp, Emericella nidulans
ggcccttaaagatagcactgtgctcataacaaatcaggattgtatattgttatatgtttatatgtataaacatttgacgggcctgcgtctccaaatgctaaagcccccggttgccctattcatcgagcgagaaaccggctgtggagctacattcaaaagtgcatttgccccgtcgggtgcagtcccgctgcttggtgcatacctcccgtcggatctcccggtgggagccccagtccatccatccaggctggattcgtgaactgaagtgactcttggatgggttgcggttggagagcgggcgcaggcggattccatgtgggaagcacctgttcgccgttatgggagctgctcgtttgagcccaggcagtcggttcatcagtattcggggggtgtaaccgccctggcgcatgcagccatgttgctatcgctcgcccgagcagccagccatgcgcccagaagtcatttgggaatgggcctccgggattgggcacaagctgatcaaaggaggcacggatgtgggtgaatacatcaacgatattgagagttttgtacaccgcatcgcgattccagtccggtgctgggtgtgttgatagtcgatagagtgtgacaacggcccgggataggtggatccactggataatcgaccatcgtgtgtggtcatcaggaggcatcctgcgatatatggtatcccaggatttgatcgcgaggagggagtgccacatgcagtctacagcatccgggcctatgggattgttcgtatttatagagtgggggatgacgttcgctgtaaacgccgtttcgtggatgctcagctccacataatgcaactgtgagaggatggtatctaggatgtcaaataagtcacatgaccgatcatgaggaagactattactcaccatctttttggaggtcgggagggatagaattacgaattgcctcaagttcaaaccgaaagcttttaagaaagaacgggatatgcactggcttcgtcccgtgctcgtcacgaagtttccgtgcgttttccgccaggagctgcaagcgtacatggacagccagtgcagcgtcacccggccattcggggctggcggcaagggacccaaggtcctcctccatttgcagcgtccaccgcatggcgtccatctggtagaaataactcgaaatactgccagcgcaccgcgtcagctacgtgcttggtagacgcatttctgacacagcacttacatagagctcacgaaaaaacagccgagaaccgcgcgtttctcttctgccgtccgtatcttgggtcctttcctcgtccaattgggatcattccctccacccaactcggtgagcctgtgcgcatcaggcgggggcggcttgttcagattcaggtccatgacaacggagacggccagctcgacaatccgcgtcagagtcggcattctcttaagatagtggtcttggctccagcacgcgtaaaccagcaacccaagaagcaggtcgatatttgattcgttttccattaccatagaatgagcaattgtgcttttaatcctctttgaccaattcatcttctcctgcacggagcgcgtcatcacagacagaattgtctcaaatagaaaaggccgttcctgttgcagctgccgggccgttaggcccggcggcagatagagaaacggacaaaatcgtaagacctgttcgcgaaaccggttcagcgccccctcggcatccacgatgtcaggggatgttagaggccccggtgggaggatgtatgtcgactccgaaaccgaagtgcgcgctggttgagtaggggaagatagctctggagtactggccttacgcttatactgctgagcctggccatttggcgatgaaggttgcaggtagacggactgtaacaaagaaagtacactatctagcttagcgtccatctcctcaatcaaaggactctgaaaatgctgcgactcgcgcttcctcacgccatgagacggatggcacggcttcttgagccggtggcatctagacaggtgtaagcatgctgtccagcaaatacaggccacgcactgacctttgacacccgtcgccatcgggcatcgcaatacacttgaccttacccttggcgcagttttgacaggcgaggccgtacgggccgcgtccgtccatggcggggataagctttgagagggtcgagcggaaacgcgggagatcgatggaatccgctgcgggactcgactctggacacgtccacggggaggagaggaggtgaaaatttacaggacgcgctctttgaagtatcggccgatgaaatcaccgcgatcaacaatgcaagacatgccgttcttcccctgaagtgaagagtgagatgtgacctgaggccaaagaagtcatcacatcacgtgcggagacggcggccttggcttgaccgtctcgagtatagcttcagcccatgcattgcctgcaacatttcttgtgctgctgattcagcttatgcgaccgtgtgcacgggatatcagaccggtctccaatggccggaaagggaagcacgcgacaggatgcagtgtccggcatggacaagtcagcatcctatagcgaactcgcatcatcatgattgcagcgtttccatgcttaagtctgatctgtacgcacgaccaagcacctgtgctgcggccgtatgcgtgcactgctgtaggagcatggtgtctaaaataaggacccagcagcccggctttatccccgaaagccggccgtttcagaattacccgccgcgctctttgaccggtttctctaaccggctgcgcttggccacgtacgtacgtacgatcctgcccaccgctttgactaggaccaggattggatggcagtattgttcatgtatttccatgtaagcagatggaaatataattacaacgcagacggcacatgacagcgcccttccggcgtatcccgcccataatatatcccgtgtattccgtatactccgtattggattcatgactgcgccgcaatgcggaccgcggcaaacaggccattgttcttgcataccgtcttctgtaagcgcatggtataacggcgattccggtgatccgggtgattgatc

SEQ ID NO: 1506 - DNA, 3521 bp, Emericella nidulans
gccagtgttacatcggtggcggagaatggacccagttgggaccccagtccaaatgaatggaagggtattgatgatcaaggtgtcattagatgtctgtgacggaaacccaaagggatggtgtgcaaactctctgttcatggggggtaacttgctgcatcttgcctggctcaagaatcagtgccagcagaacgctagtgcgaagaccctactggtttatatattcttcccctcatcatccctgatcgcggggtcgtagcctcggtatgctttataccgatttttgtacattgtgtgctgcacattttctctctccaatactgtcatttcattcctctttatggctgtagatataccaacagggcctctgaagcactgacggtgaaactggcttgccccccttgcacagtagcggtctcaaggacctcgtccccctctactacacaatccccattaccaaaagtctgccctgcaaccgttggagactctccccggtccacccgagacgtcgaatacggcgccgttaacctcttcgcagtcaccgcagccgaagtcaatccagtcaacgtatacgtctggctcggacgcgtcccgctggtatagtactcggagttatacagcaaaactttcacaggagcgccgtatttgtagatagcatacgctgcataggaggtgctctggtcgtccaggggcgcgatatggtcggcttgcgccagtgccatggtcgcaaagtacgccccgtagtagggagcaccagtcgtgtatcgtccccaccagcagtactggcagttgccgatggtgccttggtggaagtacagcgcctgcagtcacttagtattgtgaatgacaacagcttctggtggatgtgagatgtacctccgtgcccatggtgaccagctgcatcacatagtctactatccacagcgccgccccaaatgttggactgatgcccccaccgccttgcgtagctgatgcagaatatactattaggccacagaaattataataaatgaaataataatgcttgggatgcacgaacccgaattggtctctccaaaaacgtgcgctttgccaacagcattcgcagcctcaacctcgcctctgaacccggcaatctgggctgcgatcccactgtggctcatgagcgcagccaaatttgctgtgctctgcgactgtggataattatgggaggagtattccttgacgtacacatttgcctctccctcttcctgcgacaacgcctggatgctcattggcgaggtcccaaagtatacaccagccgagatgagatcggtcaccgagaggttgccgcacacggcgtcttgccaggagatctgggaggcatagtctgccgatgccgtccaggaagccccgttcgctatgggatcatcgtccgcgaaaactgttgatcatcagaacctctaatcctctagcctccgtcgacgggacgacagacaattcggctcatttcccaactcgatagcctgcagatcgcccatctcgctgactgccctactcgcggcgctgatcgtgttctcgatgtcattcagccggcggttcaggcctaagaccacgcttccactatactccgatgccagagtgataaacgacgggccgtacgtgagtgacaatggcgcgtcagcgggatcatctacggaataggtgactgcttcgctggaggctgcgtcgtatgtggcgcggtctctggccctaatgagtgactgccacgtggaggagtttagtcgcggtagcacatactgtgtagtccccccgatcctcatgggcggccatgttcccgtcaactctttcaggttctccaggcaagtggtcgtcgcgggaacgtcattgaagtatccggggaaagtgaagaattccagtctagagagaaactgattggttaaagaaatttccgctagagagatgggctaagactcacgaaactccccaccggggcagcagagagttggttactagcattcgctggcggcgtcgagggcacattgaacgtcagtgctagtacaccggacgcagtgtggctcaggagccatgagacagagaatcgagaggccattgttgctattgtttggagtcgatctaaactctagagcggtaaccacagtgtgtctccttatcagttattagggttaaatagtgctctttaccatcccttctccgcattcgtggcctgcttgtcgcctaccattggacgaaaaactcctcggggaagctggaaggataacgcactagacagtgcagtaagcgctgatccggccatactaatctcggtatattgctcagcgaggtcgaggtggtcagtgaggggccgggacgatttccgcattccgccagttagaagcttgtgttgtataagcgtacttggttgggttcatcccattggccacgagatcatactagttgcagacactagggccctccatggggataatttcggtgggaatgcccggggtattgttgtgtctgtgcaggatatatgattgcggggtatgacagctgatcaggctgttgttggaggagttttcgattcctggtcagttgaacaggggcttcttgactttgtctcactgattttatgctgcaagtagcaagaaaagtcttctgtattcgagggtcgtcatggtcgagaagccggagactgagagggttgaagaaaccaccacggtcgacgacaaggatgaggccaacagcaagggacagccgctcatgcggtcggagcttgacaatctcagtatctgggaaagtctgcggcgatacaaggtggtgaccacgattgccatggtggctgccttcagtgcgtcgctcgacggataccgtaggacacgaatcttcatatgttcaaagaaacgatgctgatgctggctggacgcagagatcaacctgaacggcgggctcgtctccaataagggtttcatccgacaaatgaccgatccggagacgtcgatcattgagggaaagtacatctcggcttggagtgggatccagtcggctggacagaccgttgggcagattgtacgctctctactctattactccttagataggcactaatacactggtgcagctgctgcagtatgcagccgatcgatacggacgcaaggtcgctctttatatcatcttcctcgcctttgtgatagtacgttttatacaaattgtgttctctaccaaactgacaaggatcgaatgatagagtgtctgcattgagtccgttacaactcattgggctcattggcttgtcgcaaagctgttctcgggaatgggtgtcggcatgttgcaatcaactatgcctctatacatttcggagctttcaccgacacagctaagagggttcctcatcaacgcctatagcttgtgtgtgccctccctctttcttccgtaggactcaagcctgacctggttggagctggtttggcatcggccagctcttcgcctccgttgccctagaccgtctaaacgcctcggatcctagtattctatagtgtcacctaaatcgtatgttatatacatag

SEQ ID NO: 1507 - DNA, 7722 bp, Emericella nidulans
gtatttctcaactttctcaacctccagcaaggcatcgtcaatcttcccaatcaacaattcttcaggctccaaaccaacactgatcctcacaatatgtctcggcacaccctaaccctcgcactgcatcaagcctcgtcatcaaggccttgaatctctcaaaccaaccgggcgtagtctcgaccgcagatggcagtgtgaaccctgatttgctggagattgaacgtgagattcaggtctggaaagcagaattcggagagatcgaggggggggactgttgcggtatgggtgagaaattccttggaggattatgagtacctacggaagaagagactgggggaatagtagatattgtcgcatagcctactgaatagagaaatctgagttgtatacatcacctagctctcggtagggtacgctctgctacgaagaatatgttgcgccgcttagtctacagtcaggctcgatcaatttaaacaggatgcctggctttgtaacatagctgtgcacagactggcgctgtatgaagactgtctgagatgagaatgcacttcaggatggaccaccgactgactctagcgcgccacagtatggtcccgcttagggcagatggacgccagggactgccagcgacatggtaggatcgtttctgccgcgctccctcctcgcccgtgaatggtcaggccagttgaggaccccaatggtgattttactgcggagtagatcggcagtgttaggtctcggcctcttcagttcctgcaaggaattcaagccattgttatttcggagtaacttcaaaccccatgggcaactgatcggcataatgcgcactgggccattgcctaccaggctaccgggtctagcttctagcaaaggcagtagtgtgaaggtttttcatctgctgcgcgctcctgactctccaccgagcctttcctcttgaacagagcaagatgacccggacaaagaacgaaggtcagccatattaaccgtttttcaaacagctgctggcccttccgcgtcaggtcaaccatgtcgtggtctatggcccaaataccggagttgacgcagacctcgtccagctcctggctgacctggctcgtatgcgctcattcctgcgcgcctccgtgcatgtttgacgagacagatatctttctccaaggaaggacaaaccatatgtttttgtggagattacgagtttatcattgcggcactgtctattttctccataggaggggcagtggtaccttttttgcgtgagttctgaacccgcctttggaattccctaatacctgacactgtttatgccatagcaactggtatcgtgccggaagaggcactgcatatttcccggcaatacgagtccagcactgtcctggccagtcaaaaccaccttcaggcagctaaaagcatccgagattatgccgtttctcatggttttcccgtcgtggtgtttccaatccagatcaaaacgtcgccagccatcgaacttgatagcccagcatcggcattatatcctagtctggatattcctgaggctcatcctggcctgctccttctcacgtcgggctcaacaggttctcctaaaggggtggtgcatccacgacgtctgttctatgaactgcacagaagcggctcgtcaggtgaggtgctcctgaaccacaggcctccgcactgggccggcgctattctcccattatttcggcaacttctggccggcgcccgcatagaggccattgcttctgagcccttcgttctttgggaacgtttgcgagtaggcggggtgactctgctcatggggccgccacgtttctggatcctgatgatgagttactatcaggaccatattacgctcaagttgccattgagagaggtcgagggatacctctgcggagcccagcggcttcgctgtgcccgtgtgagcggcatgatgccacatactgccgtgctccggttttggcgagatgagatcggtcgaccactgcaggtcttttacaacactaccgagctttgcggtgggtgcttacctactaccccttggacaaagtcagatgagaagcagcttgacgtgcgtatagcctgattgtgtatttgcgatacatcgatatattacttatgagcgcgaagcgttgcataggaggaccgagccgaagtttgacggtccgcttgtcggaaggcgaccttggagaactgctggtcaaggccgcggcgatgttcacacagtgcgtacccattctgtgtatctaatccccttcgagttatttctctcactcaacaacataagctacctgggcgacgaagaagccacaagagcagcttttactggagatggcttctaaaggacaggggaccccgtccgtcgcttgggagacgactactgcatcgacgggcgggtgtcatcggattgtaagcagaccagcgctcccagccatcgtaaatctcctgggctcctcgtactgaccggcctttcgagctatgcagttgtcaagttccgcggctataaagttccaatccttggagtagagatgcatctgccagaccttccgttcatcgccgagggctgcatcctcacagcgacatccgaggacaacggtgggcaagtcgcggccctggtgcggttccaggctgatggtttatgcggtgcagatcctgatatacagcagggaccgtgccacaaccagaccagtcatgcctgaagttcgtgcaggagagcctggcccctagtttgccagcgtatatgctcccaacaatgctacgaggtttgcaagatggagaggaaatcccccggtccatctccctcaaggctctccgccgcaaggctgtggagcagcactttgccttgtcggacaacgtgaaattgcccctagatgtagagtgtcgttgtgtcgatcaggatgcgctttccaggccactgagagcttgggactggggcagcctgcagtctgcgagagaggtctaaatggatcatcgtggccgactatgttccatgctgactgtcagttggatgagcaactgcattacctagcgctgagaatgcattctctttttttatactgaaatagcaggttgtttgtgtctgtaccactgtttactggttcaatgcatagtatcataaaagggtttcatggtaagttcataacgtgagtgcatgacataaaggcacgatgttggtacagatcaagttatcagcctgggtcccgtctttatacggcgtaatagaagtgaaaggggtgactgggtctaagttgttgaggagcggcctgcataagcaataacatattcttgctttctgatctctcttgtcgagttgtccgcttcagcacatcttacacagttaattaagtttctgccggttgtattggggttacaacggcaatatgtagacttcgagaatctgaattatcatgacactacctatggtaatatgggtttcacattattttcgagagattattatctacttaactcgggattcgctcattttcccttgatttatcatcccctgttcttcgatggcatattctcactctcttcactgcgtgataggagcaccgttctacataaacacaagaagtcatctccaggctgtgtccatgcctcatactaggatgtagcatgtccagtgccgaagatccgtttgtactcagtggaaagtcgttctagtcaccagccgctcgcagttaaattagtcctgaccaaccaaccaaccgttttgcccaacaacaagactaccaaatgaacacttgtgcggtaagatggcttttgtactgcataatcgccttgttgtctttgctgcggttgtacgaataagacccaccattgcagattcaccagcacttgtatagggtagaaacagaacccagcagcataagaagttgtaatgtaagtgtgctaacctaggtaagggcttgtgtattataggtgacaatattgacatttgctgtgcggtaaattcggagtttattctgtgtctgtatgccacatcttcgttcacctgagtggcattactgacccagtgtgtaacattgccgcaaaccgttactcccgtcaacagagcttcatcgacttcctcagatatggatcggacctggatacctctctcaatactatctacaatctatatctatatgaataggcggtggcatatcccaatccacgtgcgcacaaccaagccctaaggcactacaaatccacttagtgacaatacctgccaaaaaacaacgtatgtccatgacatcacaaccaagtggaaataaaaacgtgccagaaactgtttaccgaatcaaggtctaggccagtgatactaaatctactaagggtccacttgagccctgacagcgctggatgtggcaagtatgacgtcgaatcggcctatccgagcgtgtcgggatgccgaattgggatccaggtgtcgatcggataatggataatgctggtgcagcaattcatgggtgagattttttttttcccttccacgtttataaatccaactttcgtgcatctgtctttgtttaatagaaccttggatggcttgcgtgccataactcaggttaattccctgcaatatccccagctaagacacaatgacacctgcagccgcagcagacaatcaagctcagaagcagaagcaaagctgggggataaaagctttccataagttggtatcccctcctgctactgaaaaaacggatgcaacacagctaacttgctgcagagtgaaaggcctattcaccagcgacttttccggcgagatcagtagcggcgacgtcgaaatccatacctggaatggcccgaatgatcctgaaaacccgtatgccgttttacctgtgaaaattctatatcactttccttgctgacccagatccaggttcaattggagcaagaaatacaaatgggcgttgacggtcaccgtttgtttcatgtacgaaaccacagcgcctctatcccaacctagaagaagaaaagagaaaaatacagattctaacagctccttctcacagctcaatcctcacaggacttccggcaggaacctatggttctggcaacgactggatggctgagaaattccacgtacagaactcacccttcccaaacctttactgggcaaccacatcatggaacatgggcgccgccttctggccactcatttttgtccctttgactgaatcttccggtcgaatgccaggttactttgtggcatacatcatcctaatcatcagtctcttcccgagcgcattcgcaccgaacttcgcaacgcttgtcgtgacacggttcttcggcgggggcgcttcgtctgtttcaatcaatatcgtcggaggaagtatatcagatgtctggcacggggataaagcacgaagcctcccaatgtcgctcttcggattcacgagtgtagtcggcatcgcccttggcccgttcattggcagcgccatcgtccagatccacaagaacgatccctggcgctggatcttctacgtgcagatcatctataacgccgggctcttgcccatcttctggctaatcctgcgcgagacccgaccagatgtaatcctcaagcgtcgtgctgctaaaatccgcaaagaaaccggccgtcccgtctacgcccaagccgatatcaacgccccgtctaccctccgcctcctccaaatctccttcaagagaccgacgaaaatgctgctcactgaacccgtcgtcactttcttcactctttggattagtttcgcctggggtattctgtacctcttctttagcagcgttgtgcaaacgttcggcgagaactacggctgggatactttggcaacgggtctcgtgcaactcgccatctctgtcggtgccgtgattggtactgtgttcaacccgtttcaggactggctctatcttcgctcgtcgagtaggaataaggaaaaacctagcaagcctatccccgaagcgcgcctgtatacgtccataccgggctcgctcctttttgccgcaggcctcttctggtacggctgggcttcacaaccagacgtgcactggatcgtgcctacgatgggaattacagcagcaggtgtcgggatttacagtatttacatggctgttgtgaattatcttactgatgcgtacgagcgatacgcggcctccgcgctgtctgctgcgagtttaggacggaattcctttggtgcatttctgccgctggctagtccacaactgtttagcaaccttggttttggatgggcaggcactcttctcggattcataggggttgcattgagtgttgtccctgtggtactggtgctcaaaggccctgctattcgacgcagtagtccgttcatgagggagagtatgtgggatactgacacggaggagaacgaaaccggggatggcttagacgtgaaggagggtgatcgggctgaggctgtctgaatcgtacagctcatgaagctttgcgagctgtgaactatactctatattccaattcacaactctttatagtacgcatccaacatggacaggccatctcaacgaaggacagtgcattttctatcatatcgaatacatggtcttaatagtccagtgagccctggctggaccaggaatggaattggactggtagcaattatcgacatctcggtgtcagattgagataatgagagaatttgtatatccaaatctagcctaaactgaacaataaccacaagtgcagatgcaacgcttcctacattcgctaggaactatatatatctaacgactaagttatatttggcaaggcctaataaccaaggcgttgaaggcaaaacctagtctctaataaacatctttccaaagctcactgcctcccacttgcccgtctcggtattaaccgcaagctcgctgtgcttaacattcccattgacgaagtagcccgcctcgacacttcctcccgccaacggcctctgcaaatgactctcactgtggctaacggtccaattagcaagcgggagttcccagctgttcctctccgcaacggtcggacaaccgaaatagcgcgcctcggcttcgtcctggcgcaaatgaagctcgaaatatccacggtagtacccctccacccacttgagttcgggattgatgctgtatgtctctgcaaccgactcggcgtcggcgacggacacggtactcaggcccgtggacgaaacggccgtgccggcaaattcgacgccaacggctccggcgccggtgacgttgttgtagggcttggtgccctcccagatcatatccgagaccttgactcaaataaacatctgtgcctgcgtcgacaacaaggaggtgcagggcgagacttacccagttgacatgcgtatcgcccgcaatgttaatgttattccgaatttcattctcgtacatgtgcttgagcgtgcggttctggtttgcacggtaggctgtccacgcgtccccgctgaaactcaaggaaccgtcttcgttcttctgctggatgtgcgcgaagacaagctggttgccgatgacgcgccattttgcgccacggtccttgctagatgacagctggcgatagaaccagttctcctgtcgtggacccatgaggctacgtccggtgtcgtcgtggatgagcttaatgtactcagagttgtcacctgcattgcgttagttggatgagtagatgaccaatagaagggctcaaggagggaaactgtactcaagtccgtaattgaacgatcgtagttccttgtatcaatcataataaggtcaaagaggttg

SEQ ID NO: 1508 - DNA, 1824 bp, Emericella nidulans
ctaaacatcctatatattatattatatagaaactagtaagatatactttagttattagttatagctttaaaatatctagatattatatagttacttatactgcacaggttgcttgtataaacaggttacttataggttatgttattaaaggtataatattagataatagataatagataattaaggattttatataataataactatattagtattgcttggctggttgctcctagccaaattatcttagtaatagataattagaatctgcctaactactagttagttaataataaaaaaccaggattaagatttctgatcctatataatttataaagcctaattataaaaataaaattaaaataactcttctagatgaactagacatgatattatccataaatttgattattatttcaataaatgaataattcttgttggtagttaagctactaggatatagggattattattatcctgctcaaggttagaatatagtacgagataggtagttgcagactatcataactataatattatatattatatagaatcataaccataacatcatatatcgtaataaagatttatattgagtagtaatagtaattattatttctagagattttaagaataaataaatataatattaaattcctaataatatctctctctagttttccagctaacttatatttttatataaattctataaatctactaaaactatttaagtatactattatactaaagacaagtgtaaaattagaatattttttttatctttatattataattcaatagtaatagcaggctatattaatagttcttaaataattatcttataaagcctaggattcttgttataacccataatcttaggtccccaataataaatcctgaaattaggaaggctaagttaataactagttaaagatctagtaatttttttatctaattaatagctaatagatattgtatttattaaatagtaaaaatctattattatttagtataccaggatagtattgtatcatggtataaaatgcttgtcaagagagttacaaggcaataataacctgctaatagcaacatccctggtatagtacctaggacaaggttataatataaaaagattatactaggattatatgacctatagttataggatatataggaatattagattattagcattatccatctacaactcttgatttctcgttacaatcttcttgtaaggcctactttcttcccatgatcatatagtgtgcttacccgcttatcaccatctttctcagcttaatattctaggattaccctatcttttccttgtgcgctatcccccttatacatataattcccgtctccccccctattccatgttcggatctatttgcctcccttttacatcgctaacccctagatactccacctgcttgcatactccactcactcataatccctctcctttttcttcggacttcacttcattcttttcactcgcgtctcatacttctggccatcctgacttcttaatctacattcttctcccctatcactttatcacttatccttacattcttcgccctgtcacccatacaacttcttacttccccatctctctacttcacttcctcttccccctttctcctctccttattatctcattcatccctgactctcacatatcccaattctctatcttcctgtctaagttcatttgtatgcatagactctaacgttcttctaatcgttcgctttattccttctccccctacctataatataccataacatctgctcattaatacacactcatcc

SEQ ID NO: 1509 - DNA, 3694 bp, Emericella nidulans
cgtttgaggatattcaggatgctctggcctgacaagagcttgggaaggtgaaaatgcctccaggccgcctgatctctttccccaataccttccagtactaaataggcccattacagcatcaggacaaaaccaagcctggccactgccattttctcactttgtcccttgttgatccgacctaccggctttgctctatttggaacgtttcacccagcagctcggttggatcaaaggagatggtgctgagtccacgacgcaaatagatcttgaagaggccctcaagctgagagaggaattggtaaaggaacacgccgagaaggatgtgggtatctttgagcttgctagtactctctcgttctctgggttttcttgagcatacgggttagccagatagaatatacgctctttctatactcttgacgtgtcaacatcgcatgcctgctgtcgctacccaccagtcaacgatacagatctggatattttgtaccaacagggaagaacttgttatagtatctgtatgtaagtatgttacaatttagaatttagtggtcttccttgctcaggccgttccgccagttgtattgtttatttcacgcgataaatacgccgcgatatgcaaagtaatgtaatgggagattagaacgttcttgcgcactgcactgatttggacgcctatgttcagtattaggtacatatctggtgagcccattcaattcaccgggcactgttcaagctcaaatattctgactacccacgcattattctgttcctcgccttctccgaagcaattgatagccagacccgccggcttaaacctgccagggtacttttgcacctcggataaggtgcaatccactatctccccgttctcccctctaagctcgcgctttctttagagaaatcaccatcgggcctcggaccatcgacaaccgtataatacggggtctccaaacatagggcgactccgtcaaattgatatcgccgacgccggtgcctgcggtccttcgcacctgctatgtagcccgcactcaagggctctaccaatgggtcttcttctccctgacctaaaagtcgaacgctatgtctgggtcaacatggaattgacaagatcatattgggagagtcatacttcgaccacatctcaaaccctggtgactgttatttcgtcggctagcctatcaatgcgaatacacccatgctattatcttcccacctagaggccggtggaggcgatgacaggcctggggattcatagggtgcgatctgtataaaggtcacccagaagtgcctagagctcctgtcttgtagaagtctgaaaatatgttcatgttccacagctgaaaactacatccatctttcctgatccccgataactctgcaacaatctcaggtgagataccttcgagtcttcaatgcccttgaataggtcaaaaacggccttgtgtcttatcgcagcttaatttttttgccagtccttgtgaaagttatccatttccttctcgacctgcttcaggtgtcttgtcgattttgcctatcgccccttcagtcgtgccccccagtcaacagtttgtccacgccttggcttcggggttctgtttggtatcctcatgtcttgtggaagccgaatcaggtccaatagagggtattttcgcaacgtcttctccttaactccaaagccttccccaaaattcgtctcggcggcttcgatgaattagagtctgtgactaactgggcgcgcgattttgagcgtttcaacaatcttgtcacattgctcccaccagtgttcattctccgaggtactgtagctctatgcctggttgactacttgtcttagctctgacagtcctgctgctgcatatgatatgttgtttcataagaaggggcggtggctcgatatccgggacgcaagtacaaggaatctattcgttgtcggacggtataaagtctggctctgggctgtcttgctggttacgaccacgtcattttatctgctgtataatcctatgtctcacttatcacggatgggagggtgcgagggagtctactccaggtggcaggtataactccgtcgtcttcggcgcactagtaacaaaggagtggagcgttgtcatcgcagcaagcgacctcgatcctgcaaatatcttgaactataccacgcagggattccagcgtgttttggcgtggtcggatgccctgggcggcattcgccgcgcatctaccaaacgggacctgcaagcgagtgtatacagaggcgtgttatgagctcaccactgcagagcgaccccatggattgcgggtagttgtcgcgctctcctacagcctctctatagccgatgctggtgacctggcctttgtgaacgcggacagtgccggcgtcgtcctccctccgccgacccgcatccccggacactgttctcacagccgaactgggtgttcactctacctaccattgacgctatggttagctacgacgtagacaacttcaaattgtcggactgtataggcagaaggaatgtggcgaatagcgaaacggcctgcgctgatgcggagagcctcgcgacatggcttcataactggggccagcagtggctggatgacattaattggtacattgaaagcagtctggcaacccaataagagtccagggcgatcccttcgcccctagatgcgggttcgaggacggctccttttacagggcgaacgcgagtaggtcgtatacaacgaacgaccgttgacgacgcagtcgcttccttcatgacgcagcttgatcccacgacccaaggttggtactgggtcaccaggcacgacgtgcaccggggcacatggaattccagtgcccctatgcctgctggagacggttacgccctcgcgggctgtggatacgcgctaggagcttgagacgatggatgcccacgctgttctcatgagtgcttgcttctgcacttttcgttcgttggataagacaaacctgacatatacagatgcggcgcaacaataggggtcggcatctaccccctcatcgtagcttctaagtagcggcttcggcgaatactcgaaatccagctacagagtcgtcgatctcaaaggcctggcctccgctcccacaatcgcccctggacttgtggcgaacacgcccaagtttgctgtcacggtcagctactacttctacaacaatgtgctgaccacgctgctcaccgaatccgagtacgactcctatggcgtcaagcgccgcggcctccgcgtatcgtggcccaggaaacgaaacaggacagagatcgacatactggcttagtatcccctacaaatattgcgtgccgctccttatcacgtacatggcactccactgaacgatctcacagagtctattcgacgtttagatttgttgtgaaatatgctcacagggggaagggcaggaggtacctgtatcaactacaccaacgtagcctactaaggatcggatgccagatatcaattgaccatctatcttattgatgattcgattgaatcttcttattcttctgttcccccggctatatatacatgcagagggtgagaaccttctagatttaggaccccccggtcaattaaatgaaccccgcgtggcctcatatttctgtcggggataaaagtgagtcggcaaataacgatccatgaggttaaggtggcccccgggggatgttcctgataggttatt

SEQ ID NO: 1510 - DNA, 3737 bp, Emericella nidulans
gttgtaaataaccccccaaataaaagtgggcccaattaaaattggacaaaaccccaataccaggctaaaacccccacccttaaagtttgagccccaaatcaattcttccaagccctttaaaggccccgagaccctccaaaacccggcgtccccaaggggcccaacccacagtggccccccaagggttcgccccataaaaaaaagagcccacttcggcccaagagaaaaaaacagggcctcaaaaggccaaagaaaaaccatcttgagtttaacagggttttgtaacccccccgccacggagggggcgcccccgtggtagtgcccttggtggcccggtgctggtcgtgccacgtgtctctgcccgtggtggccgtggaacgggacccccagcgagcgtcctgcccccgtcaccgttgacgagaagaacttccccagccttggtggcaaataaatgaactcgccggttttcccacaaatgcccacacatttacatgatctttgggaaactcggactacgatcagagaaatgaagcagagcttgcacttcggattttcctttcaggaatgtcagggcgcatatgaggtgttgcaaaggcgggactgagaaggatatatccgtataggtctctttttcgaacaaaaatcggctccccatgtactttgatttgaatgtcaaaaataggaaagtgaaattcaaaacgctagcacagtagatctgcgtagatgctcagcgagccagcctagtctatcagctgtggaggctattgatagccaaggttgcactaggttatttaggacgatcgcggaataatgtatggccaatctggactccggagtacatgttacgaagtcggtctaagatagcattgataattcctatgccgttaagtgttaaaagagtagagatcatttatgaaacagtataactatctcatatcttaaataaccggattccaaagcgaggaatatatatactcaagccctccaccttttctcctattcgttcatcatcctcttcacaaatcctctctaacaaagtcctcgtacgcatcatcaaccttctcagaataagtatcatcatccaagaaccttaacccttctactgctttccctccacaagccctctgcagcgccaaaaaagcaaaatgtccaccaacaaccggtctcgcatagaaattgggcccggggaatcccccgctcccctccgtatcatggagatccgtaaatggcaggtcggtggatgtttcgttaacccatttagccacggactcgagaatctcagtgcggacgctctgggacgcgacagcgacggcgaagaactcccagtccgtctttgtgtaaagatggcggctgtccagcgggaggccatatctctggcgcacgttgtggtaccaatttgattgtttggtatagatgtgctggggcacgaagccttgttttggttgttgaggtttgctgttgagaggggtttgggaattgtcgtcttgcatgggtgagaatggagagcgatcgagaggggtgttttcgagatgaaagcagagctgggcatcggcgtagaggttgtagatcgttgtccaggagccataccagttataggagagtttggcgtggatgccgtctcgcgacatgcctaactcttcccatttggtgatgtaggtgtcagagatattctaaaaatgttaaagacaaatcaatctcaaaataggttctgagtgtaccttgtagtgtacgacgtcttctgtgtatccaccgatctcggcaagtttgctcatggcgttgattccaataatgccttttagggctaaatttgtctgaagcgcaacgcagccggcgaaatcatcggtagacactggtgatgttagattcgatcgttgcgtggaaaggatattaagtactcacgctgtctctcaggttccagtgcgtactcgattaaatagccggtccattgtgtccagagactgtagctgcgctggatccatgcttcggcttgacgacgcccagaggcagggcctccccattttccatcctgtaacgcgatacccgagagagtctgaaactcattcagagggaagaagccagcgttatcttccgtgacgggcgctgcttcaccttgtgtggaccagatcgatgacgcagcggaatcttcatcatagagcatcgagttcacgactgccagtcccattatgaggatgttgccgcactcttccaccggcatatattcgtcctttccgtcgggatgtccagtggcattggggaaatgcgtccccaaatcatgcatagcgtacttgttgggatattgcccgctaagcatgtgctctatcaaaggctcaagaagatatgcaagccagcgcgggttcgtatacaagaagaacgggaaagaggggaaaatgacatcgatagtctggaagttcccgttggaagatatctccttcaggaatagaattgggtcttctggagtgcccgagaaagtcgtcgcacccatcacctgtcgagcggaaagagccactatatcgacatagtcttgtgcaccagactgatatgcatcctcggccaattgcagagagtagttgaaagccagggatgcggcattggcaaagtcaaaatagtggaaactcaataacgattcaacactgttgaaccacgatttccagagagggcgcatcatagtcagaccgcgcgccgaagcgtactgcacgaccgggtcctgaattagggcaatggtgaaggtgacgctatcggtcgtcaggccggacttccgggagggcacgaacgacttggagaaggcgaagacaggctcccggtctcctatcgtccggaaaccagcatcattcacgtttgtcaaagaacctcgcgcagcgaatgtacgtctcactgatggagccgatccggactggtattggacatcctaatcccgtcagcttggatgtcatgagtggcatggaggaaacgaacagcaggaccagtgaggtggatggcaccccattctgccctatcatgcagttcagataaaagcaattggttctctctttgcaaagtccatctctgtagggttggcgaggtttgtagagaagcccgctccgtcttaaactggcaagtaatcttgctatttgcgttattgctgacccaacggccattgatgtctagggaaacattaacagtcacctcactctcagtatatacagttatataagaagccggaatcgactgccgcagagtcgatgtcggcgttatgggagataggaacgagactgtgatattgagcggcgtagaatctgctaaatacttgatactgtatgttagattcgtggtagacgcatcgtattttgctccaagatatgtggggtattctaatggtattgacctagagcttgtcagttttctacgctcctgaaaagagctctcgaagcatactctgttagactctcatgcggcttgccagtaggggatacactgtgcccgtgctggggacctgggccatcaacccaagaccaatttcctctccggtatagaacataggccatttcgaccaaggcacatcgcgggcattgccagccaagtacttaggtaggggttcgcacgatcaaaggcaagacaggcggagtcaaggtcgaggccgtgcgacagtcgcttgaagcgcacatgtgagcacagctagagacagtctcatttcggtgtgaaaagttggaaggtggtacagcggtagtacaagataccagtacaactagaagcaggcgtaa

SEQ ID NO: 1511 - DNA, 1184 bp, Emericella nidulans
gcttagcttaacgtaacatcgagtctccgtatagcaccgtatagtaccatcacgggaacaggtcttgaccgcttcgccgggccggccttagtttggagtatctgaaggctgatcgcgcatagcaccggagaggacccgcctgtgtatgtaagctgtaaagccgatacagtgagaaatacaccgtctggagtagtagcagcatactttggaacggtcgatgactcgaacctccagaaagcaaaactatataaggcatccagagcccagttgctcagttccgagttttgttctgtggctcttataataaatcccattcctctagagcgttgtggcgcgacgtattctctctcgtgtcccgtttaatcatcttcccgataagctcgtctatctttcgtcatagaatatctatcgcaccgctcagtcacttccacccaaggtgagtctttgtctttccctgttgactgctcaccgtctctcttgttaccacggtctctgtcccagtctcagtctttgtctctgtctcagtacagatccttgcgccttctgtgcataacttcttatctccggccgatagtttgctgctgttcggccttccgcaccttccctgtttctttctcgtttatcttgctcctctgtttgcaatttgccagcatatgctcactcattattatcggcagcactgctcttcaccctccctccatcgagcatctctatagctgccattgcacactatcttcaccatggtgtctcccgcatcgtcgcttcaatcgctaccagatgtacatgtcaacggtaatgaaccaaataagctaccggtgcgctctgcgcccaagctatacggtagcaatgatggcgcttcatcaggcactgggaccccaattgggtttcaaaggcaaccgcacaacaagatcctcgacagcgtagctggctcgaacgttcggatgccgtctccgcagcctactcacctggcaattcctggtagtccgcatcgagtcctttccgaggaggatccaggttatatagctgccaagtttgagggcaaagaacatcagatggaggaaggtgagcttttcgctctcggctcgcgccatatctcgaatcgttggtgcttatagtcatttagttatggatcagctggaaaagaagggctttattcccccagaattcatcgtgggagaaacaga

SEQ ID NO: 1512 - DNA, 587 bp, Emericella nidulans
gagccattgaagggtcatttctgcccggctgttcacaagcgagcagtctattgtgtcaagccaaaagcaagcaagtgcctggattgatgctgttggatagaaacagtaatctaaatggcccctgaccaaataggaatctacaagccagtctctgtaggcttccttgctgaataggttatgaaaaagggcagagatgtctctacagagattccctgcattttccggcctcgcgcgtatgaaatgcagcaggaagaaatctttcccatagtccataagccttctgagccatctgttagtcaggggagtagatcattcgcgtagcgcaatagtgctacgtagacaaagttgaccttagtctggtccatgttaacacgaactggactggtttccttggttgttctaaagaacttgtagaacaagctgtgtcgaagtgtcacaattttattatttttatgtctgtcttcttcagtatcgggacgaagcaaaaataacaaggagtatgtcgtacaaaggtcatcctccaggttcaaaacttcttctctgaagataatctccagaatggcctccagctgagtgaccgtcagtgg

SEQ ID NO: 1513 - DNA, 5430 bp, Emericella nidulans
tttctggaattgttcaattggacggccaaagagagcgctaaagggggatagatgctgcacaagctgattttttcttcgcagcacgagaaacatgaagattaaagcgagaaacagcaccaggtttatatgcgtgaacgatgctgaagattgcggaggagcttggaggccctcacaactaatgacgttgattacggaggggtcactaagccggactaagccagatttggcgctgacaaagtggttgctcatcaattaactagttagtcaaatcagctaaattgacagagttaactggtgcataaggtgccaactacggaggattaagaaggctcgaggagtgacaagaataagtacttaacatctgtagtaagatgaggatgtatgattgcctgaatatttatggctgagagaggttatgtattttaatgtgcaaacatgtgcgcacaatcagaaaatctgatcgtgtgctttacttccgcttcaccatcacatacggaatctcaacgtcctgttctgtctggtcctcagcggtcacctcgaagataacattcttttgatgatcggggattggctttttgctgatatgttccaccaactcgctcatcctggtgcaaatgaacattagtaacgaggtgttttgattcttacaagatggcacttacttcataggaaggcggtccttcaccttcgaggggccgtagaagctggcatatagtaggctcacaccagagcttaccatgctgatctctaagcctaagtctgaaaagtgcttgaggaagtcctgcaagggaatatcgtccacttcaaagcggtcccagatctggtcaatagtcacttcaccctgcttgccttggtactttgtttttgggcttgcaataggctcgctgaaaccgaagaatggcagcgcaaggttgacgaatccgttcttgtattgctcaatgtcatccttgccgtcaatgatctttagcagctccagagcaactaaacctgtaactagggcggtggttgtggcaatggcaggaataatctttccagcaatgaatttagtcttatggcgatcagcaggagtaatctcgtagttctcagcgcgtagattactagcggcagtgatgaaatcgatgtggtggtttgtgtcgtcatctttctcgaactcaacggggttcagacggaagccctcaagcgacttgggagaaggcaggatctcaacaagacgcttgatctcgtcattgtcatcgaatgaagacccggaagcctcggcatttggatccgggtcattgtcactggcctggatcttaacaccagatttgggcgtaaattcggggatgatcatgttatccacaatctttctgtagtatcctttatcaacgccagggttcttgattccgtagttgtaagcatggagattcgcgcctgcaatgatgaaaccgagatgcgtagggttggtgctatcaaacttgagtggcgtgggagcgcgcttgggcccggaccagaacggttggcctgttgaggtagttgagtctcgggggaagttatagagcagctgttggatggcgttgttgtactgggcttcaaactggttacgcgcccagacgatacaatcgtcgaagtttgcaggtttctcggtcactaaaaagtcgcgcaggtgctccaaagtctgcttctcattcccagcctgcttgagcgtttgctcgatatagttcggctgggacagatacatgttgacggcctctggaggtccaacgaaatatgtttggaagaggtccctagcccaagcgatagtatgctcaatccggttggggaaactcttgagggtacacatgggaaacgacttctcaggaggatcctgagagctagaataagattcggtgatgcgaggaaggacgacctgagtattgcctttggttcccagggtgccactctcaagcagtggctttctgaagaagacgcaacgacggtcaacgtaggttcgggcctcaacattatccagagcatttgtgactccatcaagaccctcccagaattcctcgttgaagatgtgctcggtgtccggtcccacgcggtccttgagtgtaacaattttaccttccagctcagggttcattgccacagctgcagcagaggcacattcactcttgagcttgccgacatccttgctgcggaagaggaactgccggttcaaattgctcttttcgatctggtccatatctgtgacatagattttacccttggggccagttccaagacccatcatggcccagttcttcagagtctcgcacccaatagcgcctgcaccaacaaggaactgggtcaggttggcaatcttatcctggaactctttaccaaaaacggcgatctggccatcataacgcgtcccaagaggcttacaggtctcctcggaacgagtgaccgaagtaggcagcgactctaaggagtcgaaataaagccattgatgcactggtccgaattttcctgatactgccttgagaacctcctgcgccacaatgcctccgaagaaagcagccaaagggttgaggtcacctagggcctggtaactcagctccttgagaagcttctcgtctagttcgaccttttcttcttgactggatgctaggccatttgcaatttgtagtaattcttgggcatcgctctcatggtggggacgcgggaagtgtcccttggtttctgcaaacttgtggagggcttgaaccccgatatgaagctgctgaggacgatcaaatttggcaaaatcggaaatcaggaattccggcttcttgatctgctcggaaagtggttcgaagtcgataaacttgggcatcttgacctgtgtgaacaaaccgccaccctgatacgtaccgaggccggatacgtctccaatagtaaacgagtagggacccttaacggtgacttttcttggcgcgctgttgtttaatccctccatgcccttgacttcggtgaacgtgacgaaatcgccgtcttccaaaccgtggcgagtctcgtcgagcgctgaaacgaggccatcttcagagatgtcagccacaattccacctacaggatcttctcccgtagagtcgccaacagtgaagttcttcccaaaatcgttgaaaagatatccgaaaagaccgaagtatctgctattgtgaggtagatgccattcttgtggcagaagtccgcaatcaccagttgctccttcagcggggtgagggtaaggacaatcgcctggtagcgcttcagctgctccaagttctctaccagactgctgccttcgtggattgtgaccgggacataagagttcaactcagcgactctcggggcggtaacttcggcacgtggcttgccaacgtcttgtggttgaaggaagaactgggaggagagatcggatatagcaactggcgcggggtcgtataaagtgagagatttgacaccagcgagagcgatgtttttggctagactggttatttcctggacgtaaatggcaggcgacaacaaactcaccaatctcaacgcccaaacctttcagaccaactacgagaacattcgacgagcccatacgtttcatagcctcatggccaaggacatatctagcaaaattagtgtcccgtcaaaaggtggtgtccggggggtactcacagctgtcgactgtacaaggactcatcgatatcgccttgtttgattttctcgaccgtgtcttgtgtgggagtatcgacctgcatcttggtgtcctaaacaaatcagaataagcgtctcaagtacaaagcacggccaaacataccgtcatggccttcttctctggtcgagtttcagattcggcagacgctctacgctttcccagcttcgcagcgtcacgaacggggaggttggaggaggtaatggtgaaagcgtggagatgaaagccttgctaatgagcaagactttcaagcactatcaactaagaagctctcaggaagagcccaagaggaaacagcaacggtgaggggttcaagggcgggaggagcttggagctcagaacgcggggtcggaaagcgcaaagagagatattttgtgagtgatcttggtgataaggaggggaatatagagcaagaagcgtgacagaaatgacgatgaatacaggtatcaaaagcgagtctatgacgctgggtaagttgattaatcattcaagaggaaacagacgtctggaggcttcgacgtaagagatgaggatggatgactgactaagtttatgcctcaggcataaattatagccgccttgcttcaagtcaggtgatctccatatgtctgaagagtccgggcattgtgaaggtcttaatcaaggggagaatctggaggactaatgcaagtattgtaataatggtagtcaataatgattcatatggacacaatagaggctgctttgtcgctctacctacccttgccattatgaacaagtttccaggcaatggtatattgtctattccctcattgcgtagctccgcaaatcacccattatacttatcctgaaaaaattgagcgagccatcttgattccagccactcctatgagttcccatccctgactcttcagctttacgattcccatccactcagagatgaatatcctgttttcatatgtcgtggagaacgaaaaatgtgttgggaatggaagtatagtattgagtgagttctcatatcgactacgttccgagaccggaagctagggcattcttacagaaaagtactctcggcccgaaatttctaaccggtctactatccccacacgcttatatcttgcttgataatgatttctgaatcgaagtcgtagcagggtcttgtcttccatacccatgattggctgaggggattgtagagtgcccacttccatagagtagcagcccgttttcgtggagccaacggccccgtttttatagtagtcccagtgcttcaaaatcatgacagatcatatctactgaagcgcgttgaggtagcccgagtgccgctatacagcctggactgtgatcgcggaatttgacagctttatgacacacaatgagccgataaagggcttttgctttgcctaatatcccttggtgcagaacggctgccattgatgtgacgattccgcctaccgacatggtatctctttttgtggtgggcttttatttggagtgccgatacagccctttggttgccttcggttgattcgcgctgcgggggacagtggtagtgcccacaactaatatgcattgcctggctgttgaaccgggtgttcatatttaacctttttgggccagtggtttgctcatcctgctataacgggattttttggctaaaactccctgaggtctgccgcatggacgaccctctctttcttgtttatctcccgtaatctctcgcgtaaatagatgttgtgtagcggtatttttttactcgggtttgcttcattttcttttcttctagt

SEQ ID NO: 1514 - DNA, 5847 bp, Emericella nidulans
ttatgttctggctctcgtcagcagttgtcatgctagactttttcctcaacgtcatctggcttcccattggcgtcgccaacacatggggattcagaactgccgaagaggcctttatgtccacgtataacggcaccggcgcgcccgccggatggaactggtgtctctcatacttggccacggccggtatcctgatcggatttgacgcctcaggtcacgttgcggaagaaaccaagcacgccagcgtgacagccgcccgcggcatcttttggagtacagtagcaagcggatttggcggactcgcaaccattattttattcctcttctgtgccgtaagtaccaatctcgccctggttcaagagtggtattgacgcaactctagcccactcctgataagctttttgagttcggctctccgcagccgttcgttcccctctacgctgttgtcctcggtagaggtggacacatcttcatgaacattatctgcgtagttgctctatggctcgtatgtcgccctactcaccgtttagtctaaaaaacagacactaacttggttgactagaatacggcgattgccatagttgcatcgtcccgcctcgtcttcgccgtcgcccgtgacggggtccttcccttctcctcctgggtctcaaaggtgcataatggccagccccggaacgcggtcatcgtcgtctggacggtcgcatccatcatcacctgcacacttctgccctctgacgtggctttcacgtccctcgtctcagcggctggtgtcccttccgctgcagcatacggtctcatttgtctcgcgcgtctcacctgtacgcggaatcacttcccaaaacccgcatggagccttggacgcctgtccaaaccattccagttgattggcgttttctggaacggatgggttgttgcagttctgttctcaccgtacgcgttccccgttactggcgagaacctgaactatgccccgatcatcatggccgccgtgacgattttcgcgttagtttcctactttatcatgccggaggatgcgtggttgcccaaagaccgcatctcgaattttgtcgacagcaagggcgtcgttacagagacagtggaagaggtctctacatctcgctaagcttgctagactcaccaagctcactaagctcactaggctgcaaggcagaaacgaacccttggaacccagtttatgtcccaagtttctcattctccgcttggcttggtgagtaatcacgtggtcgttggtttcgtcgggcgctctcggcaaggtgcggaacgcaacgcaaaggatagcgagccgaaggtgctcatcccgtgtcaaacacaacatataacagtaatagacctagatcttgtattttattgttccacaaaaaaaacgttcgtagcttaatttgctaattggtattttgcctctataaatataatacagaggacagagcacacaagtaatttggtagttgcgcctacggcaaattgctcagacccgtggaccacagcacaaattaaccgcacagtcttagctccttaatcagtattatccatcgaacttagccaaccaccatggatcctttcttttaactcgaaaattacccattagccattcctagaggcagatcgtatgcactcggcaccttcgtcccacactctagaggcagttgttggtcaaagtgtagggaccgacgcatgaaacgatcgactaaagtatgtaccatgaggtaataattgagttatttaagcgcccgagcggaggggcataggagagatcttcgagtccaagcaaacagcaggtcttgggcgctgcgatttgcaacgagtccagacagtgcgtgcagataccggcccataaaacggcccccatcgaggattgggctattgggccgaggcggtcgccatagacgaggatcgtccgccataagagcgctgacttgttgagtgaccagaaccaccccggcgatccgctagtgccagctaggctgatctgtgatggacgccaagacccgctttcgttggtcgaggcttgacccgcggccccagtgatttctctttctccgcgacttgtaagtcgctggaaggcgcctttggggccttgagtccaactccactgtccccggcggctcctgggattttgactttcaactctcgctcccactccctaagtctctcagactcgggtctcacgtctcacgtctcacgtctcacgtttcgtttcgctcccactcgcttcatttatactcctatcaaccaccgtctgttcatctatctcagatcatctcatcaagatgtttttcctcttctgttaatcgtctcttgttcggcttccgccccgctctccgccctccgcccacgcgcgacctcgcccctccatgtctctcccttacagctctcccaccgtcgatctttctctccatggaagctcgtacgatggtctgtgatcgggcgcagcctcctcaacctctaccacacgaacctccacatcccgacaagaagaaacgcgttcgacgatggcatcatcgtggatttaccggttgctcgacctgtcgtcgacgtcatgtccgctgtgatgaagcgtctccaacctgtcgaaactgtactcgactgggattagaatgcgatggaagtcagggacggatgacattcaaggtctatggcccgccgccgccgccgcccggtcaatcgaatccgccgaccaaacgggataaatccaggccgagagccagccagaaagcagtgaagaaggaagatacagaggttgaaggtgtgggtgatctcgcccacgactgtgactgaatcgaaaccgttggtttttcattttgagaacccggcagtgcactctgtgacatcgatacctgaagatgacaagaaagtgaagaaggagcaggaggatgaagatttggtgctgataccgaccgcgggagaatcaaggccgaccgaggtccgcttccatagccacacattgcccgtctcctcattggactgtttgcagggccgttattatacccattttgtggacgaagttgctacccttttactcatctatgacacttcgacaaatatcaacccgttccgacgatgttttcccgatgtttctcaatcgtcgttgtccatggcgagcgctatggaagctctgggagccctgcaccttgcaaacacgtcgactggcccggaacggattgtgcatttccagcatgccatgggcaaatacggtgaagtcgtcaaatcctttagaacgcgatacgagatcgggcagcgatcacgacttccagattttgcgacctgtctacttttagcgctcttcgaggtttgtcacttccttttttgtttttggtgggagttcctgacttgactagatgatggattcccaacaccataactgggccatccacctgaaaggcgcccgcgagatatatcgctggttgttttacccgaatagcgatccggttcttgaagctcaacgagttgctgaaatgaatcaccctctgcgccaattcctcgtttcactgctttcctacctcgacgtcgccggagcatgcgcaaccagcgatgggactgttgttgaagggagctattggcaaacgctcggtgggggctgggaatacaacttgggaatccccagtctctcgcaaccagctgccaacaacggcccactcctcgaactccgccaatgctggtccatcatgatggagattcaagccgcgattagctctttcggaaaagcaaagcagtcgggctggttgacacccgatcagcaagatataatgtaccgcgatctcctacaacgattagtacaatggcgcctcgacgcgccgcagtgcctgcagaaacttcgcgatcttgatgacgcaagcctatctcagtacccacaccccgacgtcctagaatacgccggctgcatcgaagcctacgaaaaagccacaaacatctatcttcataaagtaggacgcgccggcagaccggatatccagccgcagcaagagctcattgctgccttttgcaccaggatacttagccttattaggaaactagcgaaagatgtgggcgggctggcccgtcccttggccctttattcgttgcagggcgggagactagagatgaacgtgagcagaaatttgtgagggatacaatgcttgatatgcagagatatgggtttaaggtatgccttcctctccgttcggagtgggcgtaatgtttgctaatattaggcagaacgttgaaaaggctctggaggaattagaaaaagcgtggttcaagcggcgtgcttttcctgagggatgggttgaaactatggatgacgttcgctcgtcgattcttcttccttgaccggaccatacacctcgcactttctcggtcttgccaacctaactctcgaaataacgcttccgccggtgccatagcgtataggactcgctaagatgctagtgagactgccctagatcgcaaacgcagccgccccaggagactacgattctactgcctacctaattaccgcttcaacagacgaacctcaccacatattttagggtccagcccgattctcgggccatatatataacgaacgagtatataaacgcacttatcattctatatatcttaatttgttagcggttggttacggcgtctatatagattcactacgaaacaatggattggactttgttgtacacgtttagctaatcgcactttcaactgtaaacgtgccaaattcaagatctcgcctggcatggtagtatgatgagatggaggtgaagctcaatgaccgactattacttggaggactggaagtacaaggaaatttctaaggcgagcaacaaggcctactgtgtgaagaatacttgcctactgggaagggtagagactgaacaccacggaactttttttccaacaaaattcagatgtgttcgcaggccaaggaggctactttagaaagatctggggctgtgcggctaaccaggggtggtcctaagactgcgtcgaggaacattggggtactcagcattcactctgaccgctagagcatcaccatcgttatgatattgcaagctcagatcagcagcacggagcctagcggtgcgtaaccatgcaatgagagttcagcagaatggtgcgtccatggtctatagacaaatgggttccagagcaattctagcgagtgccgatctttgcacgaacatctaggttattccataagagcaattctgcttggcttaattatagataggggcttaattagggctggcctaccaaaacacctattgcgtaagaatagagccacattattcagtccatgaatatatttgcgctatgtacttttgccagagaatatagctacttttgaacttccactgggaatactttgaggggaggcttcgacattctgagcgccataaacgctactttttcattcctatctttatcctactgtagagctacgcctctgcgactggaggtggctctgagtgaacgtctgctctattttccctctctcgtttagccttaggtctcacccctatcatcgggctagcgctctgatcggtctagccaagatattcgcgtctccggcgtgatggatctcggttatgcgatttcatgagtacctgatcaaacgcctaccacatgtttttgtgagcctctgagctcgctctggaactgcaggcagcagggtcgcaggacagctctttacgacgcggaaagtagtccaaaatctgacgaaaagacctttcatggtatcactctagaagcttactctttcttctctggccgtagtcaagccaactcggattaccagtcctgctttaccttgtgctcagaactaatgaacagagggtagagtcttgttctcgtatg

SEQ ID NO: 1515 - DNA, 3606 bp, Emericella nidulans
agcaaccattcccgtagccgcggatgatcccactggcaagggcaaaacccgacgcttcgtcactgcccgggaacgcatgggcgtcaagtccattgtcgccggctggattgcgtcccttaccatcctagcagctactatctggggcttctggttctttgcgccattgacctatggaacacctggtttggatgttgcgcaagtgaacgcgaggaagtggcttggctatgacttgcacttcgcgaaataggagcatctgatctcatctcgttctctcccattaaccataactggcgcctgatgccgtataagatgaagtttgtgatggctgatcatgcacggttttgcgcaggaattgtcggtgcagtgctttacagcattgagaacccttgctgaacctggcttgatctcacactttcttggatatttctcatgttaacggtgaatcttccatctctactaatctttccttgacttgtgtaccctgatatagcgcccgaaatgttttttttatcttactaatctaaaatggactacgaatgaggacttgtgtttgaggtcgtcatcataataatccatacatattctatataacaagattagctagaaataacattaagaaagacatgatcagttccctagctaggtctatatacaattaaatcatcaataacacgaaagcatagactagtaagccatccgctttccaatctcactctcccacccccgaactctttcgaacccatttgaggcagtctggtaatcaagcatagcttgatagacctcctcctgacttgtcaacacaaacggcccgtactgcacaactttttgatccagcggctgcccagcgacaaggatgaatctcgagtcctcctccgcattatctggcactgacgcctcgacgtgatctccactctgctcaaaaacaacattatggaattgcttcaccagctgtgtcgagttatttgaaccgaacacagtcgtcccagccaatgtgtaggcaaacgcattccaccccacagggaggatctgggtgatccgaccaccatgcttgatcgccacatccagcagccagaccggcgtgtaagcaagatcacgtacagaatcaacaccatggctctgtccggagataaccttaacagtcacgcgaccctggtcaaccgtcgcgacaggaatcttgctcgcgcgcaaatcgcggtaccttggctcacacatcttcagcttcttaggcagatcaacccacagctgcatgccgacgttggggctgccgtcttcgttctcatgcggcatctccgcatgcatgattcccttgcctgctgtcataaactgcaaatcgcccggtccgattgtgcccttatttcctgcgaaatcttcatggtcgacaccaccagaaagcaagtaggtgattgtttcttggcctcggtgcgggtggtcggggaagccggcgcccttgccgatggtaaagtgatctagcatgaggaatggcgagaagttgcgtagctttggagtgccgattgaacggcggacgcgagcgcctgcgccttccgcttgctcgatagcgaggaagacagtgcggattgcgcggggaacagacatttcgccagagaggatgggatcagttgatgggaaagattctctggtaggtctagtcgtcgcgatggtgtagctctgtaatcgcttcgcgaagaccttcaagtaatcgatatcaacactgatcttcaattgcgggtttttgaagttgagagcagtaaagattattgctgcgacgccaacaaaaatagaccaaagcagtttcatcggctacaacagcggctatttatacctgtgtgcttggtggataggaaagtggtagaaccccctcgcggggacgacgacgggcatttcgtcacattttataatatccgaataagcatttctatacggctcccttacccaatgcggaaagagcaaggcttcgacaaggatgacaaaggttcatgtcagctgccaagagctggggcttccactttttgtggcactgcatttacaagcatgaatcagcatgattgggactaagtgggacgtacttggattccagttcaatcgttactatgcattaaatatactcaatctgattcgtctggcaatgcagtctgcaaatgcttcgtgtatatatgtacggtcactacagtggcattgtaactgagacggcgctatcctgataagggaagctaagataaagtctgccgcggcacgtgctgataagatcaacttcacagctgtcattaacaccaaatagcattgttgggctgttctctccatcgctgaaatagctagaatcggtccagttgctctaatttcaaccaatcttcttgttacggcgattttgatcattactcgctcagctcataccgtggatagactggctccatttccagagcaattagcagcgggtgtcgcccggcagcatacaactctccaccgatgcgcagacagtcgagaatagtagcctctctgcttgtgctagcatgtgcaagctccggcgcattcgcgcacaggaagttcaatgttcatgatgatctactagcataccctcaggtgaatcgcgtttgccgtcgaaactctgcccgtgctgacgatccctctcgtagttccgtatcaaattccccgatggctttatcctcgagtctcaagcacgcgcatttctagaacaagctccctatagcagcccagacctgaacgatatctctgaacaaacgccgttaaaggacgaaagtgaagaatcgatacgcgacggatctagtggagagaaggccaaattctcgtatgaggagctgtctctcgaaggacagcgatatctttgccaaatccctgttgtggaagatggcgacagcaatcgaacaaaagtagaagtgaatgaggaggaggagcgaaaggagctcgcgcgagcaacagaccgaggtttggagctgctgcgtgagatggaaggcaaatgcctctactatatctccggatggtggtcttattccttttgctacatgaaccagattaagcagttccacgcgcttccgtcaggaggtggtgttcccaactacccgccaatggaggatcacacgacgcactcgttcatactggggagatttccgcaagaagaaggtcaggatgagggaaagggtgcgaagtcggggaagtcttccacagaattggcagaattgcagacgaaaggaggctcgcgctacctggttcagcgacttgaaagcggcgatcagtgcgacctcacaggaaagaatcggaagattgaagtccagttccactgtaacccgcagtcgacagaccgtatcgcctggatcaaagaactctatacgtgctcctacttgatgctcatttatacaccacggctatgcaacgatgtcgcgttccttccacctcagcaagaggaggtccataccatcgaatgccgtgagatacttactccggaagaggtcaccggctggcaagctatgcatgagtaccagttatctcaacagctggtagaatctgcggaagcacctaaacatcaggtaattggtggtatcgaagttggtgcccagcggttagttggactagggcagcgcatcagaaagcatgtgt

SEQ ID NO: 1516 - DNA, 4258 bp, Emericella nidulans
gatcaggcaaggtcgggaagtcaaattgccaatgcttcggtgcaagcggctcgaaaccgcgcatagccagttgtaagaagagatctttctcctgctcagtgtatcttccctcagggatattggttacatctgccagccgcttatcccgctccctgttgaagtcaaagagtacagttgccctctcattgtcgggaatctgataatcctcgtcctcctcgtcatcgctgtcagtctcgttattgcggtctttgtaagttgcggaccttctacgtgctggaactgctggcatatgtgttccgtgtcggctagatgtgctggaaactgaagttgagatagttcttggagggctggacagggctaagggttgcggccgcagcggcgctttaggcttcagcctctttacaaccttcgatgattttgcgaaactgtggcttggtcttttgaccgttgacactaaatgaagcagttgttctagcggtgaaaataatgcatgagatcggggtcttactgagatggggcttcttcattataggagaggaaaagtctccaggaagatccaatacatcttcatcttttgaatctccgactgtcactgcctcgtacttcctctttagtgggtgaatcactggactaaaatcgctctttggtgagtccagctcactttcgtcctgggggatgaacgcaggctctgaagagtgttttcgcttagccgtggaatgtacagctagctttttcttatcctcgtcatggcccaactgtagttcatcgtcgctggaacttatagacacgctgaacatcatcgtggcggagggtatgtgatggatgcaagggagcttgttgctatcacaaaatgaaaatgtttgaccactctcgtaggaagcaaactctcacaagtcgagttcatgaaaaccttcgaaaatattggagtctttttctggcaagagaggtggcgggtgggcgctgaaaggacatcagttatgatgcatcaagtctttgtgctgcggttgttgctggagataaagaagctacttgagaacggaaatagatatgccgcttgtgtttccactctgttgtggtgtgattgaaaacctggatgagggagccctttgaggacaaagaaagcagagcagaagggtttgacttgagggaaggaaactctttggttgccttttggagacacaacactggatttgacatactagagaaagatagtacaaaggtaaagattgactaaatggtgggcagataataattgtcactggagtctatacagattcaagttaaacaacctgaggacgactcgaatcgattcctatcaatggcaacggcagcagctagttgatgcgattgccgcgtttcagaaggagcaaaaaactaacttctcccattaggccatgcagcattattagttaagtacttggtccaagatagcgaagcacaattacattccttgaatgcggaattaaacgatccgttacaaggacagacgaccgtggaataactgaaccttccccagctcacacccacccttttatgtcaatctggcccttgagtccactcgcccctgttgtcaaaactcttatggatatgtatgtgtaatgactcaaatttcagtgcaaaaggcgggaagcaaccgtcagaaccaagaagcccgaatctgacgtaaatccaagtttgaacgtctcgctagtgggaacgtttggactaagcaaaatccgcggtgtacgagaaaccacggaactcttcttgcatcgcttgggaaagaactaaaaaggaggattagtatctggaagtaagagaaaaaaattagaagtgtcttacctgattgcactggagttagcacaggagtgacgctggtaaactcttggtcgaagttgctagtatccgtggcgctgctgatagtaggcatgaacggtggcggcacgcgcttatggtagatgtcatcccagttgatgtttcggaaaaaggcgtgggacataacttcttgcgcatccgtggggccggaaccgagcctcagttcgggctcgcgcgtcaacagcttctgcaggatagaaactgagtctctaggcatgtgaatggggtagagaggttcatccgcaagaatggcatcgtagatctcgtcttcgtcctctccacggaatggagactgctgcagaagcatctgatagataagaacaccaaaagcccaccaatcaacggccctgccgtacttcttgtcaaggagaatctgcaagtcattagcatcccagaattcaaattgagcgaggtgatcatacttcaggagccatgaattctggagtaccacagaaggtgcttgtagtagatccataccacatgttctccttgcagagaccataatcaccaatcttaatatggccatcgagagttagtaggatgttgtcaagtttcaaatcacggtagataacgccattctcgtggaagtatttcagagccagtaacacttccgccgcatagaacctggaaaattacgtcagttgtatcgccaaatttaaactaggtggggatgcatactgcgctctctacagaccgaactgacccctctggatgtgcagcatgagatctccaccactgatatactccataacaaagtaaacgcgagtttccgtttggaaacaggcgtggaggttgagaaggaacgggtggcgctctttgttggcgatcaggaagactcgcttttcggatttcgtgctctcaacttcgtcattctcaatgataaactccttcttcaaaaccttgatggcatatagtttcttggtagccttggtctcggccaacatgaccttaccaaagttaccctttcctagaacagcaaggaagttgaagtggtccaggccaatcctgaccttcggttgctggggaatatcttctttcgcagccacttgctgttgcattgcctgcatttgctgttgctgttgctgcggcggtgggggcgcatgcatgccgtactgcgctggcgcattgaccttctgcattgcctgggctggcgggtaaccttgctgcatagcgccttgctggtaagatgcgtatgcagcagggtcgtaatgagcatgggccgggggctgaacaggtcggcctgcatctatttttaaggtgttaatacctgcgcaacagaagagcaagaccctgctacttaccaggcatacgtcctgtcgccacggcggcagcggcagcggcaggacttgacgaagaagttcgtgggggtaatggttgtcgttgagaagtaggcgattgtggtggtgggatatatgaagtcgccgcggcactcactgcttcggcagacggtggtcgctggccataggatgatgggctttccacaggctttgggtatgcatgacctgcatcttgagagccgccaggtcgaagcgtcttcccactcaatccagagctgacggaaggagacttgttgtggtttttgtggcggataagggtctctaggatctggttcgctgcctccatggacataccacagaaatcaggtacgagatgcgtacagtgcgcatgacaggtaagaccacactctaacgagaaaaattagccatttctttctgccgtaattatggcaggtctccttacctgaacagcgcttggcattttttcgaccgaaaggcagtaaatatccgcaatggcaacaccaattagcggaaatgttggaaaacccttcaaagcgatgcgggatgcggtggttgatcttctcctcgtcgggatccgtctcgtagttcgccttgctaatacatttcgtgacaactttggggtagcactttcggtggcaggtatacttgcagtcggaacattgcattccagcagcgtatttcaagaaatcgccgcaaagcgcgcaacgcatgatgttgtagaattgctgcgtgacgaacttgtgaccttgcttctcgtgtacttcctccttcctctgtcggaccgcaccttgacggttgagaccgatgtcgaacggtcgtcggtccttcgagtgcttggctggacggcatgttagcatgggaatcaaacttagttagataaataaaattaccaaagctcattgatatatggattctgcccactggctccagggcaaaccatgcgtcaatcatcagcggtccaccagtagcgcccgtttggccttcaagtccagggctgctatagcctgctgaggctccatactgggatgaaccgacccgtgcacaggggtggtttgcccagaccaatttcaggcccatcttatgccgcgaacccaaccggaagcatt

SEQ ID NO: 1517 - DNA, 2882 bp, Emericella nidulans
cttgccgctgtgggactcgcattcgctgtctgataagacgacgtgtcctgcgtgtagacctggtcgaccggaacccgcagttcctgcgctgcaacctgcaccatcttcgtatagaggccctggcccatctccgtacccccgtggttgagcagaactgatccgtctgtgtagacacggacggcagcggacgcctgattaagatggagggcggtcgcgaaggagatgccgaatttggtgggaatcagggctattcctcgtttgcgccagcggtgttcgctattaaaccgttcgatctccttcttgcgcgcatcatagtctgcctcctcgcgcacttgctcaagcagcaacggaacatgccaatcctcgtcaagcacctggttgaagggggtgcgctgcccgacctgatacagattcctccgccggatctcgtcgacatcgatacccactttctctgccaccgcactgataatactttcagtgatatacatagcctgcggcgccccaaagccacggaatgccgtgttggagtgcgtatttgtcttacacacccacccgcgcagccagacattcgggatgtagtagcagttctcgatatgcgtgaggcacctgtccattaccgcggcagacatatctactgagtagcccgcgttattgtaggtatctgcgtcaaggacgagtagttttccctcgcgattaaagccgaccttccaccggcactgaacagggtgtcgttggccggaggtcatcatgtcttcgtcgcggttgagcattatccggacgggacggcgtgctttcttcgccgcaacggcgacgatgcacgctattgggaccgatcgagactcttttccaccaaaggcgccgcccatacgacggacccgggcgttgatcttatggcgtgggacgtttgtcacctgagagaggaagtcttgcgtctccattctgcatgcaaagagttaggacaagccctagagggaaaggcataaacgggggaacatacgtgttctgggtactgctccaaacatccatactcccgtcctctgtatgtggtaccgcgatggcagcgttcgtctcaagatagaaatgctcttgccctccaatcttcgttgtgcctgagagagtatattcacagtcatccaactcttttctgatctcttcaggcggcgcgccccgtctgagctccttcccgtagttgaagaaggacctcgcttcgattgcctcgtcaattgtcagtatagcgggcagatcctcatatgtaactatgacagctttagccgcaatctgtgcagtcattgcgtcatctgcatacacaagaccaatcggttggccgtgtgcgtgaacttcacccttagcaaaaaccggctcatcgtgcacaacgggaccccagtggttcttttcttcggggagagaagtatgatcaacatatcccacagcgccccgctcaagtgcaggggtccagttgacactgaggatcttcgcatgagcacgttctgatagaacaagtgccccatgcaactccctatgcagcggaggcatatcatcgacatactcggcctcgcccgttgcatgtttcaggccactgaggtgcggaatctgctgtccgacgactcgctgagcgtgcggattgtcgtcgtctcgggtccctgtggaaatacccctgtggatttcttcaatgagatcgctgtcgtattcaagacccagcttctggtttacgtagttccagaaccgcacaaagagggagagtgtcaatgtccttcggtatgtcgccattcccccggggacgctataaggaaggttgaactcttctccaagagaggtgagaacgatatcgagcacagcctcgtcaccccagcgtttcccttcaagggcagatgcggtcttgtgtgccaggacagtggtaggcgccatgccgccgaaggccagcgatgcctcctgcacagtataatctggaccaggggcgatacgaacgcggaatgcggcagtgacaatggcgatatcgtcgtcctttcgctttgcctgtttgtatgcgttgacgatctcgatctggtctttggatggcatggggacagcgatcttcgtgataagcgagccggatggaagggctgtctttctgtaacccttgaacatctcggacattgggatggtcgtctcttccgccgaagttcgtgcatggacggttgcacccacagccagaagaagcgggttcatgtctgaaatgggagacgccgtggcaatgtttcccgccagacaggcagcattgcggatctgccggcctgcaaagtagcgcagagttctagcgatggcggaaagcaccgattcggagccgagatttactgccttgagcagcggtatacaccgcagacactcagcctctatatcggatagagaggcagagccgcccgatatacagcgtcttcatatcctcactccatgatataccagtcatctcagtgatatcgccgacaaacacagagacagacggcctgaagtctttgaaccggacatcaacctgcacctcgcttgctccagtcacaagggtagcagacgggcactgcgagagaatctccagtgcctcttgcactgaccttggtttcacccaggcctgctcagcgtcaccgtaacagagcagttcgggtacgaatttggcgagtccgggcgggtaaattagttcggtggttggtgtgtatgggataaagtcatactgtttcaagacgggagaatctggcagtgagggcgtggtcatgtctgtttctctggaggaacacgacgaaatgccagggctatctttgcagcagcccccaggacgaccgcaggagccgcttgaccttgatcccgtatcaccagatcctaagcttgggtctccctatagtgagtggtattattta

SEQ ID NO: 1518 - DNA, 3254 bp, Emericella nidulans
tattgatagtatgcggtccgcctattgtcttgccaatggaacgtccatctgtcgggtcaataagaggtgctgaagaagcgacagttgcggccagggcatctgcccaaaacggctcggtcccagtgttccttcgctcgtaactcaccttgagaggaccgttttcgtagaccgtagagttggcggctatttcgtactcaatatcggatgggatggtcagactgctagagagcctgaactgctggatgatcttgtcgaatctcaacccgtcgattcctgactcttccgcccactggtcatagacgctggcagcgccacgggagtaggacatgaagttgatggacgtgccgccaccgagagcatggccctgcgggaagcgcacgggaatattcccccgccttgggtctggttgggaggtgtagttccacgaatactgggtgttttgaagtctgccagcaaacccaggggtgtagatgtttgggtcattaccgccgtcaggtccagcctccagcagggtcaccgtggctcttggatcttctgatagacgagcagcgagaacgtacccagctggccctgcgccgataataacatagtcactccaagaggacttaggattcgccgcgcacgtaagagaggcagagatgccggtagtgacgagtaggtgaaacagtcgcatgatgatctggcagaaagagatagtgaccagaaaatttaataaggacagtgagtaaaggcttgggagattggtccttatacgggattaaagagtagtctgctgatggcggctttgcagttgatctggaaggtgcatcccacaactgctgttgtgtaactagttcacgatgttatcgcagctctgttgtccgtcacaatgtgacaacaaaacttccagtaggccactttctgctctccagatgtacagctgaggacctgacctagggctctccttcgcctggctctcctccatcagacggtatactgcggtggagaggcggcaccaacaatatgtgataaagctaagttgacacgaatgtgggcgttcaggttgcagtcatctgcatatattatagttgcacatggcctgttcgcacttacacctggttccacttgttaactaagaccgactagaccagctgcctccatccgagattagccctaagtctgttccattccgcaatccgcctaatctaccacaatgactaccgaaaagtaccgttgtacctttgaagcctatcccgactctttcccaatagcgcatgactgtccccgcctcccgactattgtaattgggctcgggaactgaccactcggcgagaaacgtaccgccggccggctggaaagacgaagaaaacagaaatgactaagcaaatcagcccatcagtcacgtgttgcgcgttggcggctccaccatgacgatgtctccgactccaacttctagctccgatttcaatctccaactccaagaacccctccgctcgaccaccacatcccgcagagcccctacccgccaccgccgcaatggcctcaacgggtcttgaaaatgaccctttagcacagaaaatcgacgcccttggttctaatccacgaccgctcggcctcccccccgttctggcgcccggcgtaaagctggaccccaaatcgatctgtcatcctggcctcgagaccctctacatcggcttcttcggcacgagaaattatcacagagccgtcgttcgcagactcgcccataaacttgaaatcggcagtgctatcgtgaaccgccctctgacgcaggacgagctggacttctacgttgaaaccattagccaagctacatccaataatcgctggggcctgatcactggcgttgagtttggaatgctaacaggccttgttctcggacaaaggaagaaagagttccagcagtatgcgccgccgctcgatgcgaatagaccggccatcttcactcggtatgtcgagacactcaaggcaatgcgcgtggcggacccggctgttttccagcggactataatatcactttgtaaaacgactttcgttggcgggctctgtgggtggtttgttggatcggcttacgcgatgtctcgcagcgcagcggctgcgtcgactgatccgcggataaaacaacatcgggaggagttcatgaaggtggatcaaagggtagcggagaggagacgtcgcgctgctatggttgcgcgtgttcaaggggctcagggcaagttagaagacgatctatacaaccaagagggtctataccagggcgggtttgaggagtcgtcttcgactaccgcttcacagccggcagatacgtccgcatcgccgacaatccaatctcagacttacccttcaaacactcccgccgagagccaaagtacgcctgcttggccaacacctcaccctgacacctacagctccagcgtaccgacatctggtcagaacaatgacagcacattcttcgacgacgacgccagcccaatcgcaccggattaccgagatacaaataccgccccacagggtagtgcctgggagcgcatccgacaacagaaccaaaatccgtcttacaacccgtctgtaactcaaccgcaataccaacgagcaccgcccgctgcagaggctacgggtaatgacagctatcgagagcgagagcgcgcccgagccgagtttgaccgtatgcttgaagcagagcgaaaccaacacagtgactcggacggcggatcgcgcggcgcgagtgggtggtggaagtagagtcaaagcccttatctatgatcgtgggcgtatcatctatctgtattgtcttccaagcgagcttgtacaacaatagcggcaattcacctcatttgattcatctgattcggtaccatatacagtacaggcgggtaaaaaaccaagccatgtccatactccacgctgtctcacccattcgcagcagctacattattacatgaatatcccaagacctctttcactacatcatcataacttctgcactgtaacccatcatgataagtctccctagaagccgcccgcaacagcacccaggaccaccgcggcaaggccagccagcgagattggagccagtctggaggatgcccccgtaggggttggctcctcggccccagcagactccgtagatgtaggctcagtagacgaggtctcagaatctgaaccagactccatcgcggttgtcgtagtcggttcggcagtagaactctcatccgtcgttgtcgcagtcgttgtcgcagaaacagtcgggagcgtga

SEQ ID NO: 1519 - DNA, 2316 bp, Emericella nidulans
gccgccatgatcctacttgtccagcattgacagaccagattgggcgtgaattctacagtttgctggcagtgatatcgaacaggtgagtgctccttgaaggaatgataccccttcaaataaaaaacaagcccttgaatcagtaaaatactccaatccacttcaattctacgagactaccatgatgaatctttacaatggggatccagctttgtcgtacaaattggacatgaccatttatacactgaaaattctgatccaatctcgtccctttgacatccgtcatatacttcccatcgctcactgacttgttgaagatcctatatatagtggatatatgagggtcaaatttccatacaacttcaggaccagttcgtaggcagttatttaggcaaggtactctacagtcagctcatacaaatattcatcaagatgtccaactgagtctttacatttatagtccacaattacacgaaatggcatgaatactaataaaagcaactcgaacatcataaacctattaaggacaacccacatgtaatacaattagccttgtgcaatcgattctaatttcttctcatcccctatctctctctctcgctctgtctcccccttccttcctctaaaacaaccttcacccaatcctcctgcttctgccgtcgcttcgcctgcattgatacctcaggcgtacccataacgtgactgtgcgcgccccgtctagcagagttgatcgagtagatgcagtaagaacacagcacaacagccattgtgaatgctgctatgggtgcgtttagggactttatgtttgttagcctgagtattgcacttggtgaggagaaaaagaagaaaggagcaagggtttgcttacgcctgaagagcggccgagcggtttcttggacattattctctgttattaattcctcgctcttggtagtctaggcaaatgcagaaagttatttgtttaagctaggatttgctcaatcgtggtgttggtcgatgaaaaaggttgttatgcttaagtggttttgttgaagttgccgcgacgggtttgctggaggtgtggatttaagatgagctagccatagaggaaccaagtcaaatgtattacgcattaagtacagtccggacaaatacatgttatccctatcaggttgctcgaggaattgaaattcttgtgggtttatatatctagttgaactcttaacatagcagattataagtaatttccaaaaaaagcgaaaagcccaacgggattgtctagtaaagcatggtcaagaagggttgaagagaatcgtaagcatcacaagaagagaaataacagagaaacgcctcgccgaaatgcacaactatacaaggcgaaatcccgaattaaagtaatacagtgggtaggaagatgcactcatggttatggccgcggactacaaaagtcctaaccgacttctcaacaagagcacagtttcgtacacggaaagctttagctccacacgcaaaaattttgtccaagcgcaaagaaattgccagaagtttgatgggcgcagcaacccaccgctctcattgatagtatccatctgctcttcgaaaactgtgcgggttgcgtagcgcgcgagaataaggaacgtccgtacggggccttgccgagtgtgaaggttctcgtcgagactgcgagctatcaaggcgttagtgagactgccctagatgtaagaataaggagacctactcaggtcattggttttaaggattaggagcatgatccggggcacctggcccagtaattccaccagctgctgaagcaagccttcaccgagcgcaccagtgatgctttctttctctgcttctgtgcgcaatgaagtgatgtttttctttgttagaactgtgtaatctctacctggaattgcgcctgcgaagagagggacctgctcatccgtcacacccgctccttgcgtgaatactcgcgcattgcagccttgcaagtttcgatgaccgagagccaaagttttgcatagttacggcgcgttttgcgagggatttcgcggtaccaaccggggccgtaatgatgatgcccaattgcgccattccgtttgggtcttgcgtctgtcatttctcgcctgaggctccagtgtgttagtctttgttcaaatctcttttggattaccagctggtctttcgatctccttattcctttattacttctataatcttctcttagtcttgtctctttatcaccccaccccctctccactcgtatcttttagtgttatattttatttctttctttatatctgatgtttcttctttcttttttcatgatttttttattcc

SEQ ID NO: 1520 - DNA, 751 bp, Emericella nidulans
gtaatttgaatccgaaatcccatgtgcattggcaaagagagagggaaagagtaacatggaccagggagactacgaacgagccagtccatgctcgcccgttgatctgccccagacgctgctggagcccatcctcgtgcgctatgcaacatggcagggattcaccacgagattcgacattacgctgttgtcctttgcgcgcgacgagaaacagcgaattaccgcaacagtccgcgacaacctttcgcacaaagagtaccagattcggacgagatacctgtttggtgccgacggggcgcgaagtcagattgttaagcaactgggcctgccgctgaccgtcaaaccaggccaagggcttgcgatcaacgtgctagtaaaagcagatctctcccacttggtggcgcaccgaaagggaaatctgcactgggtcatgcagccggaccgcgaccatcccagcttcggctggatggccatcatccgcatggtcaagccgtgggatgagtggatgttcatcctcttcccaactagaggctatgatcctgcgagcgtgagcccgtccaaggaggaatacctacaccgagtcagggagctaatcggggacgaaacgcctgccgagatcctgaatatctccaagtggtatatcaacgagattgtggcggagcatactcagacggtaataacgtcttttgcctgggcgacgctgtgcatcgacatccgccactgaacggtcttggatcaacacttgcatccagga

SEQ ID NO: 1521 - DNA, 792 bp, Emericella nidulans
atcgacttctgcaggtatacaagatatacgaggtaaagtcatttgatgttcattacagttaccaaaaacctgtgacggcataccacaaaatctagtatacaggacgatatgcgcatgtcgcacagcttacctactcagttaggtaaagctttgtaatttgcatactgaatgggccatcatcgaacaataattagtcatcccgcatcccttcgtctcagtaataacagcggagtaatgtactgttatcctccactccctagcctcggaccgcatgcctcggctgaaccgaaatgcggggatcgccagtccagagctgcttcacctctactgcattcatgaacccagccatataactgttcccaccccgtacctgcgccaaattcaatcttcactaagacaaagagcagcggcaaagcaccatggccgagatttccagcgttcctttcgctgaacccccctacctcaggggcctcccctccccctactacaatgagtctcaccggcgcttccagaaagcctgccgggcatttttgtacgagaacctgctcaagcacgcaatggagtgggaaaaagctggtacagtgcccgagcatgttttctcggacttttgcaaggcaaacatgctcctgcctaacctccccgcccccttaccagtcgcctggctgaagcgcctgggcatccacgacattctcggcgtcaaggttgaggaatgggactacctgcacacgggaatatacagtgatgagatggcgcgctcaggactcagcgggccgagcggctcgttaacggccg

SEQ ID NO: 1522 - DNA, 5667 bp, Emericella nidulans
accctagcctcgcggagcttctgctgcatgaggaacgcatctaggatctcgtctctctcaaagaccactatcgttgcgccgtgcaagattccagcccatatctcccacattgacacgtcgaacccaatgttgcagacatgcccaagccgttggcctcgtcgcagtggctggaactcgttgaacgtgagattaattagcccccgagccagaacctgaacggccttgggcatccccgttgacccggatgtgtgataaatgtgggaacacgaggccggaccatttgtggcaacttgtagctgttcgtgttcgacttctcggtcaacaacctgctgcgaggagaagtcaatcacgatgcgcgggatacgcgtagatagacagcggttccggttctgataatctgctaacagcagcgaatcttctccaaggttgttgatgagttccaccaggcgctcttcaggaaggtcaacatccagcggaacacagctgccgccagcaaaaaccgctgctatttgacagataatatggtctatccctcgagccgcaagaatcggaatcggtatagatctcttcggtcgctctcgcacattcgtatcgatctgcctctgaatcttatgtgcccctctcaccgcgctgagatacagctcctgaaaagtcacaacgcggttcccttgttcgaccgctacttgatcgccaaagagctcgaatctctgttggaggaggtgagcgagccctgtattaggtggaggtttccaaggcatgatgggctgtatatctatgcgtctgtattcagtgctgaggagtacggaatggtgttgctaagacctcgaagaaagagggatcttgaaacacggctagactgcgaaacgactagaagagacatatctgccttggagctatgctgcagcgttctataattgcaacatcaaaacagtatccctgtacttctctctccccagattcacaactgactctggcaaataaaaatgtctacgccatctcccagtctgtatcactacttggaaagcaagggatctgatcatgaattacatcggcgcatacgttcaggcggggtcgctgaacttgattgcacagcgcatcgatacagcaatggaaggatttgccgtggaccctcactggacatatgtgtgcaggtgcagatcctagaagagagtaggtatgagaagagcgtgactaggtcgttgctctctgcactgatagaggaggcgccatccggccaggagcctatcagccatagatagactagcatctcataggtgggatctgaacccgagttcgtgcgtctggacgcgtccagacccggccatcttcctggttttgtagttcagatgcaaagccggcgggagcccctggagcgcaaatgactggccctgttcagtggcgctggtgggcatctactagcctaactacatgcacgcggctgtttgtgccccatgtcaagccattttcgcatatcgatacttggaaggctagggctctgatgcgagtgctctaattataaaacaattgacggctcctgtgatggacccagctagccggagtatgtaacattgacttgcaagtgtataccacggagagctatcttctgatagcaccaatatcaatatggggtgcatacagttgtctgaagatagaaacgcctccaagactggaacattggaccagtcattgaaagctggttaagccggttgctccatgcgtttgcttcaagaccctgcctgccgaagcattccaatactggcgaatatgaagttggacatcatattctatgttccggtgtgagtccttgtccctccgcgccatcccattggtctaatatacacagccgaacgctgtgcttccttttctcgtctcgctgagcgtacatgaaggactcgtcatagatgatgcaagcaacataccctgctcttcacagggatagccttgtagtaagtcatcggacactgaaagtttgctggccgtctgacgggtacttcagtgttgcatcatttagccatgaaccggtcgccagtggatggcgagctatcatgaccaattgtagttgaagaagagaagaatgagagatattgagccggcgagacatatagacaagcacatatgtgggttcggtcatgcatggcccggcactgtttggcattcgccagtaagctcctggtttgtgctgggagaccagggtggccgtcaactccatcattgctaattcacactggtggcgatgtgtcttgtcaatgcctttccactgatgctcgtatgctagaaggctagataggcgacgcctatatgcagtccctagagaacccaacatctgccagaaactgttacattggcactagcactcagagaaaaatacggagtccattaggtttctgacgcattgaggacacacatcaattgaacaggacgaacagtgagtagcgtatgggatactgcactgctcacgagtttacagtcgatatcttgacctccaacgggacttatgccttggagatgcgctccctatgcggaggaactctccatatactcctacataagtctggctacagatccctctattcattctgctcgttgtttgcagcagctaacaagcttgtcttaaatgatacctttaattttttttttctcagggtaggccctacccagttcttgcctttccatatgtagttctctcaaagtccacatcatcgcctcagaagtgtaaaatatagatcaaaaatcactcggctttgccgcatcctccggataaagcacatagatggggtcccgctggtttacttgtccgcaagctggttcgctgatatagtacccgatgaactgctgcgtagccctgtcatagctcttcaccacatcccccggaacagcgagatactggttctcctcctgacgcaggaacccgcgcgtcgcaaaactgcagtagatgagtctgtgctgatcggacgtggtattgttgcccccaccatgccgaagggacgagagcatcatgaatgcgtcaccttttgacagtctgggcacaatgatagcggattcaggaggtggagtatcggggcaggaagacctgttattttcccattagagtgagccaggagctcctcggatgcattcactacttgccatagatgacttcccagtataacttgggtccccccattctcttttgtgacctcgcatcccgcaacaaacatcccaagcgaggtctcgcggttcgcatcgcgctcatcgttccactcggctatctcgtctacgacccgatgattgatataggagtcacaatgtaacggctgggcctttgcaccgggcccgacctgtatagccaatgccgcctgcacgtacggcctggagacggactctttgcgcttgttgccccaccagtatgtgcttcgtgtggtcaggaaatgggcgctggtcgcttgaaagagcggatgcattaactgcgtgcggacgtaggttgggctaatgcctatgaggccattggcccgtttagtttcctctggcggatgtcagtggatagacagctagacctagggctggagggaggtggtcggacagaacagacttggaaagaactcgccgtcccattctaggtccgcgttcagcgtgtcttcaatttcttcgtatgtctgatccaggtcttcgtgggaaatcaaattccggatgaccacggcgccgtcacgtttcaaaagatagaatatgtcatcaacgggggcgctggggaggacatactgcagaccaggggcggtagtctctggagacatgcattttaacagtctaccttatgatgatgatctgactcgaactgtgagagctctaacttggcccagaacatacagatatactagtctgtagaggctagggcctgcatccagatgcgcaacaacagcccagagccggcttgtttacacggtgaggggaacgcgatcttcccaaattcaattgcttccgtacgacgatagctgctcctagctaactactaaaagcggggtctacaacgaatagaatgaagagacggacagtttggcgatgctgtgaaaccatctagcatcgtctgccggcgaagtcgacccggggcgctcctctctagcacggctgggctgtctatgagaccgtgcagttacatcgagtgtctatataaaaataaaatactcttagctgcgtattgtttgcaattggcactacatctcgtctctgctgtcctgcatatatcttcaatatctgccgaaatctctagatcgtctagaacgtttaccctcgtcgcattacggcggtggctcagctgaatgaagctggccttccctgccctggagcaggctggcgataggtctatattgcgtcggcggaaaagatctccctactgcatgaggccacacccatggaagttaccaatactctgccctgggtggtgcgtacattcggtaaatctgactacaaaaagcatattcgttccgctgcgtaatcaagacgtgtagtaaacttgtatttgcttgttccccgaatttgagctatcaagcatgctatgattacgtggcaacgattggttgaggtagaaacctcgacgatatgtctttgcgaatgatcgcttgtgagatatcatgaggccggcgtgattccggcagccccagcatcagtgctagatatttgtcccatgtaagagagttgcatccttctggtccttcaagcagttttttctgtctaagctcgccctgcctacaatgacccataaagagccctggggcgtttcctggcggtcttcgaagccgtttatcgtgacggttattgcagttgccatgttcaccggtcagcaaccatactgccttcactaacatcccaggactcttgattctgatagtggtagtatgcagatagcttcttgtttggcttcattgtccccattatgcccgacatcctagaagaccgcctgcgaatgccacgctcaaatatccagttcctcacctcaattattctttccatgaacgcaattctcacgatacttattgctccctttacagggtacctctctgataaagtggcacggaaaaataatctcatgctctggtcttatgcagtgaacacgctggggacaatatttacagcggcgtctagcacacgtgagtcattcactcactttaggattagagaatacatcagctcaagtgtccgataatacagtggccggattcattatcggacgtttgatacaaaccgttgggggttcgttaatatatatcgctggaatggctatgctgggcggcgctgttggcccagagcatctatccaaagcaatgggcatatgcgtcctcctcatatctggcggctttctctccgctcctgcgttgtcggccactctctgggagttttctacctacgcagtgacctggctatctgcctttgcagtgctgcttgtcggggttctcctccaggcccttgtcatcgaaccgtatctcctcccgcgtgaatccggtcaagatggacgagacagtgaacattcttttgacttcgccgggatcagagaagaaagcgaatctgacttttagagctcgtgtcgtcggaaagcggagacggaatgtctgatgcggctcaccagccacggcgaggctgcaagctgacactgttacttaccttttgaccctatagcttattgccacatccaccctttcg

SEQ ID NO: 1523 - DNA, 3029 bp, Emericella nidulans
ttcagcacatccatttcggtatatgattctgtgaatttaggtatttatttcatgtcttcgatgctgggggctacgacgggctggacataacgaccgaggcggacgtcacatttattgatatatgatcaccacaaatgcaggaccatgcatttgggacctcggaagacgtttgctgtaaattcgcaatgcagtttctgtgctttagcgactgggacgccaaatacaacatgatttgtctatcagggttggactgtgtgataaatgggcagcttggttatccccctgctccccaaagatatatatcttgtgacgaaatgataacttcgtactttgagataatttatttgacaatgatctgtattgtttgagacaaagactactagcagataagttaccaaggctgcattgaaaatttcaatggtacccttgccatgcttataggaatttccggctgcttggtctgatacatatgcataggtcctctggcatctgatatctctcccactattttcatagattaatctagtctaggcaataatgaccatctggtctcgtaaaatgttcctctggcggagaagtgatttaggggcaggagtacacatcaaatttttttttttttatgtgtggttttgtatacccacacagcgaattgcttcctggtccatcaataccttgtcgtagtaccgattgataggatgcctagcgattgcatactaagtatgtcaagcatccagaatcctaccacagttccaccgtccatcagtatcttctaggcctacgaaagcgggtaggattcattccctaaccactaggcgcgagattgaaaagtcgcgcgaagagatttttctgtccctaatgccagcgtgcggatctgtggagcctcatctccacagtgtctcttcgttgcgagactagtgaccgaaggagtgcttctcaatgagctgaagggacaatgctggatttacacttgggctgttatagttactgggttgtggattatagtttcttctttgaaggatttgctcttttttttctttttttttgtttcggtccatgcaaaaactcgggatgttgtggaaggccagttggctcgggagtatatcttaaaaccacggatcagatacggatggtagatgatcaattgtaaagaccacgggatcgagtttaccacaggacgtcataggtagcgcttgttggatggttggaagcttaaataagtcttaggacatgaaagtagacttcatgcctgacccctccacgggatatatatatgtacagtatgaagaccagaggccttcaagacatggcgtcgagactgctaacaagcctgatgggtatataggctatttgcagttgatgaagtgattcatggtaggacttgttactcggttctccttgacacagtagatgtttatgtggaggttatcaatctcactgtactcaggctgtaccctggactctgccatccactcactagctatatatcgctgggtagagatccaatatacgcaaacatccaagtgagaaaaagttctgcgagcaacggaagaagagttggtctgaatgatatctgacaatgagaagtcgtaaccttttttcatggacgaacgagatagaatgaggaatccgggcttgagtttcaagggaatcgccactgagaatattttggcacagtttcctcggtgagattgagctcgtccgagtaggacgccagtacattctggcctccaggtcccagtccccactctacccttaaatcccgggcatgatagtgtcgagccagttgaagagccagccagcatcaatctcagcctcagttgttaaatcctgagttcgggcgctacgtactttgtagaacagaatacatgccgtaggcggcagaaacgcgtccactcggtaggtacaccctagtgagaatgttagaacagtgggaccaattccaatgaagcggtaaagccttgatagcaccgttttcctggttaagcttaggtttgaagctagtaagagctctaatatagcaatccccctgagattcatggtggtgagctatcgctattatggctatttctaggcctagcactcctccagagacacccttggaggtgactgagatatttgaaagcagccaaagctctgaatgactaagtcgtaattgtcgaattgcattttgacttacaagatactggatttacctatcgtcaagtacaatatacatgcaaaagcgagcgatcaactccttaaaagcctctggccagcgtccaaggctatcagacgaggacatgggaagatcattgccttaatctcttcatcagaacgtacgcgtaagctatctcataattgagttatgaagaacttcgtcttccctgtggagagcctgtgcttgctcgagcactttgagaacaaggctattctagaaaaagctctttgaaagccacctttatcagaccatacaaagcgtgtacgtcttgcctgggcccttgagcatttggagtggactattggccaatggaatcaaatactttggtctgataggacttgagtttctccaggcctccatacctgagtctgggttaccaaaaaaggcaagagaagagttaagagagaactgccttcgctcctcggctccgaaaaagcatggttagatattctgagtgtccttttaataagacataaaaggtcctcgccttttctgggagatggaatggggttcattaatgcagatataaccctaaccctccttaaaagacgcgtggtgctgccgagacctcagccatggatatcggagagaaaatgtaaaaggaatacttgattaattaatcatgcatctacgtgggggcagaaagcaacgaggtggtaatcgggattggggctaagaagttactaaagcaatctaacagggatcattaattactgtagtgactgggacagtctgtaggcgattgccctctcatttctttttctctcagtctcagctcttctttcacccccctttctttccctcccctaccatatcgtttttgaccgtatat

SEQ ID NO: 1524 - DNA, 2726 bp, Emericella nidulans
cttgtcgttgatcttgagcatagggaagtgaaactttttgacggcggtatacattctttcagtactagtcggctagagactgtggcgagggcagttgttgcgtctttgcataaaccggacgagacgagaaatcgggttatacgggtgcatgatgccgttctcactcagagacaagtccttgatatggcgaaaggctggacacctacattggaatggagggaagtatatgtagatgctcaggctgaggtggacaggggtctgaaacagctggagaaggagttcagtcctgcgcttgtgcctggggtgtttgcggcggcgttaatgagtgggaggtatggggccgagtataaggaggtagataatgagctcttggggttgggatttatggataagagggagattaacgattttggaaagaaattcacgaagtagtagcagtgaattgatgaggtgggacccatgaaacttcggtgcgatcagtagtaccgtttgcgatatatactacaagctttgcccgtagtacaaagcccttgttggatcatttgaaaagacaaactcgagagaatggtagaatgataggtgcaaacgcgtatatacggtgcgagccaactctggactacaaatgatgctttgaaaccggatatcatgataggagctgacctaaatgcgccatccatgaccttttagatgataattatggtgatacataccacaagactcaatgagattattcacgctggcattacctattcgcgtatgtttgtggcaggctcttcgtgtttgttgctgaaaataaacaaacacgagcatggattgacctgaggactttgttgtgacttcatcagcgatcggttgacaagcctggtcctcgtaacacgaggtaaaagcttaatttgaatgccatcattcgttgtatatccagcctggatcttcgctgcattgcataatacacgttgcaaccagctgtaacctgctcgtgtttgtggggtccagcctgtttgatttagggcggccccggccgatcaagcactgaatacgagagcccaccagcgggatcgtcggcttctattctgggatacttatgcacaacataactatgagttgaagagagcatattagcacaaatacgatttggaagtgcccttgcagcttatctttcagggatgtaacctaagtatggcacgttattcgaacaagggtgtgtccttataggctgtccttgatctaatcgcgggccaggatccaaatataatcatgatcgacagggatcgtcgtgaagattggagtttcgagtttcatccttgagtttcggccgctctacgttgcttcagtcttcgctttcgctaaaagactacgaattcggaactccgaggctgaggatagattgactaccttcaggtataagaaggcccacaaacccgcggaattcaccaggaccagacaccaaaaaataccaaagctcacagatctcatatcgccgcaaagcaaaagcaagatgaagttcatctccgttctcgctctccccggcctggcctacgccgctgtgcaaggcttcgatatctcccactatcaggaaactgtcgactaccagggtgcctacgactctggagcgcgcttcgtcatgatcaaggtcttttccctattacccgggatttctaggttgttcatttgactaacgaagccaggctaccgagggaacaagctacactgatcccaagttcagcacgcactactcgggcgccacgtccgcaggtctaatccgcggcggataccacttcgcgcaaccaggctcgtcctccggagccgaccaggcatcttacttcatcgagcacggcggtggatggtccggcgacggacaaacgctccctggcatgctggaccttgaagccggctgttacggcctttcaacttcggccatgtcctcctggatcaaggatttcggcgagacttacaaggccgccacgggccggtaccccatgatctacacgactactagctggtggcaggagtgcacgggcaatgacagcggtttcggcgagtacccgcttgttgtggcgcgctggggaagcagtgttggtactctgccagcgagctggagtactcattccttctggcagaatgctgacacttatgagtttggcggggactcggaggtctggaatggcagtgaggacagcttgaagacttttgcttcaaaatgaggaatttcttcaggtgtggatacatacttgtcaaattagttctagtatagcatcggcagcacgtcattccataccccaatttggagtaacgttacctgatgcggggttccaatgcttataaagctcactctctacttactcctctcccacattgacacaaacgctatcctctttctcgccatcctttttaacccagtagtcgcaatgaccaaatctaaccttcttatcttcggcgccaccggcgcaattggctcctacatcaccgccgcaatcacagacgcgcgagacgaattcggccgaatcggcatcttcacgagccagagcacactcactaagaaaacgaaagagatcaatgcactgcgcgaaaaggctgtcgatatccttgttggtgacgtcacgagcaaggatgaagtgctaaaggcttttgatggtatcttgtgatctacccgcgataaactatgggtgtcgggattgcataggcggatgagctgaccgaatacaactagggttcgacaccgttgtatc

SEQ ID NO: 1525 - DNA, 4053 bp, Emericella nidulans
  unsure (1)..(4053): unsure at all n locations
ccacctccttaaggttcctctggaccagtcagtcggacttcgtttatcccaatgactggctcgaaggacgcagggtctgacggccaagccttgtgtagcttcacctgctgtatacaaagtactgtacttgtatagccagtctacctcattgtatgatacatgcatgaaatttagagggtagcagggtccagaggactcgattcttccgcattttggtctaatggcagtgcctcttgtcctgaggattatggcagatagtttataacagcagggatgtcttctgctctgcccattcatcatgggtactctgtacaggtggaactcctcctgtgtaagagagtggtacaagtatatggcgagtctgcaacgggactcggtccgcatcaaaagactgctattatcctaaacacaaccaaatgaacctgaagccatcagaaaaaggaagaaaaagcgtgttactcgattatagctcctccaaccttggaatcttccaacccaaactttttatgagtttaacagtcaaaagtggtatgatacaagcggccaatcagagacgaatggtcctccagaaacaggcattggtcacgtgccctttgctgcccatctcagctgctgtcgtcactcccgcggccgctggagtcgttccgccagccggttatattgtgattggcacttcggtccccttccatcatccatcgtcgtcagcctcaaacaagagcgggagtccagaatctcttctcttttctgaaaagggacagaatcaccttagacttctattttctccccttactcttgggcccgcgctctctttccgtccttatacgtctcctgtctgactcagaggttcctgatcaatagtctccgttagtctgttgaatctgaccgcgacatggtcaattattgttgatcgatcaaatcaggcctcccttttctgcctatacatgcctcgcctacatttatcgtctcgagcaccatgatcacgatagccagtatatcagtgggctccagcatcttcttcactttagccctccttataatctccgtgcttgtgctgctactcctccgacggttcctgactctgcgagcgacgccggcatatttatccatccccgtctttcttgcgcttgctcttcccgccagtgtagttcttctagtacccattgacctggcctcgagctcccgtgacaagggcgaccgtcccaacgcgatatggcttcctgaacgccttcttttggtctcctggcgcatcgcctactggttgatcttcgtcctcacctggtatgttgcctcgtaaatgacctcgatagtttctcatctaacctctgttgcactaccagggccattcttccattactaggtgaatatatcgactccggacaccgcgatggcaaagcccgtattcaatattccgtccgttccaacgcacgatatcagatgatcgtcctaggatgtgcgactgtgggccttatctacatttccattcagaatgggtttgagttctctaccatcaaagccctcgccatggccctggcttatgtgtggggtctcgtccttgcaatctacctaatgggacatggtttggtttctatacctcgtacactctttcgcaatgcaagtgccagtggcagattacggaggctccagtctcatgcaccgttaatgcatgatcgcctgatggatgccattaatgatctggagaccctcgaggcccaggtatcgcaactgcagtctcgaaagaccgggacggcccgcgactttcaggattggattgatgagcttgccgaaacctcaactcctccggagcttcggtctggacttctggagcccgccagcagtcctagcacagtcccagcggtgattacggaacgctatctagcggacttgactagacgccttcaacgcgctaggcatcaaaaagctcgcttcgttgatgcatgggatcgtttaatctacaccgctgccgatctgcaggcgatcattaactcctccgcatcgaagaagcttgagttcactcatcaatctcagcgctccgcctgccttgcgcaatccaagttcctcactccctatatgcggtaccaactgtatacgaatgtgtacccaaacttacgactagcctttggagcgctctttgcagcagcctcggtgtgcgtcgtatggtccgagttaattaagtcgatagcaccccggttatctgtggtgaccatgtccattgtctcgtatcatgagagaccagcgccggtcggatttggacgacaagtcattgcctctatgtggctaatgtatatgtgctctgcggcattggttggagttaatgatgcgaaagtatggggtaaccgagcattggtgcgtcgaaatacgtacggcgaaagtgcatgttggtatgcaagtttagttgctcggcttactgtgccaattgcatataacttcttgacattcttaccgaagaacgtccgagaaagcacaacattctaccgttttctcggccagtggattgatttaacgccacttggaaaaggcttcgattacttcttcccagttgctatcctaattcccattggggctaccatgttcaacctttacggccgcgttaggaacatctgtggctttggcctcattgaagaggatgacgatgatctggaaaataatcccagcggttatgggataggcggctggcgagaaggtcgcgagctgattgaacgggagctcagtggtcttggctccctcgggctttccgcacgcaatgagcgatctccccgacgtccaatcaatgcggatgggaatacgcaagcgtactcttcctcgcgcacgcccttgaccgatgcgtcgcgcccatctaggtctatccggagcgccgttgccagcacttcagtcgtgcaagaagaggatgaggacgagaatttttttcagtctttcgcacatcgtgtgagaaacacgattgagaccgcaggccggccgcagtggctccagaacgattcgtttcgattgccccgatggatgagcaatgatggcaacgatggtaacaatggtctagcccgatggttcggcggccgccctgccaatggaggcgtgagaatttagatgagcctgctttctatacgtgcattgcagtggcgtttacttagacatgattcaagttcggtcgtatgatattcataataatatatataataatcttggtacgatacatggaatgggcaatcaagcaaccctagtctttcctggtctcaggtacagaaaagcaaatatatgcagaacaagcacgatacttctcggccgaagtcaccatcggaactatcccgtcacgatgcttatggtggtatgagtgcttccactattcgttgggaatacagccccattgccagcacatgtcaagttttcagatggatgggattctgttgtgtaagtgcaacttctagtcgctcatcgcttgctcaaactgagccactactattacatactgtgttatctcgacagccacaatgtggcttgacagtggctgacagacatgctgtgccacagctgcctgcggcttttgcggatattttcctggagcctccgcagaaacccgtcactcgcgttttgccagtttctccccaagtccaggccaccattttcctcaaggctgaggctgtctctgccttggagaaaaatatcagaccagaggagtgtccttttccataacctcagctcccagagggccatctttcccggctggtctattataaatccatgaccaatctgctcccacacgtttcccagacctctctgggcgagacgtgtgctttttatctggattacatcaccgccagcctgcccccttcgttacactctctccaccataaattcctcttgcccctcatctcacgccccgccctcccatcgacgccccntgtgcgcgccctctcctcaccgtctgactgggcttcatattacagcaccgactacaacaaactttccgccgctcttacgcttgtcacttgcgcaattgcccttgtggtcatgtcttggcgcaacctctggcgtcgtcccgcaccccctcaccagtcgacgaat

SEQ ID NO: 1526 - DNA, 2584 bp, Emericella nidulans
attttataacagtttaagggtcctgaagtcactattgcttactgcaggcggctgcagtaatacagggattcaagggactgccgggcttgggttagagttagggttgtacgacataccggctagatatgcggctccagtcaagccaacagcctgggcgagccggatcggagttggaaattgggacattttgattatttagagctggtaatttgtagcgtgaaggaggacatgcagccccggtccttatgaacccctgcttgcgaggggtcagacagttctaaccggggcgggtccggatcggtgacgtaggctatggtgaatcaggtgatgctggctttattatagtgcatcagcccatttctctgaaagatcagagtggctgtctttgactgattgagcaagccttctgacagcttctggcgtcgttgttttcctttcattttacattgaacagccatgaagccttcctcgtcagactcaaagagaaaagatcccgtacatctcagccatctccatatttagccaagtctgacccattcgaagtggactcgggtggatccggctctgtggagaactagatcggagttgataagacaccgacgccgatattattctggttgttcgtccgtagctccgggccacctccattggtggctaggaagcactaacgagaggatccggcttttttgccttgcgttggcggatgcggcaagatccctttgttctggataggaggtgtagcgctgcttgctacagccccgtcgtcagcggtctgtctttggtttatgcatgtcagaaccatcttgccaagtatatctgcggcattagccacgagatttgtgggtagtcatctagtttattttggttgctatctctcagcatcaacgcatttaagcatttgtaccgtctagtcgtctcagagaactgagcttcatgatggttcatcctgcttatgcctcgctattgactgatggtgctcgtttgcgcccagtacgctgttgggctagatcatcaagcatgatcaattgtccatagtctggtctttcgtggtaagccctcaggcgtagcccattccgctcgtcgccagaaaggagctggcaattcggtgcaaattctatgctattaggagcccaggatttgaagcaggaccacctcgccgattcaactcaacgatggctatatactgagatgatactcgagacgacaatctgaatccattcgactcaccaagagggtaagttttcattaaaaaatttagcagactgatcctagtcctggctctttttatctacgggcgaattaccaaggtttcctttggcagctgctgcgaatactaaagagacaatggtggtcataatcccactaattgcaggctctcatagtttcatgtcagtatactctcagtgtgtagcccgacacatgtctcgtgtcccacatcccaggaaaacagacgactcggaagcgtatcagggagcgggaccgtacctagtttaatggggcgagggctcagtgaacatgccctacggcgtcagttctcgaccttcgccagcaatacaagcacctcttcgtgagtctcttggacagtggctgttgtaacaatcccgcgttccagatcctcccagcagcgactccagatccctaataacaaccctctgggaattcttcaaagcatcgcccagagcctcctgcacctttccatgcgcactttgaacgatgatctcgaaagcagttgaaagacgcatagacgccaactagccagataccacgagcagcagctggaatgtagagggttactacagagaaccagtggacttcactgcagacgaccagtaagactgcggcccggacaacctcaacttcttcagccggtctcagcagagtcttaagcgctgtggcattttacgagacgatgatatgcccaggctgctcgacagcaccaaacgcaacaatgctttggcgcgtttgtagtcgatgggaacattggcgtatccgcccccccttacttgcgaaatattccaatgctgcggggatcgcacctttccaggttctgccgaaaatcaatgggagggcctgggtccaagtcgatggtgtatttactgctatgcccatgacttttccttccttcagcctgtcgaaaataagcagctatatgtttcaagggggggaaagtctccctcatctcttccaaacatattgatccccaccaggaagccgagcctacttcatgcaattatactctacactggaccaacgataagtcaagcaaatgctgatcaatactacatgtaagtttctgcctgcttcaggttcactatctataaagtagttcttcctccaacagttgatagtatcatccaaaccacactagacgtggagaagatgatgttgccatcggctgcagagcggacgagagtgcttagaagagtctctcaactgagctgagcttcaggactgtgcaattatggcatgacccgcagctatatatgcttctagttgaggcagaccatgcatagagaacaatcacatgcgccctagttggaaacccaactgctgtttatcaagtggatgcagaatcacttatgga

SEQ ID NO: 1527 - DNA, 1222 bp, Emericella nidulans
aggtaagtccagaccataactagttagcaactagtaacttgttgtatagaggatccaactccaggcgtggcaacttgggctgaacataagctatatctggtagtttctgctggattaaataaagcttgctcacaaatccctgaacagtattttaatcaaacctgtatatataccaatataggtaaacaaacccaccaaaaattatatgcttttagtaggaagcacctaccaattctaaaggcagttactaggtaagtttctaagtcaagactaggctttgtttagactctgactagttctcatagtacatattttcttgatatacaagatatgcatcagtactctgtgcagatatattataatattacctattcctattggccagacaatgagatcttaagaattacagagaatttaatcagggactataagtctagccttgactagtgcctaactggttactaaccagtattagaaagaaaatgacactgtaatcaggagattaaggaagaggaaaatatagaaggagtactacctagaagagcacatccttctagatctttcttatcctctggatctccatggccacgccgctccaggtctagtaccaggggtaggagttatactagaggagtaagctgaagttctacaccacagcagtaagttataaaggactaatctaggactagttgctgactagtctaggtctccatccctagcccagattgcttctcagaactatcgcaatcagcaggctagccatgaacaacatatacttgatcttcgtgagtgccaagcacgtctagattaatataaggtagagactcggcttatgcagcagcgtctactacagccaactagtcctcaactagttggtgtaaatccagtgcaatatccacctctacctggatatttactatctagttcacaactagtcaacccgggcctagtatatgttccgcagataactagagctctgctatatatgccctctcaagcactatttattccatctacagaggctagtcaccaactagtctatcaaagacttacagggtatagtactaagactggctaaccagaggcggggtagcagaataccagctctatctcctttacttacaaggtctattaaaacccctttaggcatctccaagcagagaatagattgttaagcttatttttaatatgctcttttgtaatagtgcatagtcttaaaaaa

SEQ ID NO: 1528 - DNA, 2637 bp, Emericella nidulans
tgcaatctcttctgcagctcctccattctgagccgtacaccgtcgcttgcacagcttcatcgaatgcaaggctcgtgtacgttaattccccacgccacgttgtatcgctggacaatacaaacgtacataccagcgactgatgtccacgaggagactgcgccgctgcaccgcaacgaagacacgaggaacggccaataaaccgcgcacccacccatccaccggacagtggacagtcaacgccaatcattgaccaagaaggaagctgtcataaaacggcgtgaacccagccgtgcacatttagcatgccatgatctatcctttcgtatctcgtaaactgcccgtctaaaccgcccctctaaaccgcccgtctacaaggtcattcgctttgcaaatctgttctaggtgattccacggaaaatctagctgtcaagcatgagagacggccggtttcgttcatattaacggaaatgcaaagcagacatcgtgattcctccattagcctggtctgcatgacattagtgcagaaaagggagaggcaatgatcgactgggtcatcatcctcatcttctaggtgtggccaagcctcattgatgctatttcgcagcaggcaccactcctttttttactcctttgcaccttgggcgcttaatgtttgatgtttgatgacaaatctaagttgaacttctccgtcctctttccttacttggacaagggttttgcaccgtatcgcgttgttcaggatattgtgatggcttagccatcacgagtcatgactagtggggtccgtaggcgttggccactgtagcggctgtcataggtatacgtctaggtcaaatgtagccgcttcccgtcattgtagcttatctcgatgacagattactagggcccctgttagtccaaggcagccggtgccttctcctcgaggattcctttatgcagaaccgcattcgatacgcaaaagggacaatccgcaggtatgggcgcttgggaaatcttcagtgcagatgggccaattcgatccttcatcatggcgtcatcccaatttcggcaaggacggtatgtcagagagtcagccgccccccaatggattcttgagagccgctgttgaaaccgtgagtgggaagcatggagaaactgatatttgccaatgagtgttgagagcggttgtgctgtgctaagactgcggggcccgctgcggtttggcagtccacttgggccgcgatttccaccgtcccacggccagtagagcaagcacgcggccggccggtgagtatgacattggtcgagtgccgaatgtcaagcggcacttgactgaattctgagacagattcgagggtcagccattgcggcagtcgaactgtacctatggcatggtactgatcccagggaacaggtaactttgtgtagaaggaattagcgtaacaacagagtttctggagcggatatcagcgagtcaatgctgagatccgacccgtgatatcttcggctccatagtgattgcccgacaagcatcaagcttacccaaacctctgttatcagagtcccaggacgggctgggtgatcgccatatggcttgacaggccctcatttcgaaaatgccacttccgtagtacggagcaacttctagcacgtcctagtacctcctaagcacctcctaagcacctcctaagcacctcctaacacctaacacctcctaacacctaacacctcctaacacctaacacctcctaacacctaacacctcctaacacctcctatgacctactatgcatactgacagagtggccagactcgaggctcgttattcatcctggaggcacgttacgatgatcttcatgtatcggtcctggtgacttcgcagtgcctgccgtattagtctaatctgtagtagaacttctaacagcagtgcctgtcgcaccttactctgtctagataatgcagaacctggacctgcgaaaccgaggcgttagcgaggcgccggcccccctgcgggatcgtcttccctgctccctcttttttgaattggtactattcttgctagggtgggcgcacggattgtatccggcctgctggtaactccggagatttttatattaagcctgctttgccaagcaggtgtctttgcccggttctttgtttcaaggtcgcgcaggaccttgaagtgcttccatgaagccggctttgaccaatttaccgatggcagtggctgcgaccggcattctcgatgcaggagatgccagcctacctcatctactccgtacactcgatggtctcatggatgcagtccttggcgtgtctcatcagcaccctaactctaagctccctcccagagttgggcctgggtccaaatttgaagccgaccgtatcccggaagcggtactaagtactttgtcggtccttcttgatccctctcgggtctcatcctcgtagtcctaaatctatacgcgtggaactgtgggacggtaaggagatatgcgggcctgtgcgtctcgtacaggtcgcacaaatgcaagccaaccgagacgccagttcgggttgggactcgaaaaaggcattgccactggttgattcgtatgacagaagtacgctcaatatgaaaaaggttcgagaatgctgtataactggccatgatacgag

SEQ ID NO: 1529 - DNA, 2533 bp, Emericella nidulans
  unsure (1)..(2533): unsure at all n locations
atatatgctgtttgcgttggctgaaggaagatcccttgatgcaaatgggtgtagaatgcagagaccgcctttttccttatgcaaaatacacaagccttagcagcaagcaaaagaacacacatctactgaagcttgtattcctagaacaatcctgccctattattaggaacgttcaatagaaacaaggtcaagggttaccaaatgataagcttagtgaaagctacaagtttgcatgccttatatgcgaagcctacctatcttcactgagtcgacggcacagacttcagaatgtagacaagccgaacgtttacattttacttgtcgactatatttcttcatattgaatatgcgcatatcttctgttacttcctgctttaatggtctatccataatgctcgacagagctggagttgccaccgtatttagtagcacaatgaagcccgttgtgttacagtataaatcagtcttgcatggggcgccgcggatgagcgcttttccgacatattcaggcaccaaggcagaaaggcgtgaccttncccgcgaccccaacttccatcttcccgcaaacgatccaaccatctaatttcatcccaatctccataacccactgctaaattattgcttggaccctactacatcttgaacgcactcgcttcctaatttctcttaaccaattactgatccacctctgatgtttcatgcgttctcttcacaatatataacatgtcagcctaacatgatttccacctttgctgtggtataatccgtcgtctagcaatgtcaatccttgtgcggccaccgaagcgtcgccttgccgacaccgagaatcttgaccagaaccaccgccgtgttttacgggatttcggccagggaaacagcgcgtcgacgccgatcaatacttcagccgactatggacgctttgacgaacgaccagggtcgggagatggttccagatacgcatcgccgtttcaagagttgagctccagtcagggatcgctgacgcgggtagaagactcactccagactcggaggaagttccccccaaatgcatcgatcgttttgattggtatacggggtacaggcaagtcgagccttgcggtaatgctcgcggccagctacggaaggcgcgtcattgaagcggacctgtattttcagcgagtcacaggacgctgccgaggcgtctataaacgagaacatacactctcagaataccgcaggcaggaagccattgttatggaatcgctacttatggagcatcaggaaaattgcgtaattgtctgtgggccaggcgacgtcgagcgtaatggacagatgcgactgcgggaatatgcgaaaactcaccctgttatccatatagttcgggacttggagagcattcagtcttacttaaaagcccgcgacaccgaaaaggttcgtcgattcctcgagctatcaggtccaatctaccgctcgtgttcaaatctcgaattcttcaacgtatctgagaaaggcattagcgatcaaccttctgctaaagacagccaacattacacacagtgggatgccgaggtggatcaacgaactcaaacaacaactccgttcctgatgcttaagcgattgcagcgcgattttcttcgtttcgtggcgctcgctactggtaatattcccgagttaagaaaccagctttcgcctttcccgctacatatgcagccaatcgaatcccgcaagtttacctatgccgcaactgtaccgatatctcacctcttagagaacgacgtggatattgaagagcttgaatccactgcggatgcttttgagctcaagattgacgtgtctgcagcaccttctgctcggctgggcaccgagtcgaatcttgcagacagcatcagtcacactgtggcgacagttagacggaatatcatagtacctatgatataccatgtcgagagtagtgtattccccgattcagcgccattgcggcgatccgacgcctcgtacttggaattagttctacatgggttacgcttggggcctgaatttgtgacagtagatctgtcattcgaggacagcatcctctctcagatcattggcacaaaggggtccagcaaggttattggacattattcgcagacccagcctcctccccaaggttggagtgaccccgagtatgaggcaatatatgaacgagcaaagaagcttggatgtgacatggttcgtttgacgcagcccgcaacgacaattgatgacaacttcgccgtcgagcgctttcgacatcaaatcaaaacccttcctgggccgcagttgcctgtgatcgcttataattctggtccactaggccgacaatcgtgctgcttcaacccagtattgaccccggtgatacctcgatcattgatttcacaatccggaacaaagggactcccgtctataaccatccaagaagcacaggaagctctttactcctcattcgtccttgaccctaaacagttctttgtcttcggcgcaaacacaacatacagtttgtccccagcaatgcacaatgcaaccttcaaggtgg

SEQ ID NO: 1530 - DNA, 3186 bp, Emericella nidulans
tattgtcagttatgagaagttacagagctgggtctcacggctcctggctgggatgaagtcgttggcaagtgtgcaaggaagagccatctccctgaggtggtctgctcattatagattaattctttgaatcttcgagcgtgtacttttaggatagacttgtaactatataccagatatgttttcaccaattctactcttgtactaacagaaacccataagaagtgccttggcggatgtacgattgtgctatcgtgtatcaattgtcaaagaagacaaaacaataattagagccgatgtctgcttggtgcctgagtattaaggtatcaagaagccactaaacgcgtcgacgcgtgcggttctgcggagttgatcaatcaattcattcccacgccccttaccacctctaaagtcattcttcccctgcagtcttttgctcgcccgactattgctactcagttcatgacatgattcaataataggctcagcagttgatattgtgcatcgttgacgcagaatggccaaaggaccactcgcttcatcccctcccgcggcgactccgctgaaacggtcgaattcaagcacccagaacatgaaaaaccaaaagtcaatccttgggttctttcagaaatcatcgccatctactccctccacgcgcaacggggaacacgcctcgtcgccaggccagaaagccgctgaatccgtcaagcgcgacgagaagtccgcgaagatcgcctccaagttcacgcaagacttacccccagtgccgagttctgaactgggaataccagatgacgatgcggaggacaagacgcaggtatgacctagggacttcgatttttaaaatccttctaatcagtgtttggttgattgcagatgaaccttgaagacttgaagaaaacatcaagttccccgtcacgccgggtaaatcactctatctcaaaattattgctcttttacaagccatgctgatacctctcttactgcttagtctaccaagaaagtcaactatgttgaatctgattccgaaggtgaagacgatgacgatgagatattccgacctactcgaaagaacagccgcgcctcgaagaggagaaagttatcgcctgaaagtgacgatgagttcgaagaggaagaaggcaatgcaggatactccgaggatggtcagttgtatgagcgtttcatcccagcttatggtcactgattcttttttatttttattagaaatggatgactttatcgtgccagatgattcagacgacgagtcaagaccgtccaaaaaacgaaagaagcctgccgttcagctgaagagaaagtcctcttctatgcctcccccacctgcggttgacgaagactccgaccttatcctccctgaggcttcatcgggctccgctttgaaatggacatatgatcccaataatctggagccccgcgaggctcgagccataactacgaccactagcaagacctcatcaagttctgccaagccgaaggctcataccaccgaacctgagcaacgttatccttggcttgctaatatccgggatatcgatggccatccgattggagaccctgaatacgaccccaggacactatacatccctcctctcgcttggtcaaaattctctccttttgagaagcagtactgggaaatcaagcaaaagttctgggacactgtggtctttttcaaaaaaggcaagttttacgaattgtatgagaatgacgccactatcggacatcaattgtttgacctaaaactcactgaccgggtgaatatgcgcatggttggagttccggaatcgagcttggaccactgggcaaaccaatttgtggccaaaggatttaagattgcaagagtagaccagtccgaatcagctctcgggaaggaaatgcgtgaacgagatggcaaaaagggtggtggtaaagaagagaagatcattaggcgggagctggcctgtgttctcacggcgggcacgctcgttgaaggtgccatgctccaagacgacatgtcaactttctgcgtggcaattaaagaagctattattgagaaccttccggccttcggaatcgcttttgtggacaccgcaacgggtcaatttttcctcacggagtttgtcgacgacgtggatatgaccaagtttgaaactttcgtggcgcaaacacgcccgcaagagcttcttctcgagaaatcaactgtctctcagaaagctctgcgcattttaaaaaacaatactggaccgacaacaatttggaactacctcaaaccaggcaaggagttctgggaggccgatattaccgtcagggaactcgatgcgagtgaatactttgtctctcaagataacgataatatccacgcgtggccagaggctcttcgtcaggcccgcgacaaggagcttgtcatgtcagcttttggagcgctggtacaatatctcaggctcctaaaactcgagcgggatctgataacaatcggcaacttctcttggtacgatccaataaagaaggcgtccagccttgtcctagatggccagactcttatcaacatggagatctttgctaattcctttgatgggggtgttgatggaacgcttttccagctcctcaatcgctgcatgacgccctttggaaaacgaatgtttaagcaatgggtatgccaccccttggtagatccacaacgcatcaacgcccggttagatgctgtggatgccctaaacgctgattccagtgtacgggaccaatttgcttcacaactcactaagatgcctgatctggaacgcctcatatcccgtattcacgccgcgaattgcagggcgcaagattttgtaagagttctcgaaggctttgaacagatcgagtacaccatgagcttgctcaaagatagtggctctggagaaggtgttattgggcagctaatcaagtccatgcctgacctgacagaattgttggagtattggaaaactgcattcgaccacaatcaagcgaaggagtccgggatcttggttcccaagccaggagttgaggaagactttgatagctcccaagagaccatcagacaactgcaccaagacctcgatgatcttctaaagcggacccggcgggagttaggttctacagctatctgctacagggacaacgggaaagagatttaccaaatggaggtgccaatcaaagtgaagaacatcccaaggaact

SEQ ID NO: 1531 - DNA, 5972 bp, Emericella nidulans
cgagacattgtgcatggcctgccgcgatgcggagaggatgtcggcctgaaagagcgtcgggttcggttcgaagtccttctcgccccgtttggggagagacagctcggtcgaacctgtcacactgtgcatgagagttaggattctgaactaaaacgcagctggggctgtaacaaactgacaatgagaggttgttgagcatgcgaaagtcctgagtctcatccgacaaatcaatatcagcttgagctcccccagagggattggtgatcgcgtcctcatccaaatccaccattgtgaagactcgagtcagctctggctccaataatactcgtggtcttcggtagtggttgtcctgtccttgacgtgcggagaggttggaggcgaagttccaaaaaaagttcggatcagtaggtatcgggctcccgatcgactcagagtccagtccacatcatcacatccccacaccttgtcccagggtctttactttatttaccttttctatattatcatttactgtatggacattatggagtctgaagttgcatccggacgggggattgactacaacgacgtcctcatccaggtatgcccttcaaggttacttcatcgaactgccccgcctgacgaccgttcagatgtcgacgaatcttaccaacgccttgaacacatacgggccatcatctgctcaatatcaaacagtgctagaaatgctcaaggactatatgcgcgaaattgacagggtcggaagaccggaaacccaagatctagaccccaatgtgctcagcattgccatgggattcctgggtattgggaaataagcggtagagcgagttagatggtcgacttgacttgaaacatacgatggcgcgaccaccatccctcggcgcctgctgtgcctagtgtagtgcgaaaaggagcggtgcccgaggggctcaactctccaactccaactacgatcataaacatcacaaaacacctgcggatcggatatatgtgccctcagagctttccgatttagtcaattctacgacctacctatccagattgttcgtggattcttgggtcaagtagcgacaaagaaccagctcctccaagccagggaagccatccgtctcataccaacttcggctacggaccatctaaaccgtgattttctatctatctactacacgtcctcatctacttaaggacaatcgtgaccatggcctccgtctcagagaacacccctcttttggccgagtcggagccccgagagaccaacgagtatcagatttcccaagaccactcggttaccactgctccagcgaagccatattatcggacgatagttgtcctcacccacctctcagcggccctttctgtccccgcctttgtcttatacttaacagtcagctcaatcgacattgctggacctgggggcttctacctatcctgggatcttgcgacgcgcatccattcactcgctatcactgtacgtataaggctagccttacaccagcaagaaagcaaaagaaagtcacttacagaaagatctacacagagtattctaagctttctagcctcagcactcaacctggcgcgccttaggcacgcacgtcgcccgctctggctctggctaaacctccccatcgacgccgcaatcgcattctccagccttgtattagtgccaggggctctggccctgaatttcaaccagtctcctgactcgtggcttcctgatcgcggagctgcggcgaccgcgagggcggtaattgtgtttctaggtattgggttgattgccgggttatttgttgggtttgtttatacacacctcactcctaattcctatgggttcctagcggactaaccagaactttaggctagctcatctggctctctttcccctgcgatgcttcgcttcgattcaaagcgagccatcgcagagtcagcggacttggaggattcctggaggggagcttagggtcgaatttagcgtcaggtttttgcggcaggacgaggctaacagggagtctcgcgattctgaggcgtaatggagtttaagacaagacatggtcttaagtgtgctctaccttaatggtgtcgggccctactatgtacagtgactccactatcccaagactggaattgtactaattcactcttggaaatcagctagtacaagttagctttatattggaacaagaacagcaaatagtaatttgttagcggccagcgtggaagggataattcagcagacttctactcctactcctatcccaggggctctgacggccatgatcgaagaaaccaagaaagaagaggaccaaaacccagcaccccctagttcagtgatccgaccagagaaaagacagtaaatacataaaggtatagctatcaataagggaataataaagagaaagcaaaatgccagaaataggtataaactccgtaaaccatgcattcgtgaaacgtatctggcctgctgatgcttctgtctctgcttcacaggctgcagtgttgtacggcgacacgtaggcctgtgtgtatatgtaatgtggtgaaaacgccgtgcagcgcaagccgattttgtggcgctagctaaccacgtatctggaggtccgtctgcatcaaggcagccggagtgataaatgtagcgtaagatcttcggttggtgcctaatcgcgaggtattcatccaagctgaagtgagtaagttgcgtagctttccgtcggcctaatctatcagaggcttcttctggttaccgacaatcgcgactcctagatggcggagaccgttggggtccgacggtcggactattgaaggtaaaggtaaaagagggttgtcggggttaatgtgggcagcttctcgtgctgcttgttcgattgcttccatttcctctttacatccagcgtggtcaagagggcacacgacgattggctgtcgtataatgatatctcgagcggatgttaaatgagcctgttaattgttagcgtgggcattccatgttggacgaggttcgcaccacgaaccttgaccgttaaatagtattcgattttgtagagacttgctgttgtggtaaacccactaacagcgtatgtgggaaatccaggtttgcctctagggagtatgccctctccatcccgcatatcctttgctgggaacaccaggcccatgttcgtcaagaaccctgtcggaggcattttcacaccaattggttccgtccgtttcgttaatgtttttaccttccgttgaggctcgtcgccctcatgattgtagattatctcctcatcaatgccgattgtgattttgttgatcgtaacttttctagctttgctgatccagtcgggattcggggacagtttaacatagacgctgacaggatcgaggggcccgtatgaccatcgcggtagagaaatacccaacgtcaccagatgatctgatacactctccgccgattcggggcgattgtacattccaaatgtcgatagcgtgtcataccgtgcgatcggtaccggaaacgagtacttcctttgctccgaatggccttgctgtaccatcaccacgatctcgtagaacgtctccgcggtgcgactgggaagctgcaagctagccggagggactcgcctggatgcgtccggaccgcctcgtccaaagggaatgaacaggacgaatggcagatccattgataagacctcctcagattcccgaccagccggacaacggaagaggagcatttccttcccaacggtatcggagatctctttcctcggcggcgctagacgtctcttcgcgacggaatccgctgacgggtggatcgtttctcgccggacgagagataccgtgacgagggatacgttgacgggagccgtgatgccgacactgggcctaatctcgactttgccttcaatacgaggctggaaactgtaagcgcaatgaccagcggaatcctactgtgtaaagcgtaccatagtagcagaaatcccagggtacccaattagaaagttgccatttggaggccccgacactcgcacgaaggcggccattgtgagagcgcagctcccgcaccaccatcggcgggtgggaggtgttggggatgcgcttcagagagtaagtgcggactaatcaaactcggcggcgtcgatggccttgaagcattcatagagggctcgcggcgaaagagctgctgaggctgctgaaggctgctgagggctggttgatccggcgacgctgacggtggtgcgacggcttggaatgatacctagcggctgtcgaggtccaggcacggccagaaccaaggcgcctcgagaagaacaggaacagactaggatgatctaggttgcgggaaaggggctcgatgtctcaaagagacgtaggaacgcacgatggaaagacggagccgcagaggggcgttcagggcggctagtagttagagcaaagtactgcgggctgattgttggtggtgccggcgtggtggggaagctgaatgattcgggactcactcagagtagtaaggactgggtagttgagtgccctgcagaccagcctcgcttgttggccgattggtcatagaccatacgaagtataggacagtcacactaggtcattaggtgatcgcaggtcacaacttttcggatcgtccggctcttcagttaaaccgttcttctgccgactcggtgctcgctaactaactcctcgtgtatcgagagccaagagccattggagccggtccccgacgatcatcattgctttttcccaacgtcatcgtagtggatattcatcttatcctcctttactcagagtactgtacctacagtgtacaggacaacctgcaagagacgccgaggggcgccccgtcctgccgcctgataagatcggcgttcttccactacagacgctgactcgaggtctgaccgcggtcgaacctggggggtcagacctgaaacgaggctgaaggccgtccatcgatcctaccagcaccaatatactcagattattactgcaaccacgcatttacccagaaaccggcatttatatctcctcgtatcgccaactagttgcagtagactgtctcagccatgatgaggctctcaatctcgtacactacgtacttcgtacttgtaggacagcgcagccagcaagcctgccataccgcataatcctcaggtaaatcaacatagaaaagacccttggctcgtatatctctggtgtgcattacttcgtatatgttttatattacttcgcaccgtcgcctgaggcccgaccgtccatctggaccggttgcccgcgcaacgaaaggaatgacatcgttcccccacaggccggagccagacttcacctccgcacactcgtcaatcctgaatctcgacaacattttccagcgtgatttttaaacgattatatgccgtctgaatcacgtccatagattcagatctgaacagaatgccgcccgcccgtcgtcgaggaggcaacaccgcctccgcccgttcaaatcagcccgttctatcctttggggcaaagtccagagtcacaaagccgtccgctgcgccttcgacaccgtccgagaaaaccaaagccctcgagcaccttactgcagaagttcgcgagaaggatgtgtcgaaagatgtgtcaatcgatgtcccgggatccaaggtcgagcccgagcagcctcatgttgcggagcttgctgtgagggctcaagccaaagcagaaatccagcaaccattatcggaggaggataagaaagcggccaaagttactaggaagcagcttcaagattactggaaggcagaagaggcgaagagtcgagggcctagaggtcggtgacttccttatctggtttgcggggtgctctgttgaccattcctagttcatcaacagggcctatcgttgtacgaaacgatcttgcggcattttgatctttctagcaagtatggggtacgtcttaacgcatcgatgatcgccgttggtccttggaagtaactccactacgaacatga

SEQ ID NO: 1532 - DNA, 983 bp, Emericella nidulans
taatattaagcaaaaatataatataaataaaagaagtagttataggctattataggctattatatattatataggattataatatatgccctcctagcaaaaattaatgttatgggtcctttgcctatacaaggaccttagaccttagcgactcggccaaggcctgcgttgtcctgaaggcggtgagccacctgcaagacttcctcacaacaacaatccttctttctctttttccctctttagcgattctttcttgtacatacggcacgtttagataggaagatccgtctatatacgtcccttaacaattaacatccttgtttatatctatttttattagtttttatataagttaataagtccttatatctgacaaggtctttagtatctatctactaattatttattaggccataccctttttaataaataagatattagaaatatcaggtctagttataacctttataaatataatattctataatttgctttaactttataatagtcagtctttaggatatttattataaataggaggtagtttaagtagtttatagttatataaaattaagggaataggaatagagttaagtatattaatctctctagcgggttttcatgacatgatccacctgcgagttgcaaggaccaccgagctgccaggcccactatagagaaattatgttcagagatataaacaagtactgcatggcttccgataatgtaaatattataatttcctatctaaataaaacagcactatctatatatatataattatctattatatcctgtctagttgcagttgctgtaggttagtagcctatattgtcctagcaccgattgggcaagtttgttagattcattttgctgttcttgactacctgttagactgctaccagtctaaatggaatgtcttcgtattttccacaaaatttaataatattttatacctatataaagttgctagatctcttgcg

SEQ ID NO: 1533 - DNA, 2771 bp, Emericella nidulans
taatttaaccagtggttaatagggactgagattgtttcgcgcctgcagtcaccgacttcgccagcggtattcctcaccaaaaccttgctccttgggagagaccacatcttgtggtcagttcagcggaaggcgggagcccttggtgtccgaagacccttggtgtctagatggtagtgtcatcccatggatatggacgctactttctttagagatgagatataaaggcgagactattcccatccatccaaagttcaccaggaagatatatatttctcacaacaacagagtctgatatccagtcctcccacttgcccggggacgcacacaattatctacaattggtatgcctccttgtctctttcctgcttatccatactttgataagcatacttacctctcatggtctctagctactgcgtctacgatgaagcgctccgtcaccattatcagcatgctcgccttctcctccgcgctgacgctcaccccgcgagccgcagaaggcgaccccgtcgtcgaatgcggcaatctcgatgtcatgaccatcgaccctgtcgacctccccgcgggcgttgccctcagcgacgtccgcaaatgcctggaccacccgctcggccggaaccgacacgtcaagggtgcgtcgctggcgccgctcgacgcggtcgatgcctcattctacaacagcgcggtagacacaggcaccagccccgtagagcctcgctcagacagcctcggcgtttttgaggaacgagcgtgctacaaagacgccccgtacgggtgctctggggggtattgctggaaggcctgcgggaatattaacaagggagagtggtgctggacagctaagaaggccggtttgggcgcctggattaagtgtagtaagtggcaggactgcgggattacaacgtatgcgtgtgggaggggaggatgtccggcctgtgggtgtggttgctagcggtaagaccgtatggatggtcaccgtactctagagggaagtgttaaggtagaggtggataattcgtgttaaaatccgaatgatgcctgtttctccaactaccaattatggattatcagtacccctaatactgctcctgcacctaatccacttcttcagcatcttagcagtctccatgactgcctcatattccttcgcttcaatgagcgcagggatttcgtttatttttcctgtggtccaagaacaacagatagctaaacgccatccaaattccggctggaagttgctgatgggtctaacgtctcgcttatccttcaatatggatgtgcacatacttctgacgatagatccgatgcctgaatgcattgctcccttagcgttgaaaatttgtccgtccctgttgtctacattccctgcaagattttccttagcagtaacgccggaagaagtcctttctcgagggtaacgccaccagttgtgccggggaacaaacggctacttgttcatccacatttgatacagaatatcgctgatttcgtcgggaaggatatatacttaaaagctaaccctcgatcaacctgattctctagtcttagttcattccccatttccactccacacgattcctacaagaagtgtttcaatctacacccatgcttctacggaaacgagatcctggtttgtgtagacaaataattgcacaagactcctcaaattagaggttctcatatgagtttcagttccccgagtcatgtatccttcggcggccaaaaaacgggcgcgttcagcccactcaagcgccgatggttgcggttgacacatcctgcgaggagcccgtcagcgttcggttacttggacaacttgtggtatgaaaaagaaagcgaattcatgttaaatctgatagagatccagaaatggaaatgtgtgttgtgtacggaaaactgcgagattgacataggatagcccgagcgagagccaggcatgagaagtgcaggatgattggatcagaagcacaggagattacttacagaaaactccgtcatatattaagacttgttattgtattgtaaatgggtctaacagtggatctagggcattcacgtgtgatgtaggttgagctaatctgaaagaatagggtttcagccgcaacttgcaacagtcaataacaaagtatatatggcagtcaactgccctaaattagatgaaagaaagccgttacctcaagcacatgcccagatgtcaccacttctcagttctcagtacggcaatattcttgttcgcatctcttcttccgtccatttccagagccgcgctgttggctccaaatcctgcgcagccttcctgggctgcttcatcctctgtccgagcacagggtactccccgctatcagctgccttgaagtctggcgacgcaacagcaaagactgggttgtaggctccttccctcgcgtgcgagtacgcgcgaagggccttcaacacagtgttggcaaacttcgggaaagcagtctgtttgctaatgttagtatcgagatttcccgggtggaccacggaagttcgaatgcccctcttcgctgtctcagtaccatcgggcccgtagagtttattgagctattttgcgtgcaggatgtttcccactttgctctgcccatagcgagaccacggcactcctttctcctggttcatgtccttgacgtcgatcccatcttttcgggcaaatccgcgtccgtcgcttgtatcatgaacaatgcgtatcaatcttcctgcagcgtcttcgtcagaatgtcaagcagatgccagggcagaacccagtaataaggtaa

SEQ ID NO: 1534 - DNA, 984 bp, Emericella nidulans
  unsure (1)..(984): unsure at all n locations
agaggcagaccaaggcataagtacgataaacagaaagcatacgcacaacgagacccggcagtcgcccgaaagtgtctagtgacggagggcagtagggcactgatcggcctcgtttctttgtctctggctgattccaccgagtcttcgagtaagacagggaaataaagaggacgtaagaagaatcactataagatggagacgagttttcgaactcaaagacctaaggcgttgagaaataacggtcttcgagcgcctggagttgtactgaagagattgttgagttggaatctgaaccatcacgaggcttcaggacttattcaccaaaccatacccattcacgtgcgttccttctcttcagttcgtctctcccaacagcctcatctcctccatcaacaacaaagtctatcaaagaccaaccgcatctgcactgtgtattactatcagtccctggtcaaccgcatttgtgctaagatctaccgctatatttcctcaattatatccatcgcgtcataggcactgaggccagagaccactacggcactagtctcacagttgcccctcctccaggctctcactcagccccagcctcaatcctgatatcattcctctttcattttttcctcgttctgctgctcctctcgattcgctttttctaccgtcttctcttcgccccgttgcagaatcactgccttgcgcccgaatcctccaactcctactttctanntggtgttctctctttgcagcctcagtcgatcagcattgctcagccctgtcccactttgtggtgaccgacttccggttttctggctgcactcgcctcttttcccgtttatctatcaccacgccactctccatctngaacgttctcatttacatccttttttacaacagcccctgatgtctttttacgtctacagagagcgtgatcgtgtagacgactgggacgagcgtcgttcggcgtttctgttagcgcctcgttatacc

SEQ ID NO: 1535 - DNA, 4576 bp, Emericella nidulans
  unsure (1)..(4576): unsure at all n locations
acttcagtctgtaaagaggccgcttacagcatcccagttggcaattttcaacgtacctgtcccttggtaccaatgctgaacagctactccagtcacctatgaactactgtgatctgtgcagtagctcttcctactcgacagataaccttgagagccgatgatcctcacgaacgtactaagacaatacctacttacaagagctccatacaacaacctcatatagacaaccttatttcgttatatatagacaacctcataacgaaatatcctgcatcaaacaactaccgccccatattacgtagccaaggtctctagatgtagcatgaaagtgttattaacgagtgctttctttttattttatttttctccccccgtaatttccttttagctttattttggcagaatattaattgcaagatctttattgatggtgttgcgtcgatatacctcggcaactgatccgagaatggccattccctacgatcagtaaatcataacactctctttgcctggcacaacgaagcacccaagtcatattctgaaagcagctcaagcacggtatgtcttgccagcagcgtcaaagatttcaccatatcctcgtgttttgtatggttcttgttggagatgatcagcttagcatcgtccttatcagtgcggggaccaaagcagactggtgcggaaaccaacgactccgcattctcgctcactgaggacttcctcaaatcaacattctcccggtctctgaggactgctgaccgtactatacttgacatacgagcacatacaacgctctcatattcgatacactatgacctgatccaaggccaggtcccaccctgccttctcccgatgccgcgacccaaagtcctcccagcgaaccgtctacgagccccagaagcatgcctcgcgtgccgggcctccaaaaagcgctgtagcggcacctttccatgttccaaatgtattcgtaatggacgcgccgacacctgcgtgccgtttcggcgatcgactaccgcgtcctccccgcggccgataaacgatgcctacgaggtgatcagtcccgatgctggacgtcggatacggaacacatcgactatcagtgctgcacgtcttccgcagcttctcccagctttgaatggtacatcaggtgcaccgcacaagacgcattctcgcatgctgcggagtcggcagggcgaacgaggtataagcgtccacccttggtttcaatatgaggaatgcgcgttgctaagggctgttttagtgtatatcgggagggccgcgtcgctgtctttcttgcagttgcttcgggataccgttacacagcatattggcccctcacagttctcgcataatgtcacgaaagaagacatgcttgagacggatactccggatgaagtaccggcgtcgtttcaggataatgttggtcaccaggaagagcaagcttacttgcgtgtctaccacattgcggtacggtctaatcattcactttagaaatattcagtactgatagtgatgtacactagactagcggttttatcaacgtcctttcggagtcggaggcccgtcaaatactaggaacaatgcctccgaccaatgagacgcctaacaagaaaatggcggctctacgagatatcatgattgccatcggggcgcagtcatcaaagaatgatctgagtccggcaagcaagcgggcagaacggtttttcttcaagcgtgcccagcaatgcgcattcgcaggtatgctggagaatccgagtatggacttgattcgtttgttcattctgctgtccttttacatgctaggcgcttgtcgccggaatgctgcgtttatgtacctaggagtcgctgcgagagcagctgccgctctaggactccatcttacagcggtcactgcattcgacgcagaagagcagcaaaagaggcaagcaatctttttctttggcaacggtacttagataacagatcataggacccgagtatggatgagcctctgcacattagaccttctagtcagctcgattctagggcggccaccagcaacagccaatctgcactccgaaccagcagatgtagaatcgacgccgcaaattggcgctggggacgatcgcctcgtcgcttcacacaatatgacgcggatcctcgacgagatcgtctctcggctatacaacgaaaaggctgcttcaacagaggtagcagagtcgctgcttgacaagctgaaacagtggagcaatgatctccctgaatcgttattatcctcaccaagcacgccacaagagcgcctcgctgcgcaggagcacattatcggcagcctacatattgcctgtgcttatcattttgctgtcatcatcgtaacacgtccattcatggttcaagtcttgggagtgcgactggcacgactacaccaagaatcgccgggaatcatccaagacagcacattactagaggaccctgcgcacacgagactcgccaacgcctgtgtcgagtccgctttgtacatgatccaaacctgcctcgaagtgcaccaatcccgtctcctcctaggcaacatgtgtattcttaagtaagcaattcccaccatatatcaccagcctagcctaacctgcaagcactagggccctcgtcttcgccgcagccctcatccccggcttctccatgttctcgcagaaggagctagactcgaccctcgaggaggcattcaccggggcgctcgagatcctccgcgtcctttcccaacaatccgcccaggctgcgcactacttcgagatcctgaatctcctccgcaacgcaattgacgagcagcggcagcggcttcgggaaaatccacccccagataagaaatacgttagcaagcttttcagtctgaataatcgcagaaatctcgactctcagccgcaaagtgatgtagcggcggcaatgtccctagtttctgaccgtggtgcggctggttcgtccacgatttcatcggagttaactgcagctcaacaccttcatatcggcaccgacgtggggacttcgtaccccgagcctgataattcagctcaagctcaggctcaagataacgatcagaatagcggcctcttggacccagcagacgtcaatactgcatttccaggatgggagggcatggagttaccgttatgggacaggttcccgtttattgatgattcattcctgaattagcagggcagccagggttaccagagtctgctatatatatgcgtaatgcgcatacactcgtctcgcttttaaagcgcgctatatatcatgagttatgtgagttcatgtattacgagatctacccattctcttcggagaggtggccgaggtcagatcagatcacgtggtcaccggcgctgggccagtcagcagctgtgctataatactcgcaactggagattttctcaaataacgcttgctatacccgaatatgcacccttcaagatttagggagctaacggcaggtagctgcacctgtctcttcaaatccaatagtcttggaaccagtgatggagagttgacattagtatagcataggccgccatggctgagccaggtttacgtctttattctaaggggcaacttacaaaacatgtttaatagtagtcgaagtggcaaacgaacacagcagaaacgtattacattttcatttttctccagaaaagtcatagtcgatacaatcctcccccctaacccggtcgtcgttggcaggaccgctcactgcgtaccctggatctacctgctatagatttttctctggtacagcgtatgcgcggtacagtactcagatattgggaatacccaatgaaaatcatttccttttgacgctgagatgactggaattccaaatctcagcggacggacaaccaaccaggtctttttttctgcgacgaccagctgaagatagaagacaaaagcctgtacgctaagaatggagcagttacaactcagaagctctccgatgtatatccaaagagtaagcgaacaaatctgtccatccagctcaacatatgctatcatggtgatcgtcaacactctgctgctagattaccgaaatgaggtattcgccctctacaatagttatatcagcgctactgtcgagtgcaaggaccagatcctagccttcacctcacacaatccgaaggccttaactatgtgtcctttcaccttctcatatcgccgaaggatagatagtctcaaaccatggcggtctaatgggaagcaaatccagagtggaaaataattgctgatgtctttgtctacccctggcacattactccatgagctgttgtatcttgttagttacggcggcaagttgaatcatctcatcgctgcttggcgtatactgtacaaaccagctgacttcagcagaggttgccgacataaaagttgagaatgacgcaacgggagaaatggagattgcctatagtccgatctggtgatacagctcgcaaggaaacggacagcgagcgcngcagtcaccaacacagacacgtaccgatggttcgcaactgccatgtacccgatcaatgcgactagtcgcgaggagtttgtgccaagcccgcagaaaacagcatttact

SEQ ID NO: 1536 - DNA, 1153 bp, Emericella nidulans
tccatggtcattaaagtataatgcgcttatccatcttgctcttcttccttagtcgaccactaggcattgcaggggcgccgtacaacacctttgacggccctgggtacccagcctgcaatgaggtagctgctgttcattcacctaccagcgttgacgagatccaatctctcgtccaggatgccattcaggccggccagaaggtgcgagcgtcgggtaaagctcacatgtggtacgacaccatgtgctctgacgatcccaataccgtcatcatccagacagagaacgtcaacaatattcacgatctcgacctcgaggccggcacggtcatgatcgaggcgggcgtgacttttctccagctggcagagtatctgcacgagagaggagcttcggtaatccccccctccccctctaatgatcggtctctactgactaaaaattgtgcaggctgggtacaccttggtcaactggaacatcacgctcgctggctgtgtcgcaatgggcgcccatcggtcctcgatccgcgaggactcgatggtcgctgcaggcgtgttggccctcgatatcatcgacggcgaggggaatctgcgtcatctcgagcgcgatgacagcgacgagtggctggcagcatcgacttctctcggcctcctgggcgttatcgcacggatgaagttcaagatctatcccgacttcaaggtctatgcggatcagaagacgtgagtctaataggtcttaggtagagcaggaactgacgatgcggcagcttggatgaggccgaggtatttgacggtgatatctatgggatgatcgctccgtatgcgacggccaatttctgggtatgttatcgacagatcaatctgccgctcgctggctcacagaccatatagtggtggccgtacaagagaaagttccattggagatactacgatgtcgttgagaacagtatcaacgaacagcagggatttcaaaacactttctcggtgacaggagtcgaagccgctgccattaaagtactctggaacagcggcagatggctggcgacgtctaatatgttggcagaggagatcctcttcggccagtgggaggcgccaaacttccgcgagaagacgacaacaaggccatcgacacatggccggtgtacggctggaactatgat

SEQ ID NO: 1537 - DNA, 1241 bp, Emericella nidulans
  unsure (1)..(1241): unsure at all n locations
atgtaggagcttcaacataacggtatggttgacaatgttgtcttcgactaacaggacgtgttttcgaggcgctatggatcgcatttccgaagcaacttcggtgggtacggggctccccgaaacgctgggtgacttggaggggggtgtgacggaccggccgcccatcttcgctgtgaaccaaaaaacactgccgctagcattcgggtttggcgaatagccgacagacccatccatgagctcggctaggctcttacagatggagagacccaggccggtgccttggtatttccgtgcggcggagttggcgaagcgcgagaagggggtgaagagagtgttgattgcactatctgggacaccaattccggtgtctgtcacctcggtcctgactacggaggaatctgaatcctcctcgtcggtcgacgaggtgatctttacatgaatggatcctttctcagtgaacttgaccgcattgccaaccaagttctgcaaaacctgtcggtatcgaagggggtccccacgcatgcgcgtgggcagttttggactgatctccgtgtccaactcgaccccttcctggagtgaggaccggcagttccggacgacagcaccaacaatctctcgaatatcgagcatgtcagcgtggagagagaaggagccggatgacagtttcgaatagtcaagaacgtcgttgacgatctgcaggagcagcgacatggagtcctgcacgatattggcgtgctcgcgctgttcctcggagagacccgtatcggttagcatggtcaaggcgatctgcattccattcattggagtgcgaatctcgtggctgatgttggcgagaaaatcggtcttcaaccgggacgactcttcaaaggcggcaatcatgcaagcctcagcctccttacgctcggtaaggtcgcgcgtcactttgacaaaaccgacatgttggccgaactggtagattggagtaatgagcacattggcccagaatctggatccatcgcgggcggtaccttcagccctcatcttcgattcggccctcccgcaaacaaacttcgagtgctcgggcggctttggcgntatcttcaaccccgggacttagaagatggagaaatgctgccgattatttctcgctttgagccctgaggacaccgcgcccgaattcagtggcgattgggcgtcggatcagcataagatgcgtattctaacggggcgccaggatctataggtcatcatgaagctgctgt

SEQ ID NO: 1538 - DNA, 622 bp, Emericella nidulans
tttttgcatttcttttttatcctatttccagtcgcagcggtgtttgttcagtcctttactcagagctgaagccctctatattcacccgccaagcttgaactgctgactggcattggagttgcaggatcctgagttccgtgggtcgcgtgggcaggaactcagagtcgaaactgtaatgggacgtatttagataggtcttcctatctagacgtgccgtatgtacaagaaggaatcgctaagaagaaatgagaaagaaggattgttgtgaggaagtcttgtgggtgctcaccgccttcaggacagcgaaggcccgggccgagtcactaaggtctaaaggtccttgtataggcaaaggacccataacatttattttatttttattatctacttctttaatcttgtctgccttctactattcttactactagaaaaataatcttatctatattatagatcaagcaattactagatttctaattatataaaatatactaaacctgcccctagacttaagtaaatagttcctagtctaatactttctatcctctatactagatagctctgtacaggggggcctgagtaagaagaggggtgctattttaaaatactcttataatatata

SEQ ID NO: 1539 - DNA, 2641 bp, Emericella nidulans
  unsure (1)..(2641): unsure at all n locations
atgacggttgctggacggtactggcggccttggctgggcctgtgtccacagccatccgacaatagggacccagtccgtgccaaccagactgcagaatgaggataaaagattaggaggcaccgatggcctgggtcggccaggggcgaatgggcaggctgaatgcgcacgacgattgggttcgtcagcacaggatcgagaagctcgcttccaggaacctgacgagcctgctcgtcgtgcgggtggatcccgagcaaaggccgggggcgactaggagatatggcaagagaggaccaggggacattagccgggccaaccagagccgcttagctgatcgcgtgagggagtgcaaggcccagcacggaaggcggtgccaccaatcgggacttagtcccggccgggagaccgccagctttggtcgcccatttttcacctgtgctcctcggtcaacggcttgtcgacctccatcaacgcttttgctgctagagagatggatcactcttttcttaaccgggacgaccggctccctgttcttctattcttcccgcttcgtcgttcccccgcgttcgtcgtgtcatgcgatcgaataagcgcccctcgccccgccggcacaatgcggtctaccgnttgactggtccccgaccccttcacccccagccatgtctgagcagcgagcagagccgtcagcggcgccagcgccgccggcggctccgtctgcgaggacggccaccgacccggtgctgcccttgaccccgtcggagccgtcgactcccggctccaagatcccgatcccccgcgtttcccagcttcgagcgtacggcaatcgacgggtcaagagggcctgtatcgagtgtcgcaagcaaaagacgaaatgtaacgggcagaccccgtgcagccgctgtatcggtcttggcatggactgcgtttacatggacgggaaacgggaagtgacggaaaaacggctccatgatctggaaaggcaggtgcaggcttacgaccgactgctgcaggaaatccagccgcgcgttgatagccaggaccgggatctgattttgagaacccgagctcaggtatgcggcaaaaagcgattctcttctgatctttggggtcggtcgtgggcagagtcgggctaattacgaacagtttgctagtatagatcaggatccagcacatgtcgacccgacgccacacggctcgacacataccccgtcgtttggtatcgagtatatccaggaggatttccacaaggacaaggggttacaagcgattgggttcatgggcgggccctcggagatgtcgtggattaacgagctgtaccaggttctggagaaggacaccccttttttagactcggaggcgtcgaacaaatcgcagtctctcacatcggtctgctacttccttgacgacgaagagctctccttggagcccaatattgacccgtacggccggccgccgcgtcacatcgccgaccagctgctcgactgctatttcttcaccgtccatccatcctttccgatcatcgcaaaaatgccgtttatgcagcagtatgagatgtattatacgcggacagatatccagccgacgaaacggtggctgaccatcctgaatctggtctttgcgctggcgtccaagtttgcgcaactcgtctcgaagccgtggattgcagaagcggactcgccgatggcctgtttcacccgagcgcggaagctgaactattcggagagccagctgctggaacatcctaatctgcaacaggtccaagttgaagggttgaccgcgttctttttaatggccatcggacatatcaaccgctcctggagagcttgtggcgtttccgtccgctcagccattgcccttggggtcaatctgcgcagcgagagtaaagaaacgtccacgctctcaaaggagatcaggtaccgggtgtggtggtcgatttacacgcttgagaacacactatcgatcatgactgggcgaccgacgagtgcaccggacaagtacagcacgacgccgctgccgattccctttgatgaggagcagtttcgagaaccgctagcgtcgcgactgctaacggactttcgtatgcgcaccgattatatgcttgcactgacgtcccagcggcgggggagtctcagcgtctgggatcctccgagattgggtcataccgggtttgggcaggaaccacggccgggtccgacggaaatctccccaagcaattccttttatttcttctacttcgtagaactcaccgtcatcatgcggcgggccatcgactcgctctacagccctgggtttgcacgccggccgtggctaaccatcagcgcctccatcatggatttggtccaggagaccgacgagtggctgagccgggtccctgccgtgttccagtggaggggcagccatccctcgcctcacttcgaacgtcagcggtggagtttggcctttcggttctacagtctacgcattgccctcagtcgaccctcgctgtgtcgctcagagcggcagcggtcccccaacgaagcgtcggcgctcagtcagcaacggatagcgcggatatgcatcaactctgcatgcgagctgctggatatgctgccggacaagccagatgcgctctggctcgtccaagtgtcgccctggtggtgcgtgc

SEQ ID NO: 1540 - DNA, 1061 bp, Emericella nidulans
acaacctagggatgattatgagcaattgcatgcgctgaatccaccaagcatgcttcgaatagaagtgaaggatcagttgcgtcatcttcacattatcatcgatctcatcttcatcgcgtgttggcagctgaaggggcttttacggtccaatatcagtatgtcaaagtatcttggtctctactcatcgccctgttccggttttgcatggaatggctctttcggattagacggagccatatataagcgcacaaatctcattcacttcagaagtcagaagtacagacacttgggatgctccagacagtgtgtatcgcccgctgcgccgccattaccagcatcgtaattggcttttccaagccttgacatatgacaggagccatttcttgatgtaatatcggggtttgcgtccgctacgtttcgtggattggaggtggcatgattccgtcgcgaccaacggtaaaagagcaactctaagatgaaagaccctgcatcgcctcgactcaacgggaaattccttgacctccaggctgacgctgagtgccactcggtcactgtccgcgatgattaagtcttagacgcaggtgcaacctcaaccagcccgagcgttttcctgactatctttctcagtacttggtctgcttgacctctcttggatacggtgtagtattgagattgacagaagtcggatggctgcggctatgggaaaccgatgtccccgttcgttctgacgagactggctaacgtaccgagacagtagaggggggatctgaagttattcagtttgagcgtcggatacgcgttggttctggtggtgaccgcagagctttggaggagactggcaagaaggagaatctggggaaaggcgctgtctaaagagtgagactggtggtatacaacatagaattgaaagcggtaaatgcgataaacttacaagtctcagctaatatagcagcctccaggaaattgcttctatccttcgaaaaattgcctttaaagaagtgagcagccaagcacccgtccgggctatgacagcacaaggggatcaagccaatataaatctt

SEQ ID NO: 1541 - DNA, 5540 bp, Emericella nidulans
tttacacccctcgccgtcgctatcaaaaatggtcatcccagcgtcgtaaaactactccttcaaaacggtgcttctgccgacaagaccgttcgtgacgggcgcacacccctctacttagctgcgaacgcaaagcagaacagggctcggattgtgcagctattactctcgcatgatccaaggcccgatatcgacgcctccagccctgagtggaacaatgagacgcctctcatggtagcgatcacccaggggagagatccagaagtcgtcagacttctggtagaggctggagcttcgttgacgaggacaaatgaccgcggtgaaacggcagttgcattggcggatcagagcaccaaccccgccatcagggatgcgctctctctggggggacagccaggttgggccgcagcgttggcgcagcttcttgtcagcgcgatcctcttcgcccttgcctacgcggataaatggccgggtgtgaaggagatcatacagaacgtcatccggtctgcatataaccaggcaaatccggccctgcctggatcgctgccgcccgctggaacagtatggcttctcaccttgataggcggcttgaaaaagaaagcaggacgctgaccctcacctatgtaggacattgatgacccccacaccgttgaggagttcaagcacaacatcacgaacatcatccagaagaacggacttgatgactttttcccggcaaatgatccttacatccagtctgtggcggagaaagcagctgcctttagaaaggaccaggtaaaccctctggccaataatgtccctttcatcatgaaggccgctgccgctgctctgtaccagcctgtcctctacatcggtatgtcatactcatcttcacctacccaccatttcatgtcgccacgaacttctgattcaccaaacagatgatagcggctcaatggccgaagacggtcgcatggagcgcgcccgggagctggtcaccctgattaccgaagtcgcgacaaaattcgtcaatgtaaacacgggcgtgcatctgcgcttcatcaacaaagacgactcgacagcgaataacctcagtgcgaacgaggttaggcagcgcatgtcattcacaccccaaggctggacagagcttgggacaaatctgaccaagaagattctacagccgatggtgtacgatgccattgcacagggtgttctagagcgtcccgttcctgattctgaccatcacagacggcgttccctccaaggagcagcccggcgagtttcgaaaggcgattgtgagatgcaagagggagctccgagacagggggtatcagaaagagggtacgttcttccctgcctacgtcgggcactaccgtagttaacgcgtgcgcagctgtcttttttgaacttagcccggtagggaatgaccccggcgcgattgcgtttattgagagctttgagggtgatgaggctacagaggatgttcttcatcgtacagctggtgggtcttcgacgtatattaagtctatcgcggacagaaactgaacaccaaacatctgtagagaacacagatcgcctttttgacgagttgagagaggccggagacccgtctcagcttgcgctctgggtaggttttccaccccaaagtctcggtatctcgctaacagtttcaggtggctgataagttgaatgaaacaattacataccgccgttgaagcagcccttcagcgcctctctgatcattgtttgatggtgccaaagtatggatattatgaagagttggactgaagaggatgaatcaggatttttgtcatggcattggtttagctcattgaaacaagcaacgaattatacgtgtccgtaactcactatcaacacatgaagatctcctatggtgagcataagcgataggactatatttggtcgtcagagctgcacccattcttggggtcggatccttcagtcagaggaaaagtacactctaacctggttattgtagacaattccgtgcggaatgttcttaatgcaataatttccctttttttacggcgatgcaaaggaaaaaaccagatttcaacaacctaacaaaggcatttctccgcgttagacgagtcggagcaataccagcacctcaccacatatgatgagcccatggaagcacttcagatatcagttggtcactcactgaaatcaacagtgaagacaccaaacaaattttttgctgctgccagagctcctagcgactccagccataatcctgtcctcggactcagctctagtccaggattgttggcccggcgctttagaagccggcggcaccggcctgaaaagcaatatgaaaaggagataaatgaatctaggagactgtgacgagctgcagttacaaacgacgccaaacctatatgcagcatgaatgtcacgagctctggtattgacctcaggctgcgggtgtttgctcaactgcatctcggaggtagccaagctagtcgcaggaaaggggctgccactcgaggtcctacggcctgcggcaatctagacaattactcaataatgaagtcgccgaaaggagctttggcttcccagacgattatgcagcaacgtgttactgcgcgtcccattttccaggccggtggctggctggttaccgacctttgccagcttatcccgcgcttgtgaacatgcaagctggactggataaggcatcacgttctgtctgagtggcgtccttggcttgtctttgcctttgtcagaatgcgcagactacacgcagtacccccgcaattgactacagaactacatgagctcatctctgcctatcacagggtgttttaagtacgagaaatagctctgaggcaaatgcgtgtacggtgtgataggccgcagtatcgtatgcaaggtagaagtgggtaggtaagcgctagacggttcgaactgcagcctaaatcaagtctccgccggtggaaccgagcatgacactaccctggcatggctggctggttgtgcataatgacttgcgagaatataatcatatctccgtgatatgcctggcaggaatcatcgcggcaggccatatgtgcatctgtataactcctaccgtaggcaagtatatgtcacaagacgggccgctttcgataccagcgaaccgcattgctcacattgcgcaggaagtgcggggtacctatgttactggtcaagtttgaaatctgggtacgccgtaaaggctggagctgggcattggatggtctataccaaccctactgggttcctactgggctgcgcggggttcccactcccaggattcacaacttagtccttgcgaccgagaagatggccagtaaaccacgtcctgtctggctgtcaagtctagacatgattaatccggggtgccatgagctgtcgtcgtggcatacatgcacgtctggagagatctaatacgggtaataaacagatggattatttgtggatcaggttaaccttacaaatagtaccattgctgtatgctaagtcttgaatacagactccttgagaatatatgcaactaaacaagacaaaaccagttaggtgtacgagctggttacggcggaagcacctgggactgctgaacgtagcacggagagtccatcctcaacttcctctctgccatgtaatacttttgcgccagcatacgaatcttctttcgatctgtcttcttagaagccgtgcgtggcatccatgacatgagcaggaagacagagggcaccatgtacgccggcagcgcttgcttgatagcttcgcgaatagtatcgaccttctccctagccatgccatctttctctgcattcgtgataaccggttctccattaactgccggtattttactgtcagtatgtccgtccaagtacagcagtgccgcgatctggggatcttccgtgccgtcaatggcacctagaaggtcaaccacaatggcgtcagcaggtgagagacacttgcgcgcctgatgctccacctcaatagcgtcaacacggcacccgtctagcttgaggatggtgtctttacgaccgatgtaatctaatgttccgtctgcattgagccggccgaggtcgccggttcggtacatccgtgcttacgctgcgcgcggggtgcagctcggccatccagcgaggcgtcttggatagaaatcctgctgctgtgcgcgagacagctgtattgtctaagtaccgacgggaaagatgcggcccttcaatgagcagctcgcccaccgctcccagtggaagcagacgctccggcgacgccgagtcaacaatataaatagggccactcgctggacggcctatagtattcccacgatctggatggatgctatcgttgtacgcgcaacagatggcgacttcgcccatgccgaattgattgataagacgggtgctggaggaggagtatttattgatgagttctttgggcagaggctcgccgccaacgcagatcgtgtgcagactagaaatttccgctggatcaagctttattgcaacggtaggggtgaggaatgtgatattggcgcgcaggctactgatagcgttaatcaggttgtcggtggtcttcactgggggtgggacacaacaacacccgccgatagtaagcggaactagcagctccaggttgctgatatcgaaggcatagtcatcgaagtgcaacatgcgagtggtggaatcgagaccgatattgcggacatagtctcggatagcggttgtataggattggtggacttggacaatgcctaaagccgggcacgagggttagcatacggttactatcatagacttggtctggtaccctttggctggcctgtactgccgctagtgaacagaacgaggcaggcattttccggcacaaccgtatcgcacggtggtgcatggttcaccggtagactgcgcagccactctggggtgatgcccacaaaatgagggactaggtgctgaaagcgagctgcaaacttgacatcgctcagcaggactcctgcttcagtccgctggatgacggagtccaggtatattggcgggttcgtagcgtggatagagatgtaggcgccccctgcacgcaagacagctaggcgggccacgatagcccaggtcgacttctcaaagcagctcagaacgaatttttcgggtcccaccccaaggccgacgagatgatgggccagacgaagggagagctcgtcaagctctccgtaggtaaggtccccgtcccaagaagagacggccatacgctctggatgggctcggcattgttcgacgatgatgtcgtgcaagcaacggcggtctgggggcgataccctctctgttaagcgcttgatggcggctctgtcctccttcgaacagaggtctggcacccgattatgcgggccgtggaggatttgcgacaggatatgcctaaaagtatagagaacacttatggcaatgctgtccccaatcaagtcgtcatcgaacacgatgcatccagtaagctgggaactggactctctgcggactgcgatagcgaggtcgatctgcatagcatcgcatactccttctggcgcatgtccgagctcatca

SEQ ID NO: 1542 - DNA, 874 bp, Emericella nidulans
ggtggctctgcgtggaagggcatagcctctattcctccgtgtatcctacagtggatatgtgatggacggtaatagaatgttgtccagctgtgtagagatacggttgggatcaaaaaaagcatataaggaggctcgtcgccgtgttggcataccatcaaaacagcaagcaacagcaagcaacagcaatcagcatcacatttaatccagcactatctctcctctcctgagcaacttcaatcaatttcaagcaagaaacacaccaccgatctgtcacagtgcatttcactcagcttatttctacctccctctctatctcccttctggcgggctctgccctagccatccccacgggctcctactcccattccaacagcaccgacggcagtggcagcaacatcgacagccttctccctcccatcgttcccgtgaacccgcgctccggcaacaaggagctcatcacctcccttctgctcgcccccacccaagctgaccgcgccgccctcctcaccgaaccaggcgactacatcttcgatttcaacgagggcggcgcccccgagggcgccgaggcaaaagggctaggcggcttctccatcgccgcccacagcaaaaccttccctgcacttatcggcaacggcgccttcaatgacgctgggctttctaggcccctgcgggatgaacacgccgcacgtgcacaatggcgctaccgagctcaacgacgtggtcaaggggcggctggtcacaaatttcatccttgaaagcggagtgtcgtccgtcgagaacacgctgtacctctaccaagatgaccggtttacggagggctcaatccaaccagattcaacccccactgggcgagaccgtctttgttgttgcctaa

SEQ ID NO: 1543 - DNA, 3258 bp, Emericella nidulans
gaacttactcctgctcggatatactatcttcctctccaggtatgaccatcgttccttcctctaaccgatgtgcgccttgtaaaacgtataggctcttcatgccggtggaactcacgtatacgtagagccttgacatcagtctgcacgatgctccgattgaaacccacccgcattagtctgacagtggatgacctctgttaccacatcgatagcatcttccaccgaaaccatgaccttgctatatggcatcaaatgcgcaagggttcgggtaacagctaccacggggacgaggatgaggatggattctctcaagactcagacactgacacgataccagagactccgcctgagtcggaatgtgacgaggttcagtcgcaaacgctggcaggtgacaatcaacaggaactcgaaccgggagagagaaacacaaatgcagacggtggaacttcaagccatgaacaacgtcccgtaaccgtcagatttgctctgcctagaccttcaacttcgagctctgacaagggctctcgggttatcagaggtgggaaagcagccatccagcctgcgagaagcgctcattcactccatctgtccttttggctagcactttgttcgagtgcggactggaatacagtgaatggcgtatcaacttcgcaacacaacgggctcaatatcaattcactaccgctatctctgcctcggccaaatcgggttgtcttggagacctacatcccaaatctccgcacgtcagtaactgctcttcctctcaggcttccccgtctcgagagtgagataacacagcccggtatttctcctgaaaagaagcaatcctccatcgctttgtggccgtgcgctctgacataatgttctcacctagtaaattcccgcaagaacttgctccctttgaacaggttggcctatgatctttgcatgaaattggacgcaaaagcccctccagcaaccgcattccttgtgtcaagctgtccaagccgttcaccaaatatagagctcgttcttcggaggtacccacaacagccgaaaatgaagcgcacttatcgtacagaatcggcctccacaggcaaaagatctcctagagagaggtccggcgttgatcgcaccgctgcgcccaaggaccaggagtgcttctctgcaagagcacctaattccggtagcgcagcagcgcaactttcgccatcaaaaggccatgaatcaaatccagtcaagagacgtttgagttcaactacggagaatgtaagcaccatttcaagcttctcatgcagtgaaattaattgagtgaaggctagaaaagctgatccagatgaagacttcgagaacgttggccacttagtagaccgtgacaccatctcgcgaggaactcagaccgattcagacctaacgtcgactctagagtcagagttgggtgatgaatcaatggacaacccattggtaagttgtaacctatatgcgtgcagaattagcatggaggcttacgggcattcattgtcttcgcacagaacaatccaggaagacaagaaaacattgctccagacaatgccgccaagcgatcacctcatcagccggtctggcaggatccgttcatttcagcgatgtttcctgaacccaatggcccggcatatgatcccacgaaccgaatccgcagaggcatgcaaggatacatcaatccaccaacaagtagaggttcgcaggctcggaacgatcgaggagaggtaggtttcagtcccaatcttgcgtgatagggcaagctgatcacctgcagcttgttcaattggtccatccaacgctggtcgacgcgcgtgtttaccaagaatatgttcatcgattgatcgcagagcttgatcgtccatcccatacttgatacggtcctgggctttgagcctactgaggatcatccaaggactgcaggttgaagcaggtggttcgagcacatgccacaaattaggcatggttgaacgatgtcagcgtatcttcgcactctgttacatgcggaggtacaatgagaacgagacataaagacaacagaacggtcgagtagtttggctgcgttaaccatagccgtattcgttcgttactttttatcgtcccttttttaactcacatgtattctgttctccggatacgcctcaacgagtgcatcaaggtctcattcgatcatccgacggagacaggccctagatgttgaaagcaagcttttctgggcaatggatgtatatctactgtttggccgcctaatagcatatcagttccattgactgccatgagaataccagccggtacacttactgcaccccgtatcccacccagatagtattgtccttatctcttgccggctcaggaaccatccaaaaacgaaatcagtccgattcaatcgggtaaaacgtacggctccgttcagcaagtggttacttgacacgtatttgtcgtttctagaagtagcgaagtttgaagaatcctggcggtgctcgaaccgtgtgtgatccttgggacccacgtgattgaactatatatacacttcgagctcagccttgaatgtatcggtactgtggattttgattcagaatatggaatgggaattacgtttcattgctgaaagaaacgtagaaagacgcaatagaaagccgaaaagtggcgtgtcaattgtgaaagatgtctaaaatatatatgaagagtacgtaagatatgctaaacgtctccatcatcgctcggaaatagaatggtaaaggccgaaaaagaagagaaagtaagaaatggcctcaagccgttgaccgtcaatggtcttgatctaaatcctgtattcgctcccatcctcctttagtagtagtcattcaatattaagttcgacatagttctataaaaagcaaaaagccatcatccatccacgcagaagagttttattttactgcgccttattcttagcaaaagcctgagcaccgtcaactagacgcctctcggtgttttgtcggccgttgacgaagtcagggtagttgagtgtgagctcgacagcgccgttgacaatgttgtccacggcctcaacaccgagcatgaatgagtggtcctggttaccgacctcatagcgccagctaccgaagcggccacgagaccagatgtccattgactgcagcttaggcagaatctgggtaagggcgccttcacgctccagagagggggtggggtatccgtgggtctagcggcggtggtaggtggagacaatctcatcgccgggcttgagcatctcggtgttga

SEQ ID NO: 1544 - DNA, 3347 bp, Emericella nidulans
tatcaaaagtgaatatggctccgaaaagctatatcaatacaatcagacacgatataccttgctgcggcaaggacaagtagggctggtccttgctgccttagtgcctgagatatcagtgccggatctccgccgcaatgccgagtccggagatacagcacaataattacagtcggaaccaaggcggtgaggggtgcggggcgagaatttcttgaagggatgaatcaccggctacacaacagtcaacgcattcccatttcactttgcccttgttaagctctctccagttgggcactggactcttctctatctcacctctattttctctcttttctcttgaccccattgacctgattgacctccgaaacatggccactcccttcctcgtctcctacgaccccgcctccgcgtccggcggcctctccctccagcagatcgcctacttcggccgcgttctgatcaaggctaccgacctcgcccaggctgagacctttatccgacaaaatttccgcctactcgatatctacgtcgacgcaactggcatctccgcaacgggcgatcttgtcgacatcctcaacgccggcgcggccaagatcttcatctcccttgaccaattgaatgccctctccgaagaacaatccgtcccctcgtcacggctcgttgtctacacttcttccaacgaccaagtggaagcgtttcagaaatgggtggttaagcacattgagcgcgaagaggccggcctgtgcacggactcggccgttgtccactctatctctgtgaagctcggactgaacccggaagcccagcttctctaccgtacatattctggagacgtgaccgaggatgcggtcaaggatacaatgaagcagggaggtgtcagtattgttcctgcggccgctctgactatcagccgcgaggagtccagtgggaagatccaggcgggttctttgattctgcgcggggtgtcaaggaccagggtaatggtctgtatgccacaacagtaacggacgagaggggtacttgcttggggtttgtgtggagtagcgacgagagtatcgcggaggctctgcgtacaggcaccggtgtctaccagagccggaagcgtggtctgtggtacaagggtcaatccagcggtgacgtacaggagttgatccgcatcggatttgactgcgacagcgactgcttggttttcatcgtgaagcagatcggaagaggtaggacgtctcgtcacttacgtacacctagtgctgactttcaggtttctgccacctcggcaccgccagctgtttcggaccttacaccggtttatcacgcctccaaaagacgctacaagcccgcaaggccgatgccccggccggctcgtacaccgcgcgactgttcaacgagcctaagcttacacaagccaagatcatggaagaggctgacgagttgtgtcgtgcggaaacaaaggaggatatcgctttcgaagcagccgatcttttgtactttgcgctcacccgctgtgttgccgccggtgtcagccttgaggatgtcgagagaaaccttgacttgaagagcctaaaggtgaagcggagaaagggtgacgccaagggcccttgggcagagaaggctggtcttgccgagaagcctgctgaagcgaacgctgctccgaagccagaggagccaaaggaagacacgtctcggatcgagatgacccgtgtcgctaccgcttcgacgccggcggagaaggtccaggagtacctcaagcggccatcgcaaaagtcaaacgacgccattgtcggccttgtcaagcccatcattcaggatgtccgtgagcagggtgatgctggtgttcttaagtacacacataagttcgaaaaggccacatctttgacctcacctgtcctcaaagcaccgttcccggccgagctgatgaagctgtcaccagaagttcaggaggcgattgatgtcagtatttccaacattgccagattccacagcgcccagaaaggcagcaatgatgcattgtcgatggagaccatgcctggcgtagtctgctcccgcttctcgcggcccattgagcgtgttggttgctacactcccggtggaacggccgtgctgccatctactgcaatgatgcttggtgttcccgccatggttgccggctgcaagaagatcgtctttgcctctccacctcgtgccgacggcagcatcacccccgagattgtctatgtcgcacacaaggttggagcggagagcatcgtccttgctggaggcgcgcaggctgtagcagccatggcctacggtactgagagcgtcagcaaggtcgacaagattttgggacctggtaatcagttcgtgaccgccgccaagatgttggtttccaacgatacctccgctggtgtcagcatcgacatgcctgccggacctagtgaggttctcgtcattgccgacaaggcgccaaccccgccttcgttgcttcagaccttctcagccaagcagaacacggtgtcgattcccaggtcattctcatcgcgattgacctgaacgagcaggaactgaaagccattgaagatgaggtagatcgccacgcccgtgctcttcctcgcatggacatcgtccgtggatccctcgcacactccgtcacctttgttgttagggaccttgatgaggcaatggctctgagcaacgattacgctcctgagcatctcatcctgcaaatccagaatgcagaggccgctgtcgagaaggtccaaaatgcgggatctgttttcatcggacagtggacgcctgagagtgtgggtgactactctgctggtgtcaaccactcattgcgtacgttcccaactcctatgattcttttaccaccgattctaacttctcttcctagcaacatatggctacgccaagcagtactccggagtcaaccttggctccttcctcaagcacatcacctcctcaaacctaacggcggatggtcttctgcgtctgtccaagactgtcgagacgctcgcggctgtggagggattagatgcccacaagcgggcagtgagcatccgtgttgcggctatgaagcaggagcagttgtagtaaagaaaatagtttattcggagttggttacgatttagttacgtgcaagcatgattcagatgagcaataaaaattgaggtcttcgaattgaagtggtatctggacgcctatcacagtataatacaatgcaatctatgtaatccgagacaagaccaacaagaacttttcagccgtcgtaaatcatcgcagaatcggacacgcacgagaatcacctcttccgctctttaatcttgaatttcagcccattcttattaacacctcccacggaattcgacatctcc

SEQ ID NO: 1545 - DNA, 3687 bp, Emericella nidulans
ggccacttgcggaggttccgagtgcgcggagacatcaaatggaacattcaaaacttgattgtcgccggcttcatcatcagactcggcgccatcggcgaggtttaggggactccaactgcgtctctccaactccataccaatcgattccggacccgccgcctgcgcatccacctcgggcttttgaggctgcttgagctgttgattatttagattcggggcaggcgtcggtggatacttccttggtcgacccggccgccgcttctgtgcactgttcacagggcccggtgtatgccctgggccaggggtactccctggacctggggtgttcccaggcccgggagtgttaccagcgctgccagcaagcggagttacatcgggaccgcgggacttccttggacgacctcgttttcgccggggagtctgctctgagtcatccttcagcggaaccttcatggtggtcgtcgttggtcggctccgtttgcgcgacgggctgtcttggttctcttggttctcctgctcgtcctgtgttgcctcgagggtcactcgaatgcgccagggactgacatttccgtccgcttgagccttgtccggagacgaagaccgctgttgtgcattatttctcgtaggtgagccgggcagaacaatatcatcgaagcgaatcgaatgtgcgcttttcgcagggctgagattgatgcgtttccgtttcacggcgccgggggtctggaggatgcggcggttcgcgggcgacatgaggctgctttgacgaccggcaaagggtctgaaaggagatgagatcagatactcggcatcgccaggaggcgcaaggacgtccggggaggagcttgcgctgtgggcggagaacattgaacgcagcatgcgagggggaatgcgaccgagtttctgggctcgtcgaaatgatatcaggcgcgtcagtgggccgaaccaaaacacgtcattatctcgtatccaaagccacagagccaaaaaaaatttaaacccagagcgaattatcgatataggcagtgccgagttgattgaatgtagtgcctggggagctgcaacagtcgcggcgtgggcgtaaacacttattccgatttaggaaggtggaataggtggaatagagtgccttggggcctgaggcattagcaataggttagttagttaaccgtattatgtcagcgatggcttaaataatcttcagcagagacgaatcgggactagtctatgatgactcggcaaaattattgcggaaagttttcggtaaaggactggttatatgacactgagagttgaggcagcaggctaagcagagttggcccatcggtcaagcctcgcagtccgatgccggtacaatttgatctcatttacggagcgcgcatgcctgcctaccttggtatacttgcggagggcgattacttcgggggccaggcatttgcaagcgtgcgagcgtcccggagcctattgacgggagactcgctgtcccccgctctttttctccgcacgatggtgacatccggagaatccttcccctttccttgggcctgacagttgagattcctggggaatctataaaggatactttatcttcccggcgatgcttttgcccgggaagctgcagctccgcgatcaccttcggttcctcgtctgtcctgcgcggttctctgcacgcgtcttactcctttactgctacatcttcattggagtcctcgcgctcctcacctacactatgtacgtcaaacaatctctaccggcctttgtcctgggtctagtcgcctcttcgcagaacgtcgccgctctaccgcaggcaagcgcggcgaccccaagtccagtcgcggacccgtataagatctacaccatcagcgccggcaatatcacggccaagcttatcccgcacggcgctcgtttgactcaattgctcgttcccgaccgcgatgggatactgcaggacgtcgttgtaggcttcgacgacccaacccaatacagtgacgacgacaacttctacggcccagtcgtcggccgctacgcgaaccgtatcagaaacggcactttcaccattgctggcgaaacatatcatacccctaagaacgagaacgacggccttgatacgcttcacggcggcgaggtcggctacgacaagcgcaattggacggtgacctcctacacgaactcatcgataacattctctttctatgaccatgcgctacagggcttccctggcgacgtcctcactcatgcaacgtacaccgttgacaacaacaacccgtcgggtctccctcagctcaccaccaaactcgtctcccttgccctaaccgaggcaactcccatcatgctcgcaaaccacatctactggaacctcaatgctttccgtgagcccaacgtcctcgaagacgtcaccctccaacttcctttgagcacgcgcttcatcgccacggacggtattctcattcccaacggcacaattgctaccgttgacgcttacaatggcgctccggacttcacgtccccgaaactagtcggtcaggacattaagaacgccgtcggtctctgtggcactgactgcacgggctacgacaactgctggctcatcgacagaccaacagggtactcctctgacgcgctaattccagctctctacatggcctccaagaacactggcattacccttgaggtcgccacaaacacccccgccatccagatctactcctgtaatgggcaagacgggtctgacccagtaaagccgtctcaaattcagcgcgccaagcaggccggctacaatgggccgactacagtcgacaaaaatgcctgcgttgttgtcgagactgagggatggattgacggtatcaatcagcctgggtggggacagacggacaaccagatctttacccccggtggcctgcctgccgtcaatctggctgtttacaaatttggaacggcttagccatgtttaaacgcacgtaggtaacatttatgacggtttgcaagcacatcataggcgcaataaataattaatctgttaatattagttcagtccagtacattattaatctggccctagtccagtaaatgagatcaaatcgtgcatgtattgtagtatcgggtatcttgtaattagacatgcatactctatctaaattaaccgcagcagccatgacgcaggctaaagaagctcacgagaaaagcctcccggctaattatcacccccaccctgccaacgtccaactagacctatcgcccgccctcaacgaccggcggtccggaatcccatgctcccggtccctatgacaatgaccatgggcatgttccgcgtcccgactcgcacccgcaagaccatgctggaggtatttttcgcgctcgatctctactaagccgcggaccttgaggcctgtaacaagactagctcctgcccagggaccgagtgactcgacttcgcggaggacaccttggacgggagggacagcgtctttttcgcgggtgcgaaggagtttctgttcaattgggtcaatctcgacctctggttcgtctagttcgtccgattggtctggttcgtctgcagtttcgtacttcgtgtccgcggtaggttcgactttagccgtaatctgcgtctgactctgggtagcttccggatgtgtaaagattcgatagttcagactttgagcttctgtatctgttgctcaatggaacttcccc

SEQ ID NO: 1546 - DNA, 649 bp, Emericella nidulans
gcactacgttggagtgttcaggcagatcacaaccagagtttgaagctgttgaatggagttcaaacccacgaaacgtatagaggcgctctcattcaaaggcgctcgtgtcgttgatgtgcgccagacacctgctctcctagaaagggacgaaaggaaggccgcatcaaagaaagtctcagacttctttacttacttttggtgaattcgtttcgttggttgttgatttcttctcgcctgattttggacgtaaacgaggcgcaacacaagtatcgacacaaatgaatcgacagcttggaggggcactggctttcaaatccctgttcttatatgcttggatctgtcatatgctcccgagttcagcagagggactgggtttgaggctgtcctggacgagtatgataggcgactctgggcaaagtatcaaatagacacaaggaagtaaatacgagtagaaaggatgtcggtcaagacagatgtccagatgtgaaatagaggaataatgttaagaataagtacgtatcaaaagcacacgggcgggagggggacttggaagtccgaaaagccgggggagcactagcaaacactgtgcagctaagtaggtatcgccagcacacgagcttctgccgagtgttctagcccatttttctct

SEQ ID NO: 1547 - DNA, 1470 bp, Emericella nidulans
cagtccgtccttctgtctacggtgtatttgtccaccagcctattcgctgttgatctgaggctgatctaatctgcagcatgagcagctgttgacgagatggcccaggagcgcgagttctacaagtacggccctctacatcgttcttacatcgtttattatggatcccagatcccgatgcagatgctaatgccgtgatgttgatgctaatgctacgctgatgattcagatactgccagcttccccagcgccctggccttctcgatcgaccgccggtctcccctcgcaccgagcagaacgtcgagctgcttcctcagtcctctcaggacacgacgctgacgggcgcttgcgcagctgggcgccctgcggctgaactgccagcgatgcatgatctctctctttgaccgccgaacccagtatatcctgacggaggcgacgcgcactcttagcctgcaagatgaccgcgtccatttggacgggcgatgcgctctggctggggagcagtgtgattcctaaggaggacgggatttgtcatctcgtctgccaggaatctagtctcaacgccagccagtgcgagtccgaccccgcttgcgggttggttgttcccgacctgacgaaagatgatcggttcaacaaacggcagtacgtcgtcaaagcgccgcatctgcgcttcttcgctggcgtaccgattcgcagccgacgcgggatcgctatcggtgcgttcagcgacagcgacggcaagacgcggccgagcgatctagcgtcgctggaactcaaattcatgaccgatactgctgccgcgatcatgaaccatctggagatggtgcgatcgcacgagcagaaccgccgtggagcgaacatgatcgccgggctgggcaactttgtcgaagggggtatattccccctccagcagccttcgccggcgcagccggactcaatgtcgacaatgagacggctgccaaggacgattcaccgcggaacagcgtcttggtctctcgtcggattcacgcccggtctgaacagtcgacagctaacgatcgcgcgcagcgcgaaaagtcgccaatcccgtctgtgcccgaatccaaggagtccaacgaactgcagcctctctgcgaaccgtcgacaccgaaacgaaagcgcgagaacgaagtcaccctgacttcaggcacccgcgagatctttggccgcgccgcccgtatccttcaggagtcgctggacgttcagggggtggtcttcttcgacgccagcgtcaagtcgtacgccggcttggtccgcaattctgtcgaccgcccttctgatgctgagagcagcagcggttctagcgaggctcgtgaggcaagctccagcgacagcgacaatccggccacgggccactcgaccaccgatacggacgacttctccacatccgatgtgctgggatactcgcttgaggatccagaacagcccacgggcgcgatgcgcgagaccttcctc

SEQ ID NO: 1548 - DNA, 2756 bp, Emericella nidulans
aaatcatatagttactaatatttataacaaaaataccaagaagctaagtactacaatagattatctttctatagagaatattattctcaaactatactgtcaaggcctcgaatcagccctctattataataagtggaagaagcataagtataggaaaacctttctaattatctaagtaaataaatataatctaaatatagtaatatacctatttactagacttgttaaaccacgggttggggcgggttttcaggcctagctgatccgcccacgcggtttttggggtgggttacctgaacagtaagccgcccatgggtttagcaaataattcgaacccaacccaaataatccaaaataacccagttatgcatatcattactctaataagcattgatctacatagttaataaaatactgtatttaaatactgtattataactatctaagtaagaaaatataatataaatacagtaatatacctattcagatatcttggcaacccagcgggttgctccgcggggctttggggcagccaaaaatatccaaaacccaatggataattagaaggtctaacccaacccatttcttggcgggtcggggcgggttggggcgggtttcgtgggttggtttaacaagtctaattttggtgcggtgcggattgtacgacgaagaatccgcaacccgcgcggattgttttttgaccctgcaggttgtacccaacccgcaccgagtgcatccctagaaagaagaaaggaaaaagagattgctattataaggaagtcttacaggtggctcactaaggtctaaggtccttaagggtatgagcaaggatccataacacaacctgtggtttaacaagtctagtttgccgccatatcacaagctagcacctgtagtaaataaccttaaccaaaaaaaaaaaaaataaaaataaagaaaatccattttacacattgtctttgttttgttttgttttaatgggtgacatagtctagcttatatggaacgtttagcatgctaagaagtttttatgttattatagcaaatccctgaaccatattccactgtgggcccttgggtagtcacatactaaaataatctggtggcccaaccaggtttggcattctcaatgctgatttgttgtgagtaataagcaaagtgatgggttgcacctgtgtcaagctagacactaccaccagtagtattgatgatattgaggatatataggcccggaaatatagatttaaccggcgccaaaattgtgcgccacaccatattgacaaagcagactactcaattcggccaccctcaaaaactttacctctgttatcagcgcccaatggtattgagacttgactcaattacacgactgacctacgcgacgcaaggtatgcatttatatctctgggtactgcgtgatggctagcaatcggtaccttcccctggcccaccataggcttcaaaatcaccgtgcaggaatgcagatataacaaagtgcatctcctttgcaatactgttgctaatatccgacaggagcatccttaggccaacaaaagcatgtctcaggccgcctccacaacatctagaaagccacggaggttcttacctgagcccatagagacatcttcacgcagttccaagaatcgtcaagacaatgaattgacaacccaatgtttacatcatatgcaaacaagcttccgcacatctgaaataaggtccacctcgtgcaaaaatgaggactctggcaggagttcacacccccccccacaacagacgtgcttgtcaccttgtttaacaacagaccatgatgcgcacagattcacagcaacaatgcacaaaaccccatttacgcaggtgattggaggcaaccagcagggaaacgcgaagagatacactccccagctaatggagactgtcagacactcttttcgcccagggaagaagccagccaaactgttcagctcagcggggcttgggacacaaagctcacgggacgccatcgaggccgccaatcgaatggaagcggaccatggcgctgtacaagaatcccggttctcatactccagcctcctacgacgccaagaaacgagaaggcactcatttcgtgtgcctgatctgcctgcaattccctctagtggcagcgatgaatcaaatgagtcagactcaccccaagtgtccagtgaaactattgccacagcacgagggacattctcagatgacactgcacgtccaagaaatggccgagaaatgtccttcattgaatacattctcccgttcccacgccatccctcggagaatcagttgaaggaacaagccctggcagcctttccaaacgagcaggtttaccagcaagtagatcacttcgcaatcgaccgagacgaagaagagcccgttaacgaagatatcatcaaaatacgtgatccagaactcgagttcaggacaaggaggcgcgcttcatccgcagatctcccttcggaactcgaatacctacgcaagcataaagaggaggctggtatgaataggcgccattattttacaacgagaggagcatgcttttcaacgtgtgctgtctatcaaacttccaggaaatcgggcaaacctgcaaaccatgatgatggatgggacccaaactctccctttgcacaattaaggcaggcggctagcccgccgatgctcgggggtgatctcatatttccacaaagcctgactcctaaaccacaatatgtgacacccgaacagtgttgttcttaaggtca

SEQ ID NO: 1549 - DNA, 600 bp, Emericella nidulans
gagtagcggccgccagtgtcgtgtccacagttaatcgcgagtctaactcggcagttaaagctgcatcagcgactaatgctacagatgatgtcaattcttgaagaataaactgcttgttgcgtacctgaatccgcgctctcgtggctggtctcccctcgttgtaatcgcggatcgatctccatcgactgcggggactgtgggtatgcatgtcagctgtcagcttgtcaggcatggtggcaaaatccaagcagcgagcaagctacagaaggaacacaaaaagcttgtgtaggggagaggtgtcatcaatagaaacatacctagcagattggctgtgaaagctttgctattttaatacctgcccggtcacggctgctcgaggcgttgtttgtgtcggacggtgaattcggagcccgactgccgaccgcagacaaactctgagcctccgatgattcgaggaccggtgactttgatgacgagtaggataaaagctcacagaggaaaacatctaagggaagtgaagcctcagagcttttagaaagaaagattggtaatcatgaaagaggttgagtcactttacgaggacgagggaggttgagatgg

SEQ ID NO: 1550 - DNA, 2175 bp, Emericella nidulans
tctttatgtatatacacatacgatttaggtgacactatagaatactagggaataggtaattggaggcgtcttcttgattggacatcgtggtgagttttgaagccaaaccctgttcttgtatcttattgcacaaggatacaggcaaaggagaataaagagacggtgtcacaacgttctagctataggctaaaatttatttttgggtcacaatctgagcttataaatgtctcaggcggtatgatggaacagttatgtgcaagtgagctcagcaggcttgatgtcatgattcggacaggactctactcttcttatgaccttctcttctgcaagaacccaacatacaaaaaacatgtttactgaaaatatgctcgcccaaaataatcttctgcatctgtccgattatcttactaaatagccctgacggaccagtttttaaacaaaactaagctattataaattaagaaatcacttcgagagttcaggtttgggatacggaatccaaataaaaccgaccgagccaaaaaaacgtaaaaaagatggtcccagagggggtcgaaccctcgactttggcgtgacaaatgattaggaaaccatttattagcaccacactctaaccaactgagttatggaaccgctggttgttgatggcacagttttgttagtaaatataagcattaccctattgtcttcaggagagtgcataatgggccttggctgcatacgggattgctgtgctagccctactctggcgctaagacttattatctatggaggaccccttgaagcaaaacatagcggctagcaggagtctcactcgttagtacaaccttgagcggtgtatatctctcataatgcaaaccgaacggtgtctttgtctgccagatctgtcacaggctatggcctggatcttggttgtcggccatgccctcaacctggttcaaaacaaggtttctgcaatatcagcgtacagcttcggaattgcggcctcgaagcttaggaaaggagatccgtcctcataacttcggaaaagggatccgtcggcatacaggtccggaaagtcagaaaggttgataaagggaggaggaagatatctgcgcttctatcttttgtttctttctctaagcttgtgatactcgtttatacaggacagccagttgaaaataatactgcctacgcccgttacaagatctgtctgcgaattcccagtctctgcgcatcttagaatgtccgcttcaggcttgacggtctaatagatccatttctgactttttgataatcccatagaaagctctaaaggtctagtcatttatcagtatttcgatcagcaccagaagctcaccacaaccgccaggtagcagcagggaatttcaggcttcgacccctgaccaggcaacctttcatatcctatcgcagttctggttctaagctcttccggtttcttatccccttactaagcgagttctggatgctattgacaactttcgcgaccacacacgcttcctaaacctggtacttttggctgcattttctccaatgcattataatggcaatatttgagcccaaaacccaacaaatggttccatggcgcaattggttagcgcgtggtgctaatactaagtatacgccaaggttgagggttcgatcccctctgggaccaatttgatcatttctttggttttttaatcatgaagcatctccattaggagcttccctccccaatgggcaacattgagagcgattaatatgttttttttcagaacgccaagctcttagtgccatcctttttgttcaattgtcagactgagacgatgtctctgactcatcgctaaccattctggatcatatggtaagacagcgacttcatgataatgccaatgcgataggcagcagcgacgctgcatgtgtgttgacttaggtttgggactagaaggaagatacgcagacctacttgagaatagcagcggagcgcgggtcgcgccgagaagagtcactgcgtcctgcatctcgtattcttccagaagtctagatcttctacactttataactgataacttaactttcatatgtaaacacaaccccacagggagacttttcttttatgactgctgacaaaatatctgctctcgacgcaaagcttttcatatcaatacttaccgtcgccttgaccgtccacgg

SEQ ID NO: 1551 - DNA, 4174 bp, Emericella nidulans
aaaagctgttttgggtctacaggcttgagccgcacagacgcagccatactgagccccgtcatcggaatcaatgtattcaggaattcgaacgccttcagcgctaactcaccctccacaaaagtagggagcccggtcacggcgtgataaaagtcgtgacactcacggtaacgctgcatgacgtacgcacactctgggtcgtcgatgtactgcacattatcccgagtatcgggggagacgccctccctatccagccaggtggcgtaggtgcgtccgacggagttttcaggtagagagcggagatagggaagtgggagggtctgggaggttatgcgtgggcgatcgcggagaatttgtcgaccggtggggtcctgaagcatggcatcgcggagtcggtagataaagtatggggttgctgttacttcgccgagcgttgcaattaggtctgaaattggagattcagagttagtccttcaacatgcgatgctcagcaaatgcttagactgaccagctcttcgagggttaagtagagctcccaccgcggagccaacggcaagaaatcccttctcaaagaatccgagcgggacatgatgcgggtatttcggcgatgggcgattgtgactggaaaaagaacgtgagtaaggggattgccggctccatagcgcgacttctcgcacacttggtgctgctgccctcagcttcctaaggtgcgacatattgcagttaagacgtctaaacagacattgctctatgttaacggcattcggaggtggtgtgatgcggaggaatagcggagcacaagtggtcattatgtctcgccgtattgtactatagataataatcgataaggtgataaggtgataagaggataagaggatatctttgattttattgatcttcaatgcgaacgctacattccagaatagagcgaccgtgaccaaaaatgttgtctctagactgctttttatgagaaaaagtggagtagcatagggtctttctattgattggtatctcagcttttctcccaaaagggccaggatgaagccagtttggtggcctggagaagaacatgaactgttcactcagtgggcaatatcccaaggcatcattgtaaatggcgtgggtccagcaaaattccctgggcgcggtctaggaatgatggctatgcggagtatacaagtatgtggccgaagcccccagcttggagtttacattctgagattcgcaaataggagaacgaggtaatcgtgagagtgccacggcatctgatgttgacggtagacacgatcgcatcctcgttcgtcacgaaattcgaagagggtgtaccagttcatgcgattcttgctgcattcttatgtcatgggggaccggaagacatcgagccgtatgagctttggacaaaaaactaggcgaccaggaaggatttcgagcattgcatgccgatcctttggccggactttctgcgtgcgtccttgcctccgtccgtctcgggcagctggaagagtgttcgaaaggcgaaactcgagttcgaatacgagtcctctcatcaaaatatcctggcccagcaagagcaacgactgcgcaacgcctgggaaagtgttgtcgctgtgttcccagagactgattgggaaacgttgtcctactattggctgattgtgaacaccaggagttttttctatttaatgcctggtcaggagccaccggaggatagaaatgacgccatggcattgttgccatttgccgattacttcaaccattcagatgtagcagtatgtgcatttgcacatggcttggtactggaatgctgaccctcacagtgcaatgtgaaatttgatggccaagaatacgtttttagagcttcaaaaacatttagtaagcccctagtggagttatttttttgctatacaagctgaacaagcttcccatgcagataaaggggatgagatttttatgagctacgggccccatccaaatgactttctgtttgctgaatgtgtgacaagcgccatattatatctttggtttcggagatgctgattcggctagatggctttcacctcgaggaaaacaagtctgaagcattatatcttgacgatatagtattgcgagaactgagctcctcacaacaggaggaattgtacctacagcagtatcttgggtgagttctggccgtctttgctcattgcttgcggtcatctggggccctgctaatgcggagtagaaactatcaggtcatggacactggagtatgctaccggacagaggttgccgcttgtatcatgtatatgagacctgaggactggcagaactacgtcctaggttactctaccagaggagtagatgcaaagaaatcagaagacgtcatcaaaggctggatccgcgcgtatatggaagaagcagatttgactatacgtgagttggaaaacattcggtctagcatggaacgaaggcaccagggcaaggcgcagatgctgttgaagaggtggaggcaaatcaaagagctctgcagcatagccttgaagacagtgttatgttgagatataatgtacgctatgttaagggatgttaagggtcaaagtttgctgtccctgggctcgtcagggatgtcaatgggaatcatgctggattcctgtcgtcgagattctcgctgttttgcaagaaccaggtgtttcatggtgtaattcaccacgcatttgatgccaagttcctcgccctttcgcacaatgtatccgttcagaaactcgatctcggtcgttctgttagctcgtatatcctgtaacatggaactatggtttttcgctgttttgctggcaagttgcgttaccatccagcgcaaacgctccggagagaaacggctctcgactccaggtataccttgtagttccggtagactgcagatcacgtttgagatttcaagtaggagtaatctcatcacacgtgtgaagctataattatacaaaagctctccatttcgacagtccatcagagcagtcaatggattgattacggagttcatcgccagcttctccagctggtacagcataatggaggaggggggttctgcaacagcaaccagaggcggcgtgagggtcaatgtgcgcagtagatatttggtgctaggagcccaatccgaagccttgtcgagtgacgatgacctgccagagttttgtgaagggacaggacccagaatcgttgtgcccacaccggtgtgtgtgacgtgaaacctgccactccgttgagcaagaccgtgactgatgataccaagcatgtaatgcggacgctgtccaggatccggaaaaactcgttcgttgaccgcgtcaatgatccccatgccgttctggatgaacaacacagtggacttgggcgtcaatcggtgacggacactctccaaagcagatacagtcgcaggtgctttgacggagactactaagcactcaatttgctcggcttcctcttcgacatttgacaacttggcctcactatctgttatattcctagagataggttgttcatccgcggagacttcttccttcgtgttcacatatggtactgagcgccaggttccatcagagaagacattgacgtcaaacccagttttgttatcgtctagtccaaggctattgatggccaaagtctgcttccgtttctggaacgtttggtagacttctggattgtgcataagaagcgtgataggcggtggagatggccgacttgcgagcgagtgagcgacaaaagtgccaatgtttccgactccgagaatatgaatgcgcccagatagtcgagattgtccactttccctcgctatctcatcgacgtcttgtgtccatgttgatgccggtcgtttaattaatacctgcgtagatacaggccctctgaagccgcatagttctgaggccgctgctcgcaagaccggacgggctccgaacatgtgcgaaactgagtggtggctgaacaccatagggttgtgccttgcgctatcacagtaagcagcgcatttgcttcacttgcatctgtatagaatgaataattcagattatgcacactgggaacatgctcggagggatttgatgttaagtgaacttaaatccatgggcaattgagcattatatgcacaccgcctcaccgaccgcttgttttgtacgttgcaaaaattgcggctctccccaaatcttcagcc

SEQ ID NO: 1552 - DNA, 1547 bp, Emericella nidulans
tagtgtgtttcagtatcccttggagtcgatgcccattaacggtcgctgagaatcagccacagagacgtgataatcagtctagtcggaatggatcacgagatgtatgccgataggtttgttagatttggccgtcagtcgacagggaccaaggtaaaaggtaaaagcaacaagtatcctccttagggcgaccgaatgtagcgatccctggatcaaaacaaatcaggggtcaaggggacgaaacgagagactgaaaacaggcagcgcgacagaagccgggcagaaaccagacaggacggtatgagaaacgagtgtgtccttgggattgatgaatatcagccctaggatgcgagaatcgatgaaaggagagaagagagcgactggttgaaatgatcgaaatggagtgacggagcacagttgcagcccgtgatcgtgtccctgcctgactaatcgtactatcgttccgcgtcgagtacccgttcgtccaatcagagctccggataatttagggatcgttgtgacctttctcttttgggatgtggcccgtttattcccaaatggggagctaacccagataagaaatagcgcgaccctgacaagcgtcgtttgatgaaatgaaatgaaaggaggggaccttgtctcgccgcgactcctccgtaccttcactaataactacggtgacaagggacccttcctctttgatactattacccgaaaggccatttttcggttatcctgtgctaacaacagcaaaaaggtgccgaggttacaaagagttacgtggtctcagatttggcgaaaaccacaacgccatgtcttaatgctgtccaaagcgccacttatgcaagagacaagttccagcacgaagaggcgatgatcatgggaactgtgtcgctgaactcttcaatcctcagtttgccttttaatcctgatgtgcatcgtagaccaataacaaggagatgatgtgcgcttgacccagtcgttaccagttaccacccagtcatagagcgcagtttgaatgaaaggaccatcttctgaacgccgatcgcttgactatcgcagcacccacggaactccagaaatcttcagggtcaagttaagaatctaagaaactttccagcgagacaaaccaagcagaaacattttaacctttcgcctcgaagtatctttcaggtagcaataatgatgaaactctggggttcgtactcagaggaagctcgttactgactcgcaagagacccatgggtctgtttcactggggcggctatctccgaccggcgccatggaaaagccaggtacagagaatcacgtgaaatcagtagcgatgagctcatcctgtggcaccctcgaacgatcgacttcctcaccctcatttgcattcaattttgccgtttaccagcactgccaatggtaatgcacctaagctgggtctgtgatctaactttaaggctcgctcgcaccgttctacggggctgacttatcgctcgttcttggttcttccaaagctggacagaataaataaagtgctgcaaagcaaacactctgagaca

SEQ ID NO: 1553 - DNA, 658 bp, Emericella nidulans
atgttggtatgaagcttcgaagagaatgtcatcaatagttgggtaagccaatcagatagtaattcctgaagtgcttgtagatgttgtagcagcttatcttgaaggtctttgcgcgatcgttttgcctggagacttgccagtattgaacggatagctcggtttggtcgtccaagcgtgtccctgacacccagtttctttttaaagccaccaggatactgcctgccgaagtcgtactgtaccacagagtcactgattatgacatcccctagaaagacctctccaccagataatgggtatggtgcacctccacaaataccgacaaccagcgccacttcaatccttttgtagctgattttcaagctcgatgccacactggctgcactccctttgcctatgccaggcatatagcacaccaccacgttatgatttccaatcctcccattaacatatgcattatcatcgcccggttctttcctgtagtgttcgcccaacctgtcgtaaatttcatcaaaaaggtcttcaactgcctctgcttcgagtgtcagcgcgcagatgatcgcgatcgcaaatttctttccgactggatgggcgcatctgcgcgagtcgacagtgataaattaacagtttcaaataaagaatcagccaacttggttcctgg

SEQ ID NO: 1554 - DNA, 1791 bp, Emericella nidulans
tgcaccactcctcttcctgcagtggactactagtttttccattagatccacattctttaccccgcagagcgaaagtggacgtgtggggtgtctaacttcggtccctgacgacgggggttgtggacgtaagctcacactccgtctcgtcttccccttccccagctttcccaaaaatcgccttgatagattatcctagtcctctcactggtatccagccgtaaaatgcccttttcttcaggcgaccaacgttctgatatctagtgtcatgcgtgtcggaagcggaaagtcaaatggtacgtccatggtagactacagaccatattgatagatatttcttctggacagagactgacacccccagcgaccgtacttatcctcattgccttgtctgtaagcagacagagattacgtgcacgtatcctgctggccccttgaagcctggacccaaaatcggctctctacgcacgagaaaacgggcgcgtgccacgttcgacagtggacatgagcgcccggccggtactgctgtcgcatggctgggtgaaggggagtacgcatcggttattcacagcgaaagctgcgttccagacagccagggcgccagcaccatgctagtaggggcgagcgtacagaatggatcgactacggccgaggccaaagccctagatctgtcgtttatactgcatccatcccacgtatcatctcctccaaataaagatgccactggaccaacaggacactcttcaagcaatgttcacacgacgcagctggccatgcagcgagcacacgcggttctgggtgtcgcgcccgaagaggccgagcaactgtgagtgcactaccaaaaaaggactggaaagacagagaaacaggcacctgattgatacttctcccagcacgatgatttacttcgataatatgatgaccataagtttgtttcaccagcccagcttcccggagaagttggcgcgaatcacgtctcctactcagttggcggctctgctggctgccatgttcgccttcgctgtgcggtttcgtccagaagagatggacgtcaataggcgagccgcctggtttctgaatgtagctctgcaacagattgacgtggctctacccgagtgcggcgatgagaccccaccactgtgacaagctccaagcatatgtcctggcagcccactgccagttaacccagggggtacttgaccgggcgtggcgcactctcggctcgtgcgttcggctggcgtatgacatgatcttgcatttagtgcatgttcaggggcccaggtatgctgccgctgccgtggatattgccagatggtgtagtgacgaggagcagcgtcgtgcctgcgtgggcgatctgggaaatggacgtctttgccaccaccattcgacgcacgcccactgcaatggactggtcgcaaattgagatcctgctgcccgtggatgacgagcattggttccagtgccagctgcaagagagctgcttcttcgaaccggatccgatacgccggtggaagatgctcgagagctgcggaaaccagtcgcccaaggcctggttcatcgtcatcaactcgttaatgaaagaggcgcacggactctcaagccctagagggatccccagtcggtcgcagtcggaccaggttgacgaagcccaccaccagctagagatcatcgccaatgcaatccggtgctttcagctggcgctgcccaatcatcttaaatacaaaaaccaagatctaatgttcgacgtgcgcagcccagacggctgagcagcgccgtctacaatatcaacatgat

SEQ ID NO: 1555 - DNA, 1768 bp, Emericella nidulans
atcgggtagatgacgccgcccatgcagagccagacgccgcgatgcccattgctgcgcccatcttggtactgaagtactgcgggatgatcgcaacacaggaaacgaacaagcagccggttccgattcccaccacgaaaccctgtgcaagcagaacctgccagaactccttgcacaaactcagcatcatatggccaaacacaaccccaaagctgccgacgacgaggagggtgcggagatagcccttgtcgtagatagggccaacaaacaggcccacgaagaggagcataaaggccgcgatcgagccgacccaggagatattggacgaactggccgtgaagaggttaccggattcgtagtaggtctggtaggccccgaaagtgttgaggatgccccaggtgttaaaatagagcataaagctgcccagtacgttcagccatgccagtagaccgccgttggggggtggaggaggccctccaggtgcagctgtcggggcatgcggcgttgtttcgggtttagaggtcttttcgtcggccggaccgctcatcgtgagttcgccaagatcgataagttgatacttgagtacgataaatggttgcagactgtggtaatcccagtgcgtggtgcctacgtctggtttgatggtgtatacatctctgatttgacttctttatacctcgggggctactcggggatgatgtcggagatgtcggaaaatcaaccagattgggctgaagaccgaaagacagcaaaagtagcaaagtaactccggagcagcgaatcacaagcgagaggttatgccacttgtcaagctggcagatgcagatcaaccggtccctgtattctggactatgcttagaaacgcttatgctggtggctcatgaattgtataagaccccgtcgatactacgatgctggcggacgggcttagggtcgatggtccggctgtcattcgcgtaaggcgagtcagatacaggacccttctacgacgaagagagagctctccaactttcctgcggagtcaagccaacatgacagtgggcgcggaccgctcggtcactcttcacctcccacggatcctctgcttgcacgggggtgggaccaacgccaacatcttccggatgcagtgtcgcgtcctcgctcgcatgctccagccgtactttcgcctggtcttcgcagaggcgcctcttgctgcactaccaggctccgacgtaaccgctgcttacaaagactacggtccgtttaaagcctggctgcgtgttcgagacgaagacccggttcttgacgcacaccacatcgtcagcaagatcgaggactccctgaaagcagcccggatcacagatgactgtcgaggggcgacgggagagtgggttgggctgctcggcttcagccaaggcgcgcatctcgccgccagtatcctggccaaccagcaggagctgggacggcgcgccggagatgatgcggcccggccagtctatcgattcggagtgctccttgctggacgcggaccgctcagatggcttcatccggacttacctattccaccgggatttgtcgatgtatccaagtgcacgacgggaatggagagagaatacgagcctttcgtgaacagctcaccgtaccgcttgcagattccgacaatccacgtccacggactggccgaccccaatatagaactccaccgaaagctgcacgatcaatattgtgatctcgctcgacaatccttctggaatggggcggagacatcgggtgccatcaaagctagagacgt

SEQ ID NO: 1556 - DNA, 2083 bp, Emericella nidulans
  unsure (1)..(2083): unsure at all n locations
aactcaggaagaggcttgggctaagattgcccggacttacaatagacaaagcaagcatcacatcagatggcgaggtgcgacctgagagataggctcctgcatctctcagtggcctcgatgacccgaagacgagttgaaacgtcggctggctgcatattgtccgacctaaaactccgactgaccgtcataattgcattgaccatgtggcactgtctagggtgatgtcttttctgagtgagtgaatgaggttcacaaagcaggaccatgtgtggggaggataagtaactattttgagcccaaatagtcgtaacacatctgcactcacccatttcccaccactttctgcttgccacatatcttccctcttttttatattttccctttgcctgtcacgtctactttattatatcttttctggctcaatccctgatgacactagattgttcctncttcccaaccatgggctcctctaccccaagaactcgtcagatatggcagacagcactttcaacactccgtcgagatgcagacgggaaaggctgcgactatttctacttcttccatcagacacggccgcgagtatccgactgagcaggagctgaacaccctccgtcgtgtttctggaaaggttcgctggaccgcatacaccattgccttcgtggaactatgcgagcgattctcttatcatggaaccactgccgtctgtaagttcccccttcagagctgacaatcttggtctgatggaatgatgctgactgctcagtcaccaacttcatccagcagcctctaccccccaactccaccactggcgctggtttcagtggtcagtccggagctctgggccatggccagcgtgcatcgaccgggttgaacacctgtatgctttccctcatgattataactatcaacatctaacaggactagtcaataccttctggtgttatctgatgccgatcctgggagcatggatcgcagatgaattcttgggccgtcttagaaccatccagatctcgattgcatttgccatgtttggtcacatcctcctaatcatatctgcactcccacctgtcatcgcccacgctcacggcgctctgacgatcttttccatcggccttgttatcttcggcattggtgttgggggtttcaagtatgtcgacccaacccagtctgacagttgggtgctaatctcacagatcgaatattgccccgttgattgcagagcagcatagaggcaatcgtccgtacatcaaggccgaccctgtgaccggcgaacgatatatagtggacccagcgcagaccgtctccagagtcttcatgtacttctatttcatgatcaatgtcggcgctctaatcggctcgatttccatggtctatgcggagaaatacattgggttttggctgtcctttcttcttccaaccgtcatgtttgcattttgtccaatggttctgttcatctgccggcacaagtacaacactacgccaccaactggttcggttgtaggcaaagcgtttagactgtgggctttcgcaatgaagccgcattggacctggaatcctgttagactgtaagtaaccccttcgccccctgtttactgatagacagagccgctaacctaagaagtttcaaaaactgcataaagtgannacttttgcccaaactttacaggctgaaatctccgccacagaccattctggaagacctttgacgacccatgggtccatgaacatcgattggccggccaaacattccgcgtcttttcctggtatccaattcactgtccctcctcattgctttcattgaaaacccccntctcactttcctcccataaccgctttcctctcctacctcccaccccccaaattaaaatcccccaaatcacttacccattcccccctttttcactatcctcatcttatcttaaattattatccttcctgcccattcccatccttaattcatcttcctaaatctcatataagcactcaatcattctttttcccttctccctacccatcttctctactcttatatcctttacttcacttctactaatgtatggaggaggggtgtttcccctttccc

SEQ ID NO: 1557 - DNA, 1369 bp, Emericella nidulans
atcggccgcaattaaccctactaaagggatcgacctctcgagaccctgctgacctggcttgattcgactagacaatccggccgcattgcgtcaacattgcgttccgctttccaatcgcaccttcacacatatctgtacccacatagtacaatcagcattcacgtctctgttttgtcgtcggacggctcggttctcgccgccgcagtcaatgcctgcacgctggcactggtggacgccgggataccgatgcccgggttgctgtgcggatgtacagcagggatgagtggcagtgcctcgacgccaagagatccgatgaacgacaccctggaccctttgttggatgtctccttaccggaagagcaagagctcccattccttactgttgcaacgacctcggctcctgccgttatgacagatggcgatgaagatgacatgaaagtctcgatgctgacaatggattcaaaagtgcattacagttatatcgagacgatgctgggctgtaggggtgaatgggtgtaacaggtccgtaaaatcctcgacagtgtgatcaaaggatcgagccgaaggtgatgtggctttgttgtttttgggctatacgtagcatgcatgttacctacttttactctgtacatcaatgatcagcgctggatgtctcaatcgatccgacaacttgcagccaaaaataaaaatctcccagacctcgtggttaactcgagtagtacagcctttgacgtcgggctttagtgtccttgaccacggctactaccaccacgatcaccacgtttacgatggggacagatggaccctggccatagagtgtcatgcaatgaggccagagccactcgcttctctcctttggtgggtttaacttggcctaacaatttagctccagaaaatgtgctcaatcttgcgcagcaacagagccacccgattggcttatcgtgcatccagttccagcctatccattcatcttatattatagcccaggcagatccagccttctttactgaacactactagagactgccttttattgtcgtgcctatatttactaattcttcggcgagactgtctccagctctaattcgggccaccaccgcaatttgatcaggccatgcaaataaaggccaaacagagctaatacgccgatttggaggtcaacgaagcagggtagggcttccccgggctatgtactgcgctcgctgcattgtgttgtcaattgtggcaccgtcaaccctgcccactgtttatatgtaacccagcgcccacttcccagtcaatcttcttctctttctctccatctccttggactgcaggattagcatcacgttgactttcctcacgaaccaggcctgaaacgaaacatagc

SEQ ID NO: 1558 - DNA, 3105 bp, Emericella nidulans
aacccacagtgaaaccaagtctcaccatggaagcgctatactacgtcccttttggtctcgccctcatggccctcgccatagccagtgcagctatcttcatcgtcgtaaggcttgagtgggtgacagcgcgccgtgatggtatgactccttttctttcagaatactctcgtgttgttgatgggtatacaacatagcatagataagctgtctgactcccgctatctgctcgccccatgattgtcatctatacgctaccttcctcgctcgcgattccgatgtgaaacgtacgtcgtccttctttacattctatctcatgtcgacaaaggaccgagtaatgctggtgtcctgtcccgtgtaagagcgctgcgattgctttcgacgaccagtaaatgaagcgtctgttcacgactgatccgcttattccacttaggcatttctacatagcactcggctggtttccgggcatataaagatgagtggaagacaattccggtgattaggtaggtaaaatgctgatataagagggtcggcttacactgaggtcgaggacaaatagaataatataacaatcatttgagctcgctacgacatacgatgtaaatattgccgagggattgtagatcgtgcaaggtacgtagtcttgcctctagctgcagatatcggagagtgcttgtggcttagtgctaaatggtcagtcatgtgtaacagtcggtctagtagagaaaaagcgaagtgaagatcgaatacccagcctgataagcattggatcactgggatttaaccgagccagatctgaactcattcatacattttccgtgcccatcaagtctccctatcctcctgagtggacccgttcaacggcgatctcatgatagactccttagccagcgccgtgatcttggaaacaaaattttcagcgatcttatagggggcaaaaaagtttcccctctccgcattagtagtagagagcctcgcaaagataccagctgtgtcttctaggatctgcacatcttctcgaacttgcgacacatcagatgcgacgagtaagcgccggtaaagagcgagaacggcggttgtaagatattggaagtaaatcctgtcatgattgtcagcgtctctagtcccgccgacaaccatctgcagggcggaacaaaccagaatgtctctggaataatacaattctggacgcgcctgatatatagtagtgtggagcgcgcggctttatagcagagctctattctagatgccggtggtgacatcccgccacctgcagtagctgagtggatcttggttaggcaaaagtaatatcccagatggatgtttgcacctcgcaggctgaggtcatggaacagtgtatccgggacaaggcctttcgcaaagtcgtctggctggcaatggcgcggaaaactagcctttaaattaactaattcttgatccagctcacggatacgctggagacgcctcgcttctgactgcctctgggcctcgaccgagtagaggaggcggtatattcgcgatttgagcagggccatccgcaggtccgatggatacaggagggcgtgggaagacagctcattttggaaaaaatggtagtcagtgtactcgaagagataggtagaagggaggtccaggtcacagtccgcatcgtggatcagcggtggctgagacctgcgaagtgagttttccttgtcgaatgagtataagagccagaacatagcacgcaaatgcggactcttccgctccgtctctgctctattcgctccagtattgaagacaatccgcactgccagggacaatagggcctcgctggtctggggttcgcccatgggggtgatgtacagtgcctaccacaatcagatcgttgctagcaatctgaggtaccgacttaccgtcatgagcaaggtttccagagctcgtggacttctatcttgcaggactaaatcagggagtaatgtaaggactgccctgacgtgggcgatgggatcagctccagctgcgacgaagacgggctcgtcccgtcgaagcccagtgatgagcgccgtaaaggcgcctaggcaggcgcgacttctggtgtcaattgacgcatcgtttagatcaagctcattgtcttttataatttgagcagtctcatccacgtcaacgacggaaataccgaatacagatgagtttttttgaaatattccagcgcagaccggactagctgagaagacggccatttaggcttaacaacggctagctcacttggagccacgggtccaacagttttgacaagttcattagagaacccggccaagtcgaaagaatcaggcaggtcgcagaaactcagatgccattgaaacgtcgctaacgccgtgtcgaatctccctggatctgaaagacgtgtcccggccaaggtcagtccgggcgacaggcatctctccctcaactgcacctctagcttctgaacatgggatctagcgtctgcgagctttctaaggactggctttacatggaactccaggcgaaaattactcagacttactggtggacagttcttcgagggcggtctgacaatgaactgaagacacagggaatcctggccagtcgacagttctcgcaggcaggcttgacccggtcacagcggacctggatagatcaattgtcatcatgagaaactagagtggtcaatatcgacaaacctttcgaagacgacagagttggcaggcattccccaggccgcgccggattggcctgccactcggcgtcgtatggacgctggccatacagtgcagcggacttgctcaacctgccgagcggccttcattagagtaggatcagttctccatcccgtttatccacacgacacagccgcaactgcgaacgcctcgattatgcttactcagcggaagctgtggttccgagtgcgtttattggacagcaaggatcagtcagcggaggggtgatttccgataccctcaccccttcccgattcggtcaagcttctctaaccttcctccacagcgaattgcgtatagcgttgccgatccctaatctataccgagcttggcatgttagaggctgctctctgcctaagtaccatctacctttgttgtcatttggcgtcgt

SEQ ID NO: 1559 - DNA, 2686 bp, Emericella nidulans
gacatactcgatgctacagattcaacaagaaagcgacgcaattggatttattagtcatgccgcgaagccaacggtgagacgcttttcgttgaatcaatatgcgacgacgaggacctgatcatgaataacatcctggaagtgaagaccacgtctccagattacaaggggcaggaccccgaagttgcagcgctagacttccggaaccggattcgaaactatgagaaagtttatgaggggattggcgacgacgagaatcattacacctacgtaaagctgattaacgtcggctctaccgtgatcataaaccagatcaaagattacctatcaagtcggttggtctattatatccaaaatcttcatataaagccacgatccatatggctttctcgtgtacgttctctggttcgcatccggattcacactaatctaactgctttagcacggagaatcggaatataatctgactgggaagattggtggagattccagcatctctgagcggggggaagcttatgctcgagctctgcctggcctactgaagaaatcaggtgtgccacctaatacgaagattgttatttggacgtcgaccctcaagcgcacaatccaaacagctcgccaccttgccgccgaaacgggctatgagaagctagaatggaaggccctcgatgagcttgactcgggtgtttgcgatggtctcacatatgaggagattgcagagaaataccctgaggactttgcggcccgagatgaggacaaatataactaccgttatcgcggaggcgagtcttaccgagacgtcgtgattcgccttgagccgatcatcatggagctggaacggagtgagaatgtcattatcgtcacacatcaagcagtcttgcgctgcatctactcatactttctcaacgtcgcccaggagcaaagcccatggatggaggtgcccttacacactctgatcaagctcacgcctcgcgcatacggaactgaagaacagcgtttcaaggccgacattcccgctgtatccacgtggcgggctaaaggaacatctgcaaagcaccaagactttcccactgagatgaaggcgtaagagcctgtttcagcatatttttcttgaaacgcctatacatcttttcattctcttcattttgggtctaacgcgctttcgcatgccgtccattggagttgacccctttgttaatacgtcaatgctggacttccacagatccgttccatattcttaccaagctcatatttgccactactcttaaaaagctcagacacgatcggaagcatattcacctttcctcttcgcttgctatcctttacatggacaaaattattagatggttattctatgtcagagaaggcgttcttcctctttgttgtcttacatgtcgctcacgtcgagagggattgacagttgggccggaaatagtccttttagcacatcggaaacctatgtagatagatagacttgaatgaaacataatcaaaccatagcaaattcgagtttaacggttctgtatttgttccaacacatcgttttgagtcttgtctgtagctcaatgccgctgtcacatgaggcggtacaacatcgtacatgcctgtgatggatctcttgcttggcagccgagcacgtagctcacaacaccaatagctgcagcatgatgagctgctccgggggctgcgctctttgatcactggcgtctatcctctggacatgagccgattttgcttctctgacggtcaaggggcgcgacgaccaccacagctcgccgccgagccatgctctccgcattcactgctcggcctctcgtcgagctcaaaccgcgagacaagtcgcggatcgaagctgtcctcgcatacggcgatcgggtcctcgtcggactgaataacggaaatttacgggtctaccgcgttaacgatgtcgaaattgaagctgagctggatgcggatcctcctcccacccagaacaacggcaacggccatgacgcaggttacggcggaagtcggccgcccacacagaatgggaacggggataacggcacgaataacccggtagcaaaagcgaaacgtacagatctactccgtgaattggagaagttttctaggtacaagatcgagcaactggcgataattaaggaggcgaagctcctggtctccctgtcgggcggatatgtctccattcacgatttacaaacctatgaactccaggagcaacttacacggaccaaaggtgccgtagctttcgccgtgacatcaaatatcgtcaatgatcctgagactggtgttccgtcgattgtatcgcgacttgcggttgcggttaagagaaagataatgctatggtcgtggagggacatggaactcgagaatgataccgcagaattaacactcgtcagtggtataaagacgcttacgtgggtctctggtacgagactggtggccggactaagctcgaattttgtgctggtagatattgagatgaaaactgttacggatttggttggcccagggagcatcggcggtcttgggggccaggaaacagggcgacttgcgggtgtcggagtcgctagtatgagttacattggaataggcggttctgcgccgaaaccgctggccacacggctgagcgagggacagatattgttggccaaggacattaacacgcagtttactgatatcgatggaa

SEQ ID NO: 1560 - DNA, 2186 bp, Emericella nidulans
tgcactctgcaggccggatttctttgatactttggtacagcgatgtcaaccatctatgcctattgggatctcttgggcacaagatttgcttagtcatcattgtgtttgtttctcacgcctctgatcggtgtacacagtcctagaaggcttctttgtcttcgggccgtttgtacagcgctcattctccagcttctacatagaggatgtggttcggctattgctagccacggacgccttcaatatgcccggctaattgtataaccaggtccatataaatccccaacctgcggaaaaagaaaggtcgaagtcgcctttgatcatacggtgtgtcatgccacagtactctcatactacgaatctcggaagacaactcgacagccggactcgaaggtgtcaaatccggcttatggaggaatggtgcttggaggcttagagcagcagaagacgaggaaacatggaattgttcgcctgattggtacgttcagcaaaagtacatttatcaggcatgccgcagtctttgtcaaagctgcattgcgacctatccaatctcattccgtacaggggttacccttcccacgccttctcgctttgaaacaaacaatcccaaaaattccaatcataagtcttttgaccctcttacatctgctcggacttcttatctctgattgcttctagcgtgatgcttcctatgtcccaatcggattgctaaatctcgcaatcagcggatgtatttccgttcaggctgaacccgatgatgccaagcaatcgaaacggactttccgggaatccgactgttccgcattgagctcgcttgagtcgtaatatatagtatcctaaacagagtataatttgtggtgggacgacaggtcagttaggaaataatgttccgtgctaatgatgatgggctagcagttgtcggtacgagtccctctttttgagggtcaatattcttgctacctcaggctggcccattccaggaaacatgagagctgcaagaatgaactgatccaggcttgtttgttgtcttggtattcctttaattaccttggtctagtaccgagtaactgccacctcatatcaaatagtatgatacgggaggtactccgtaaactttgtagactgtattaattacccgaaaatcttacgctagttaggttatatcgccccatactccgagggagccaccaggattggcagatggtcagatcgtcttgtgccttgagagccttgctcttactctccagtccttacgttatctggaggatctcgacggtatctcggtctccgtcttcggccatttcctgtcttctcccggattgcttccttttctccttctcaggctcgttaaccttcccaggtttatcctgtacgcttccacggtggaactccttcactgcagttttccgtcagccaccccccgatccccgactactatttaccgcatctaatccgcgccaactatcgatcgacgacctgcgggagatgtgaagaacaatttgatatcggccgatacgcatacgcacagcgccccccttggtcctgaatctgttctagccatcactcaagctttcctccgaacgagtcgctccatgtccagtatacggttgctggatacaccatgaaattgacatgatacctaactcttctgccggcggccaatcctggggccatccactgcgtaatgtcgataacgacaccgcacgtggagacacttcccaagctttcaatagacctgatattcggtctgaggggcaacagtatacgcctgccctgccgcggcatcccggacagccggcagttattgatttgacttcgagtgcgaacgatgcgcaggaagggcaacccccggcaaagcgactgaaattggatataaccgctgaatcgtctgcgaaccccgctagtcctacgccggcgactaccggagattcgagggttaccccgggaatagcaaattcaaagccttccgcgctctcctggcgtggtcgcccagtatggtcgttccaggccatgatatcggaggtaatgagcggtgcggaagctacggaggaggatgctattttggcgccccagggtaaacggccagcgtcgcctcccccgtttccgcagccgtcctggaagggcgcgccgccagagcagttcgggagcaatgcgacaaaggcgtcagaatccgactcctccaagaaagt

SEQ ID NO: 1561 - DNA, 419 bp, Emericella nidulans
aatagataacctatgcaaagacaatcgccaatgcggcttagcgtatcgcaagcgaaaacagaaagatcctgcttaccggcctacgaagccgatcaaacgcgtacgcatggcgcccacagctcaacgtgttgacttggatgcttctcgcgacccggcaaactttcccaataatacatctcgcgcctccgcctcaatcagttcaatgaccaaattgtgcttcgtctccagtccacccggtgcctcaagatcacacaccgggttggcggttgggttaatgttggcttcaaattccattcttatctcgcctccagcggtatcaaagtctgtcttccagccatctttctcctcgttgtgtccaatgatccgcgtctcctggtgcagaactccctttccttcgccaccaatcttgtgcgcgtgct

SEQ ID NO: 1562 - DNA, 591 bp, Emericella nidulans
atgatatacacatacgatttaggtcgacactatatactactaggatcacttctgaccgtcagctgtcagtctgtcagggcttcaggtttcatccaatgatagccgccagggttaataggcctgggatgtcatcccccaagtctgagacaagctgcccctggctcatctgagctttgcctccagctgctggccttcattcatcctgtttcttcgttcggcatgccctcgcctctctaggcctcggccaaacccaagagcgattaggaggctcgggcgtattgcgtatccgctcgagaactatggctgtgcttctctttgtactttgtggtttcatcagacaaagggtcggtcgacaccttgcaacaatagtttgaataatcgcgattgtgagcccgcggaaaccgcgggactccgtcggttgttttccatcgtgactcgaccagttgtcggtgagcccgcgaagagaccaggacgacaatagggagatcggacggagtaatatcagcacaaacagggaggagcctgtcaggagtccgtccagcgccagatcttatagtacgatttcatccggtagctgccgacatcctaggt

SEQ ID NO: 1563 - DNA, 4475 bp, Emericella nidulans
tgttttggcttgcttaggatatggttcctgctcaactttcttcggttcagatgtagaaaatgtcattccagctgttgttttcgattgcagctcctcgcgggcttcttgaaggtccaatccatgtttagctacccagcacttttcaagaagctcgatcaatttctcacggtttttaggcggcttcaagccatagcgccgaacttccgacgccagttggaggtctgtttttgcattcatcgtaggccatgtttatgtttaatttcatctatcctgacgttacttttaatcctctaattttcaaggttttgcgcccgtgattaaatcatgcctccatattgactttttcttttgagatcattgttgagggaattggccccctcctagaattgatgcttttaattgttggaaacccatacccaatttcctggctgttttagccatggtttaccaggcatttttgtttttgaaaccacctttattgttgctatatgaccctttgcaaacccaagttcatcaaagttgtagatatccttatcctgaatcccccactgatctctggttttctgcagctcatcaaaccattgaccgataattctaggatcctcacatagtgctttttggcgattaatctttcgcccaaacctagttttaacctccgggcgcctcttggtgaactctgtaacccagtttttgccaataggtagagatagagttgatgttgcagcatccaagattatttgcgccatttctcgtacctgggagggcctaggggcggcgccacgtatatccagggatactatccaagctattaaagcttcctcctgaagcagagatagcctgtggttctggttgcggagttctggttgagataggtggcccttcatccgatcacgtagggttgtaggaggcacattataaatgcggctagcttcctgagcattgcgaatttttccattttttaaatcgtttatggcgcatttgatcctaccttcttgctctattaattcctggcgcgttttacgcgcttttcgtggcatgatagttggttgaagatagagggtggttgacgcgttcgagattatggaaaaattacggatcacccgggaaccacggatcacccgggaaatacgttatatcactgatcttaatcagcaaatttgcctcatgtatcaggctaggttgggttaatctagcaataattatgctaatgcggatagtaataagatgtccatattgtatccgcaggattagcgtttgctatctgatatccgcggatatgccgcagtctaatcccaatgcacatccttctgccgcatttcgagcctaatacagttcttgaccgatatagtaaatccgacacggagaaacgtcagttcttggcggactgattatatccaactccggcccggtgtattaaccctttctggatttaccgacagggactgtccaatgtacatataaaccagaaacagcgcatccaatctctggtatcctaattcccagcaacacgcgatcattttctatcctaccctgacacattctatctctacaagtcaattacccttctactcacatacccacctcaacagcgtacctaggatgacccagaccactatcccacacccctcggacgagaagcccccatcctttgtttccgtcaagccctctgagtgggatacaactgaaaagagggtgtaagtccctccttaccatagcatatcttggagcgtgcatgtactaacagtgcctgtatggttctagatccaaagtcccctgtactgtccacagctcctcccaaactccgaaccttgaccatgaattcaagcagccatacacccaggacataattcgcatgttgactgctgctctccatgaccttgcagatgagacaaagtgcataaaatgcacggttgagaagtcctctgctcttctaaccagccatttatgcgacatccaagccgcgaagaagactgggcagtggtcaaaggaggagaggaaggcactaaaggctgaagtgaagagctccttcaaacctgtgaagaaaactgtaaaggccttgtggaaagaggggaagcagcagaagtagactcactgtataagggattctaggcttgggcacggagtttaggttgatatattgggatgtaaatatgtttctcttccatatacaataagattctaatactggcaattttgacattatggctgttatttaactttacttcacatttgcaacaggaaataaggaattttatttgattgagtcatttcacagtttggcgctcagagtattttactggagcggagaaaattggctggctcttcatatatccatagggatataaacattcataatataatttagaatctaagccctagctaggtacgtttagtgacaattccagcgccattggtccatatttcagtctttacaccattcacgccgtcaatccgtcaatgacatttgcagtattgattagggactctaacctggtcctgtattcctgaatcgtctcatccaccatcgctgcggaatcaaaatgccaaatcttgaacgaacgatccttgacctcctcaaagcaggactctgccttgaccctcttggcaggatcagcccactcaggctgctggaataggtcgcagacacgccgactgctattcactagccactgcgttcgcgtccgacgcaccttatcgtaagtctcaaatgccgcccgcagagcctcagccttatttaaactgtgttggtgaagctccatagtcagctcagacatgatggtacaaaggcacagcgcatcctccacgccaaaggatgcgccagccccgtgatgaggacttgacgcgtgcgccgcatcgcccaccaggcagactcggcccttgttatactgtggaacagggtactcgaagagatcaaaaagagcccactggtcgagttcttccgggaagagatcaacgaggttgcggacagggagagaccagtttgccagtgcctcggaaacctccttgcgtgacgcgcgtgcggtggtgggtttgtccaggggccagacattgggatctgagaccacaacggtggctccgatggtgtttgtgttgacggggtagtggatgaggtgggcgttggggccgacgtgcatgtgctgtctgtgagttttgtattcgcctatcgcgtctttgaccttgtccatggggatcagggcgcggtaggccactttatgtgtgtattgagggtaggaggctgggttgtctggccccaggagcagttgtcgtgttcgggacttgatcccgtcagcagcaatgactgatgtctccattagccagaaaatatcagggcgagatagcatacgtaccagcattcgcctgtgccctcgtaccatcagtaaagttcaaaaataccctctctgacccatcatcgtcctcaatggtattcagccttttctgcaagtgcacaaccccgtccggaatgaccttgacaaggtcatccagaaacatatctcgtcgcaccgtctcccaccccttgactcctgcatccagcttcagcagaggcgtctgatacattggatcatcttctttgcgctgcccatatccgtcgatccagcgtaagtaagacttggggtcctgctggtcgagcgagacgttgacggccccgccagagcgcagcgctttaacaatggccgggttaatcttctccatgcagcgcactgtgttggctgtgaagccgatccctgcgccgatctcacggaagttgcgcgcttgctcgtagaggtctacttttatgccgcgccgcgtgaggcctgccgcaaggatgaggccaacaatgccgccgccgatgatagcgatatgaggggcttcgtctaccatgattattgctcagcctgtgctgtgatattcaacgactcggtggtggtatcgtcaagtagcaaaggtatggttgagcgactatgttgtattggcacactctttatattatatcttatgtataattacagtagaatcactgtcggccccaggatgggcagttcttcaacgagaaaacgttcctgttcttttttagttactgcaatcgattcattggcttctttagtgtttcttttcaccgaatcgcccccaagacagtttttggctccaccgttggcaacaaggatattccatttactaataactatcgttaaggtaagtccgagggcactgtgggccgagataatcgctgccttctgccagttccattggattcaaagaagagacagcctcctaaatggattttttggtccaactcgatagaacaatgttgcagaatccattctagtacataccaaataacaaataataacgtgtcacctagtctataaagatccccatagagccttattaatgcctacaacgtctatagcaccccctcctgtcgcgccaccgcgattatctgctgaacaatgggtgtgacgtctctagctttgatctttagactggcggccgttact

SEQ ID NO: 1564 - DNA, 4021 bp, Emericella nidulans
  unsure (1)..(4021): unsure at all n locations
tatcacaggcagatattgcggcctggcacaggctagaggcttgttgctgggtcgctggcctcacccgaaccatccggttcgaattaattatgtgcagcaagattctgtccagcgtatacttgtttcgcttcttttacatacttccctgctacgactaataataccggtctggaggaaataagggctctgccccgacgcgacccccgagcaggagcagcattgcttcatatatttaccccgaactattgatatcccacgatgagcttgcgaaccggaatatcgctgcccaaggttgattgtttattaatgaccatattgatggccattaccaggtcatggttgtgactaccttagttcaatttgttctccaatacactctgctggctttctagaggcgacaatagtacataatgtttacactgattaatggttgagataatataccccaactccaatattctgcaactgaggaaacgtgtacaaatgtgtacctagccaagcttcgagctaccatcagaagctggcacctgaaagtgttatttattctcctaaatacgagaatacgaaaagtgtatacgtatattagagtaaacaatatcaacgtgttcgcaatcctagaaacgatctgaaatagtcgctatgggcggacacttgtataaagtaattcggctctacaaataattagacgccctaggattgcggttaatgggctcggtggacacggcatatcattgttggcacagatacgctaagccagttcctaacttacccttcatttgtagctctctttaatacagagttgctatttacttggactaggttgtcaaattacctatccactgactaggtgcataatgtccttgtttttcccggtataggcaattcacctggctcgcgggactcctctttaacagcctccgaacgcaaggctgttgcatgatgggtactctcatgggtagttcaatggtcaacgtacctcagcgactacagcctgggcagagaaggctccagcggccccagggataaactgtgatcagtatacgcaaggaatcttatcaacaaactgacatactagttcttgttctgcttggtccagctctacaaaaattacggagtgctataaacacaaattgaaggttcgatattttaggatataggtaagtactaaagtagcaactgtaattccagattcaagaaaagaaccaatattccattcgtagaatatgtatagatagataagggcatggagaggaataacaagatcctgacaaaacgagggttctcggacctctctcttgaagcgaatctctcctcttcagtagcggatttctcctaacttgacgctggatctgcaaaagtcacaggcgcactgtgctaccattgactttcgcttggctcctttttcatctggtttgacgaatggatagggaagcttgatcatggcgaaattgtgttgggaacgagactgatatgttctcaaacattgcatggcggtcgcaacgcaagctatctgcttggatgatggaggaggcgcatagattcgattgttcgataaattgacatttttgaagttgttgcatgattcagctcagcccttcttttgctggcggatccagtcaacgccgtcgcggacagtgtctcggacgctgaaccccccgaagagccagtagtttgagtgtcgaccgtagtggtagacagtgttgtcgtaacgccggcggctgtcagagctggctcgcgatttgctcgagccagttcgacgcggggttgattgaagagggctagggctttctgtggatgagaacgagtcgcgcgggacggatgtgtcgatacccgcggggtacgagcggggagtgtttgggcgactcattttgggagagtagcagaggtgcgagtgcacagataggtgtgtttgttttgctttggactacctaagagcagaggaggctgagcagacagtcgaagaccgagacaaagtccgtttgatgaatggattgatttgttgacgcttgtgatgagtggaagtaccagctcggtaggcgctcaaaaggaataaaaataggataatatattccgcagagacagtaagatagacagttctgagtatgaagagcaaaaagaacgtggatcagaggggatcaagcctttatttatgttgcctgctcttttgcgattgacgtgaagccgagaaaccaccccgggcactcgggctcgccaggaccacaagtagcggggagaatgacctcgtagggcaggcgctagcactatcattgtcgattcctcctattaaagcgcttcatagacaacaaaggcaggcgagacggtcagcgtgggacgaatcggacagtgccaacgagactgcgggatccatcagtaaggcctagcgtcagttcctatgcttttcgggcgggaaagagccaataatggcttcttccgagggttgccccatgtcgctggactcgcgctagaaggagtttctggagttttggcccccatgatgacaccggcttcacggttttgaccgcttctgcctgatggcctgggcccgtttcagccgcttcctgaggtttgctggtcggtgagcttttgcagctggccctggcccgtgtctgacctccatgcagatcgacttctgaagactcggtgaagttacctggtagagtcgataaagtcggtcttttgtggatgatcaatcagaggcaatcagaggtcaattgagtcaccacttggcaggcatcagtccttgactcaaatcacatggcccgtccttcatgagtccccaatcaatcttggcgctaagccctattggtcttcgcgcgtcacgggatttcgtcattgcggggaagacgtctcggcagtcggcacagtatcgttcataacagaagcacaactccgcggccaagcagctcagagcctctggaggctctttgcaagtggagatcacatcagactgtttccgtcttagccgaacagacatcaactacgtgtctccagcgaggcagcacattttcaatggatatgaatttgggtagcggcagatcgaagtgcggtggcaggagaaggcattttcattgaaacatactgacaacgtcctttagcccaaccatgcaatctttcgataataatgcaaacaagcaaaaaaatggacaacagatgagcaatacatctgaacaacacatgcagtttccagtccgtacgccaggattatgctctatggaaacataatcaaagaacgatacaaaaataccaatgatgcaacaccatgaaaatgcaggcaacaggatgacccgaattattcctccagcaatgtccacaaatcctcgcttggtcgcttccaggaacgcggccgctccgagtggcagcgtctatgattcttctcaatcatcaggcggtctcgagtgtcatctcggggtcttcccctctccttggtgtttatgggatgggcagagagtttctggacccagtctgggagcgataccgtttccttcgcagacgttgagggcaaaacgaaaagcgagcgggctctatcaagtggtggctgcatcatcttacgcagcgataccgtaccggtggtggttcggttggtctccggcttgtctttggtgtgatgccatagtcggtgtgaatgcgtcggctgggtgcgaacgatcccagcagatgcggcgtcgtcctcgaaccattcgttcgattcgactggggtcagaaactggccttcgaattcatcggcaggtcccgtgaccgtgatcacgggcaggttgcgctcgttcaggtccttggtcgaaccgctgtatggccaggaatgacgtcgcttgtggtggaaatgaggcatggtgacagtgtatcgatttccncggagcaccggcagtgagatgtatatttaaaagacgagtgcggcgccctggttgacgagggcaaacagtaccaggcacctgcgagataccccgtgataggaaacngactcgtttcgcattacggttctcgcagcttccagacgatttcaggagcggatctctgttacctctca

SEQ ID NO: 1565 - DNA, 2511 bp, Emericella nidulans
tcacctatgtctaagttagtccacccgctgtcccttttgagcgagcgcaatggcggggcatcaggcgcaccaagtttaggtgccaaagttattgtatctgagtataactagactgatcatcgtgcggcaagtctgagccatgggaagattcgtgggaaactggttgccgagaatcgtcccattcattttcttcaagcaattcccactctgcactagccatttcaccaagaagagttgacttcaacccgtcaacaaccttcgttggagatggaagcttccaatttcggacgaactctgtcccctcagatgcacctaagaaagagtgtgcggtgccatgtgaataatgaccaagcattggaaaggactttgttcgctgaatcatggtcctcgggaaatctttgtgggctctggtttggtaagagcccttgcgggttgcgatcagagcagatgactgcccgggaggcgccacaagaagctgccacaggttcttcccaatatcgcagacgtcttcccaggaatcggaccctagattgagcccttgactacgacaaagccaagacacattccaagccagcagtgtgaccccttcgatgaagagagcataagtcccaggatcctccttggctaactttggaagagatttgtcaatacagagaggccgtggccggggaaaagaagcgtgtgccaatgctgtgcgcgatgtcggcctcgaagacggcaactggtcggaaaacggcacggcacgtaattcctgtggaagatatgatgcagagggtgtgtaaattgtgggcaacggatagtccttatgaggaagcgttatctctgccgggagccgcagtgataaatagttggaaacaagaacaaggatgtgggcaatgtaggaaaacgacgtcgagatatggtcaggtgcggcgcctgtatgagtattaacaaattgcttcacaccagagtaaggtagagacttcccattcatttcccgaaggtcaaggatacccacacctccaatagtatatgtttccttcattccattgttatttttcctcacattttgcctcaaaccgtagaggctagcagcctcccggcagagaaatatccgagcctcagctgtcttggtgtggttggcatgccaaagatgatccgttctcttgataatattttggataccgctcaacattcccgactctcgttctgacagctggtatagagcagattcagagtcggaccgttgtcgcgttaactttatcttgcgttgagatatgtcgagactcttatctttgatccgagattggaggcttttgatatggttcgcgacaatttctattctcgctgctgaccgtgactgctcatttttaatcctctgaatggtccagagtcggggcctgccctcctccaattccgcactattatttccccggccactcaaacacttttcatgttcgttgtctgcgtttatagcagcttcaatttgctgacctaggtattctctttccaaaatgacactggcgctatcgaagcgtagctggtaaagtcgattccgagcacatgttgcgcataaaaacgcggatgcttgagtacgagtgcatatgtcacagctcatctcaggaaatattaagctgttcagtcaggcttcgaagcaatcgttcggagtcccaagtcatcgggtaaaaatcagtaatccggctgctcagtttcgaacccatagatgtcgattgctgggacggctgcatagaagaagaaacgagtcatgcctagcctgatatgatcatataaataggcactgacggagtgagcttttctagaacgtggttgcgtaaggttgtaggtgactgcgatagagtaacagtttgagtagtaagaatagttagtccgcggatggtggacgtcacctgataatcacgtctgtcaggtatcacaagaccgacaatgttttcttcacatttctgatagtctttttgggataattccctcacatttagctgcttgattaggatgcaactataaagccagaaatgcgtcgctcagattgatgagctgtgaaggtctgaatacgcgttcaattagattttccgaagatcaaataacgggccactcgttgaacacatattttcccttcacatttctataattcttcgtgacagtaatccgaagcttcgctttcttactgggtattttgaagtagacaatcttcatatcaaactattcaagaacgggtgctctcaactcgcgggttacggatatgatatccaaccgctaattgggctgtaagttccgcctctatttaagcgttgagcattgtcgaatgataagatgctagtccaatcacaatctgttgcagatcgtagacgaaaacatggcatccggcgataaaacaccttctcgtcttcctggccccacatctggaattgctcggagcaaacccatgctcagggagcagtctgttacctcaggagatgaagaatcgcaactcaaagacagtataaaagactttgactggtcccagctcgaaagcgt

SEQ ID NO: 1566 - DNA, 2508 bp, Emericella nidulans
ctggccagtatctttagcttcagtcaaataaatccgtcctcaagggttcatcatgacgctccccgcactcgtcctcgccctgtcgctcctcagcgcaaacgcaagggaggcagcggctttgagagatgagcctactatcctccggcgggcctgcccagactatctttcttactctacagctcctcagtaggttcttgtcttggtctttcgacctctgtcggtgcaaagctgagatctctactatcagccctccctacagcggaggcccgttaaacctcccatatcaaagaccagcaatagagtgcagaactttcaattcgtcagcagtcgagcaggttattgaagacgtcacatctcgcatgattgacaaagatctcgcccagctgttccgcaacgccttccccaacaccctagacacaacaatccgctggcatattgatgggttcacaacagcgatacggcaaagcaagagcaagaaacagaacgagcaatggactggcccgcagacctttgtcgtcacgggagacataaacgcagaatggctccgcgattcaacaaaccagctagccaactaccagactctagcgaatcgagaccggcgcctctacaacctaatccaaggcgcaatcaacacacaggctgagttcgtcattcagtcgccctactgcaatgcattccagccgccgcctccgagcaatattccacctgaagcccataaccaggatgaccaggtccatcccgcgtacgaaccgtccgttgtgttcgagtgcaaatacgagctagattccctagccaacttcctcgcccttacagcggatttccacgaaaacacagggtcaactgactttctcacaagccgctggtatacagcgcttgatacgcttctcgccgttctagacgcgcagtcccagccaacctttaacacggaaggccagttcgttacgaaccagtacactttccaacggaccacaaccctaggaactgaaacactcagtctagctggtgtcgggaacccccttaacagcggaacagggctcattcgtagcgcgttccgtcccagcgatgacgcaacgatcatgggcttctttatccccgcgaatgcccagatggctgtacagctaaacaaaacagcagctatgctccgcactgccggtggacatgatgaccttgcaaacaatcttcaggatcgcagcacccggctgcgtagggcaatccaggagaacgctatagtcaatcaccctaaatttggtgatgtctatgcgttcgaggtggacgggtacggatcccacgtcttcatggatgacgcgaatgtgccttccctcctttctctcccggtccttggctaccttgataaagatgaccccgtataccagaacacgcgcaagatgatcctctccaaagacggaaatccgtattatctcaccggctctgcattccacggtattggtggtccgcacagtacgtctattctcctgactcgcaccctaatcctgaacgatagacattgctaaatttgaatatagtcggccttgaaaacgcttggcccatgtcccttctgatccaagcacagacgtcagactcagatattgagataagggagtgtctgaaccttgtcaagaactcgagcctgcttggtcttgtgcatgagtctatcaatgtaaataacatcgtcgagtacacaaggccttggtttgcgtgggctaattccgtctttgcccaaacggtactcaaaatcgcggctgagcggccggcgattgttttcggagaaggggctgagccgtatattccctagttgcaggtctatatgtagggtttgggatgacccagaccttatcactaatagttttacctgagtttatcggatgccggcattgtattgaactggattcgtggtattaatcgaatcatcatgggtatattaggcgagctatactcaggtacaatgccatcgtatacataaacatttatgagcctagccaggtctccatctatatacagtaatcatgcaagtggcgctcgagacagacatgcattatcaaaaaagccaaagaccataagacatggcgtccaacaaatcatataagtactcttctcagccccttctgttccaccccagttcttcttcttcccgtaaccgggccaccttcccttcccgctctcctatttcccgcgccggcttttcccagtcttttgctgccgactctgtctcatttctattctccatcccatcaatgccattaccagagtcgtccttccaagcgccccacaccttcccatttttgaattaaactggcgttgagccttcccattcatcagcgtagatactactaacagtatcgtaccttcttctaaccgtgggcttgcccctttttagatacaccacgtttgaactccttctaccgctcaccttccctcacttttctcctccccctctttcttttatttctctcttctctcataacttatccactttttctctcatctctttcttctatcccttcttcactc

SEQ ID NO: 1567 - DNA, 3408 bp, Emericella nidulans
  unsure (1)..(3408): unsure at all n locations
ggccatagcctactcaaaccacactagcaacacccataaaaaccctcggaagaccgggaggcgacatcgacaccaccttacgaagcaggagcgccacggccacggccaattccgccacggaagctaggagcgaactcgccgggggcaccctccttgccttcctcacggcgacggtagccaccctcacgaggaggacggggacggcgctcgcgctcttcaccacccatcattccacgagggggagcgtgagaacgctgctgcttgatgtgggtggcagggacaacctcagcggggaggtgaagccactcacggaggtagtcaagaccctgaagacactgttagtaaaccggcgttgttgcctttccatcaggcgactggaattaagcgtacctcgggggtgagggtgtagtagtagtactgccaggagaactgggtcttgacgtagccgcgggagttgagggactgcatggccttgatcacgtagaggttcttggtgtcaatgtcgccatgcttgggaaggttgaagtccttcttggccacgagcacaccctctaaaagagaccgagtcagtaatcagtactccgtaaggaatttcgcaaccaagccaatcccatttgattgtcttgtctcgtcgcgctgtcgaggttcgttcacataccgcggaagaggtactcatggatcttcttgcggtcttccttggggataagcctggcatggagtaagtaaattgtcattcagctcacattctaggagcttttacttacattgtcgcgagttcctgttgctcttcggggaatcgctctgacaacgcgcgaagaggtggttgaaattagatgttggagtggaccgacggctgccgagttaaaagtgcgattattcccgattagttgctgaaagggcattagccctaataatcaagcgataagataaatttgtatcatgtgaccatgctcagtatttaatcatgtgacttggcgatccaggccttatccgacttcatctggatcggtggctagtttggtatcgatttacctcatcaacgctttactccaacactgagttaacttagcgtgaaaccggagacctatctcccacgaaataagaacacacgtcgactgaagtttgagacgagtaaatatggcgtcgcacgtaaatgtcctcctgtcgtccttccccggactttcgcttcccccgacagtttcctttgcattaccagcgacgtccactctatcagatctttgcgaaaaggtctcatcatatatcccttattctgtgcccctccggtccctcatcttaacaacaacaaataacaaacaaattctcccctcgtcgctcgctgtttctgaactcatctcaccaaatggcgactcaactctcctcccccttcgtctcacggttcctatgtgtggcggaaagggtggttttggctctcaacttcgtgctgccggtgggcgcatgtcaagcaggcgcaagcgcaatcagggcgacgacaacggctccagccgtaatctcgatgggcggcgtcttcgtacagtcaacgaggccaaggcccttgcagaatacctcgccgtgaaacccgagatggataagaaggagaaagaggagcgccgacgacggtgggaggctgttgttgaagccgcggaaaagcgccaggaagagctcaaaaatggaggtgggaagcaaaagatcgacggtcaatggatggaggataaagatgagatgaatgagaaggctcgagaggctgttcttgcagctatgaaggagggcacttggacggataatctgaaggacgccctcctaggcgggtcgagcacgagtgcaagtgagggaagtgggcaagaaagtgcttctgcgtcggaggacagcggggaggaggccgagatgagggatgcgcctgcgcaacctggttcggcgcggcctgctgcaccgaggagatatatcgggttcgacgatgatgatgaattcatgagtgactctgaagaggatgaagaagctatgaatgaaggttcagaaggaaaaggaaaagcgaaacataagtggtcgcgtttttttgctgtttaagagcacttttcttaatttggttgttttagcgcatttatctgttccagcacaaatgtattcatagtcattcaagccgtgatcttactatgatcagtattaaatatgctttttattttgttgtagtaggtatcttgtactttacgtagtaactatgtgatctttgtttcttttgccagcagatgccatatcggctatcgccactgcaactcttttcggatagcggagcgaaccgataacgccccaaaagagctctggaatttggtagcaaaacttctctcaccattttcattctcgatcatcatgtcgtcggccctcaggcgcatgagcccgagagttttgtggaaattcccacgacaatgccaacaagcgcagcgttttttccgcagccagcaccctcccagccgcttccggcgggaggttgtctgtggactggcactcctgtcgaccgttcagctgcgaagacaatctaccagcgcatctaaccctgtgtcatcaacagagtctactcaggctgttctaccattatgctgtcccggatgcggggcgtattcgcagactgtcgagccgaacgagccaggattttacagcaaaaccagaaagcaaacccgaaagctcttattggaagcgcaaaaggaaccgttaaaggaatctgcaacgcaggaggcggtatttaccgtacaaaaagctgtcgaggaagcggagattgctcctaagccacatcgttagtattccacacgtcctcctcgattgcgcctaacagtttgttgcaggtgatatattgctcgaaaatgcagcggataccgtcagccaatatctcgagaaatcacagtcaccggtgcaagtctgcgacagatgtcacgacctactacaccacaataagggggtgtctgctatatcgccttcgatacactccattggagcataccttgacgaatcgccacataaacataaccgaatatatcatatcattgatgcggcggatttccctatgtcgctttgtgatggtatatacgaagaatgggaattcaggaacagcgctcgcgaaccggcgatccgcgacgataaatacaacacgaaagaagctgncgacataacgttcgtataactcgctcgaccctttgggactactaagaattgtggatccaaatgagttggttgtaagtttcgtagaagtggttttttaggaggatcctttgcatgtcaagacaggccaccaggttgtgcaaaagcaggaaaatcccaacttggggattgtttcgaggccccttaaaaaatttacactttcaaaaattactctcaaaagggatttcccggaaatatctttttaaaaatttttttttctttttt

SEQ ID NO: 1568 - DNA, 5500 bp, Emericella nidulans
tttatcacgcataacgatttacgccctcctcttcggcggctctttctttgtgcttgtttactacctcccgatcttcttctcagagcgtccgcggctcctcagccatgacatcgggcattcagctcctcccgctcatgctagcaaccgtggtctcgtccgtgctaactggcattcttgttacgatcttcggctactatacgccttttctgattgctagtacagccattgcctccatcggtggaggcctaataacgctctactcgattgacatctcctcggggaagtggattgggtaccagatcctccttggagccggggtcggcgcagggttccaagtcccaatgacggccgttcagacctcgcttgcctccaagcccgacgatatcccgcagggtacagcggccgtgatgttctttcagacgttgggcggcgcactattcattgcggttgcgcagtcgcttttccagaacgggcttattgaaggggtagtcgagtatgcaccgtctgtggatccagcggcaatcgttgaagcgggcgctacggagatgagacatgtacttgagcagttggggcactcgatcagttggagaatgtgatattggcgttcttagacggattgagggacacctatcggctcagtttggcgttgtttctggcggcttttgtcgtatcttgtttctttgagtggagaagtgtcaaggaaggggggaaaagtgcagagggagcggtgccagctttatagatggacagaatggtagaccgagttgggggtggcaaattgtttacaggattatagattcacatgctgtatttagcgatacactatagacactaatgaactagactctctactcaattgtgcctgttggtcttttcaataagctctaactccttcaagcaagtctataccgcaaccctatgcttctcgtcgacttcaccatcgccagaggacagaggggctaataggcttctcgaaattcatatccttcacgaaaacaattctaattggtagctgaggcgaaatatctgagtaaagcagtgttcagaatgagaacgtacttcgtccgctagtcctacctgcgatttgttgaggattattgaaactgatgcccttgcctccacccctacctctggtctacgacatcctccttttgttcccgtgcttctcactcgtggcgggcggcaggttttatctccttatttcaagcatataacgtagctggaaagtctagatcagtccccgtcggagcggccctattaccaccgaacagctgtgcattatagcaccattcctttcacctgcagagaatcttgatatgatctagtatgtggcaggtgtcgaaacaacgtaaatacgccgtcatcgagtccatgggtatgtctagaatgggcggcgtacggctgttcgaggtttgttaggtgatactacatgtgagacaacgatgtgcataaagtgttcctttaggttcatctatagggctagattcaggatattgcaattgagtctcccaacaatccctccttgatgcgcacatggatggggtaaaggactttgtctagtatagctgtggatatggatcatactcggtattgaccaaattccattcaatatgttgtttatgctagaatcatgagcaccaacatccggaaaataagccgtacgtgatgtagtttttagccaaagtattggcgctcaagccagggcctcaacgcgtccgtcctggaacgcttgattatcgcacgtgtggaattgtccgatggacaaactggtcctcttggtgaactgtttgtactcaacaagaagaaatatagaggcgatatcaagccaaaccctccgacgagcctccggcgccttgagccttgccctgatggccagaaatcgtgcttagggctcagggctgccgaggtaattggatacaccaataaccccggcttccgaaatacaccatgccatttcttttgtgaatatgtttctcttggtccaggctgtacctgggaaacatgaattggaggtgagatggcttcaagctatgaataatgggcctgcgcctgcgtatgatgttctagatagatgtatcttatccaggaactggagggagtggcgagtcgaacctagtaggtacattttggcacgcgttgcaccatcacctcgtgcttaactgaatctacgaatgctttcgctgcgaatgtactggaatctctgcggtgcgtacaatggctggtcatttagtttaacccaggcagggttcctgcttcagttcgaaaacacatgtgccgccaagtagcttaaaagaccttccggcactcgtgatagacttgttcaagcaagcacgatagcgagtacataggtgaagaatatgatcaaggcgttagaaattaaccgcaagcatcgtctctcactgttcggtcagttattgcattacgcagtagtctggtagaatggcataatacaccgtataatgcaaatcatttacctcaatggccgactacttaaggcgtttatcccattccctgaagctcttcttctgtcttcatccgcatgtcacagccgtctctcaagtctaccgaggctcagtaaacatgactcttctcttcctgcatctcttcgcccttctaggtggagttgcgtatgccgcttcctcttcgtcggtctctgtctctaggtcgtccatttcgctccccccaatctatatgctctgttccgaactggaagcattcaacgccaaccttggccctctcctcaacttgacccaatatattccccccggcacgtcctccttacttcttcctcaactcgagcagcgcctcgccgcaatcgagtccttcaccgcaggttacagtgacctcgtcaatgcgtttagcgccgacaactgcgcagcagctcgagaaactatcgtcccgtctacccgtctgcggagtcgtcagctcgatctagtgggcgtcgtatgccaagtcttgggtcttgttcaggaagcgctggcgttagtgtccgagccagccgccagtttaatccaagctgtagaggatgcccttgggtgttcaagcgatagtgagggtacacaggtgttagaggaataggcttacaaggcatgccgcagggcaaaagcccggcgggggtggtgcataccaccgataccttttacatctccagctatcgtgtttgtcgacctctggtgatatgagctgaatatctcaacgtattctggttttaccacgaatcaagccatcgcagccgtgactttttataattgcctgaagttgtaccacgttgtctctttatgcaaggacctaccaaagtctatcctcgacctgcattagccgcttgtgccttggccttaagcacgttctttctggcttatacacatataaccatatgctattatctgatatagaagcttcaaatgtgctaggctgtccagtaagccctgcgacacgtgtgatctcggagggagtcgtaggtaacctgagcgcccttgaaaagtccttaagagccttaagcagccttagcacatagtgcatagaccaaccactctatatttccgtctatattcccatgtccacaaaagcaaacgaatttcagtttgagcttcgcgttcctgactaccagtaggtaaaaatatagcaataaaaataagagaatgaaaatatatagaataaaaaagaactttcaagtttaaacttccaattctctcacaataaccgtgttcacgttgtgcatatccttgaatttacaatcacttttatacgtacagtagtcctgatacggacattggtggccagagatacagttaacatcgcggcacataagcccactaaagcacggagtcaagcgtgcaacgcgcatcagatcattgagctcctgcatgctgagctcagttccgtgttcgtgcgtgcagctgccgtacgtagccatgttgtggcagtatcctaggatatggaactggttgcagagtttgcgtcgcttgagtgcggtgatggcctctttagacgattttttgaggacactatcgacgcgctggttgcgggcattaagacagactaatagtcgaggcttagactctgatttagtcttgctgtccttcgttggtgcaattgtagccgccgcagcggccttcgctgccgaggcgtagttggggatggagttatgattatgcactatggcgggcatgttggcggacgctatcgctgggctagtgatgtcttgggacgataatttcctgactgggagtaacaacttggacgatttgaatacgtctgagaatgtcacggtctcgaagctcgcagccagctcggccatctcgcgggggaaaggaggccccttgacgatagagatacgtctcgatccacgatggggacctaatacacgcgcgtagccgctatctgcggacgcgcagaagataatgcggcgacagtggacgttgttgatatcttctgcgaacaaacctaaccccatccatgttggttagtactcctggatgagggggaccagataggataaccttttatcttgacatcagcacattctttcccattacccgcatcgacaaagtcacacagcgggttttccatattgaaacctcgaataaaagcagataagtctgagtcagaacggatgatgccggtctcgcggtagaccttggtcaagccatgcacattcgaatagacccggatattgcagttgataattggactcgccttggggtcaatctctttgatatgctcctgtaccgcgtaaatcaaagcctgtgcagcgtcgtggccaccttttttgccatcctggataaaccggtcctggaactgatatctgttaggagtcgtggcctctctggatagatgcatatcacctacattcataccatcaccatctactaaaacagatacataatctaatttacgctgtatcgctgcgtcaggagcctatcaggaaatatgaggcagcaactcactttctcatcaacgaggtcctccatctgagctttgaattcgtttcgctcgtctctgagcgaaataaccgcccgcctttgagaatcgacctcattcttttcaatctgaagcttttcctcaagatcttcaatatgctcgaaaaggttctagcagaagagtcagcttgtcaagtctttcaggggcgttaaagaaggcaacagactttaataatttcatccttgctgctctcggccttgcataactcgtcatgctggcgccgaaggacggctgggtcgatcattttggccggtcagttggctaacaaaaggaatatagaaataaaatgatactggggtgctcagcagaaaggctctaggttcagtataaggaccccgctgctttttttttcttctcttttgatgggtaaggtactgtagtgttgtcacaggaaaaagacaaggcagctaatcctgcaaatctttgctttatttaccgattttggctgagtataatgaagatggagagaacatgactaccgttacgattttataggcttgtcagttcaggcaatagagag

SEQ ID NO: 1569 - DNA, 4328 bp, Emericella nidulans
  unsure (1)..(4328): unsure at all n locations
agagattcaaatgcgagttccagtcataggaccagtccgacacgctgtatttccagtaggtgctaccaacgtcgagaatagagagcttgctcgctatgcacagttccgcggaatgaacatgaaatagattggcattgatgttaaggatcttcagaagactcccttcttataggtcgtctgaggccacagaggttagctcgttgccagataggtatagctccgtaagtagaggccagcgtttcagtagcccaggcggaatttcattcagcacgttatacgacaaattcactattcgcaactcagggataaatgatagttcacgaaacacgtcatcctcgagccggttatcggccaggtacaagttccggagcgagccaccaaatgtagtggccacatgctgagagaaattcgaatctttcctggatgatgggctgccttctgcgaacttcgaagcagtggagaccttccttcctccctgactaagagaggaggcgaccgacggttttcgagtgctcccaccaccgggagagctcccactgggcgcgctgccagatgcctggctgggacgccgtgtttcctgctcttctacagtgcccaagtcatcataactcggcgtaactgagccaccgggtgtcatcgcgggagtagtaccagcagtagcctcgcccggaagctgaggtggcgggccgccatgcttgggaaagctatccagaacgtttgatgagacgttgagagtctctagtttcagacaataccagatctcttgaggcagccttcgcaagttacactctctcagattaaggtacttgagctcggtcaaacaccctatagacggaggaagtgacgagagaggattcttggccatgctaaaatgctcgagtttagtctgctcccagatgatgctgatgttttatcctccgttttgcagtggctccaccccgcttgaaaagaagattgccatccgtcccacctcggaaaccgtcatgtacccctactatgctaagtggatccggagtcaccgagacctccccctcaagctcaaccagtggaactccgtcgtccgatgggagttcaagcaccctcagccattcctcagaactcgagagttcttgtggcaggaaggacacacggcgcatctaactaaagaagctgctcacgaggaagttatgtacattcttgacctctatgcgcaaatttacgaggaactcctggctgttcctgttgtgaagggtcagaagacggagaaagaaaagtttgctggtggtctctacaccacgactgtggaaggatatatccctgctacaggtcgtggtatccagggcggtacatctcacggtctcggtcagaacttcagcaaaatgttcaatatcaccgtggaagacccatcagcgaagggcgacgaaaagaagccgcctctccacgtttggcaaaactcgtggggtctgtctacccgcactttgggtgttatggtcatgatccacagtgatgacaacggattggttcttcctccccgtgttgctgaaaaccaggtcgtcgtcgtccctgtcggaatccctgctaagctcacggaagaagaccgtgctaagctctacgctgaggtcgacaaaattaccgagactctcactgccgctggtgtccgcgctatcagcgacaagcgtgagggatactctcctggttggaagttcaacgagtgggagctccgtggcgctcctctgctaatcgagtttggccctggcgagtctgcaggcaattttgtctccactgcccgtcgtgtattccaggcaaggatggcaagggcacaatccccatccctgaactttccacagccgttcccgctcttcttgatacaatccacaaggacatgttcaagcgcgccgatgaccagtatcgtacacaccgcaagctcatcaccaactgggacgacttcacccccgcccttaacgacaagaatatctgcatcattccccactgtctcactgaggaatgtgaggatcaaattaaggaaatgagcgcccgcaaggctgaggaggattccggcgtggctcaagactctcgtgctcctagcatgggggccaagtccctctgcattcccttcgaccagcccgagggaattgtccccggcgagactaagtgcactaaccctaagtgcacccgatttgccgaaaagtggtgcatgtttggccgtaagttcagcaccattatcaatcgataaatagagacacaagtactgaccgcgcccccttcaacaggttcctactaagcaaagcgccttgccctgaagcctggcaaatcaatatcacccccgccaagtcggcggttcggtctctacgaacgactctcacgactctaacgtcacgtcacccttaacgccgattctttcaagcatagcattgctttgcttgtagtccggtaatgatgaccctcttctgttttatatttcaaatccttttaaaggtctagaaaaatcttgtgtctagcaggcctttcatagttaaactgaggctgtggtaggcgcctggggtttgcaagaggcattttctgtgactgtttttttttggtcgtctgaataattaagcaattagcatcatattgcgtcgtatcgtatacatctctgacttgctgaacttacacaaatacccttagtgtcctggcttctactattccaggttaaatctgatcatcgcagaccaatgctcgaaagcagtatatatatatatatagattttgctaatattggcttagaaatgagatgtactctgcccctgtttttgtgcgcaagcggaatatattacctttgggtataaagcatatagaaaaaaaaaccaatagtcgctcattctgcgcggtaatgtatggagctagcagtccgtagtcaatgccaaaatcccataaaataccatcctaaatcaacgacaataagaccacccagagtttatgcggaggtggacaggaaaaagatggcgcccaataacttcccggataaacggcagaaaagagatacttagatggagcgatatcagcgaaagaagatgaatgcatgatgttaatattgaagatgtcgattgaaggacatggtcgcttttgactagatagagtgcgcaggcaggcagcagttagtagggacgacattagctactaggctaagttggtgtcacgtatatatagtgtctgatattgagcagcgcatgaaaaagagtaggtgtgatgcaatataatgcaaggtgtgacaaggcttaaacgttgcaggtcgtaggtgtagctgtcatatgcgcaatcaacgggccggtcaataagaggctatcgactgcccactcgttgtacgattcttcccgaacgaactgcgcgaacatgcacagcggcttgacgttttggccagttcactaatcggtaagctttccgtgatgtcgtgctctctgtggtgtcggccacatcgttctcgacgccgtgaacctttacctgcggaatgctgctgacgctgggaagatggatgatatctgaatcgctgtcggagtcgtgaaatcccgttgggctatcgctggtgggcgaagtttgggcgcgcatacagaggaccgagggctttgtattgaaactggagtggtttgcgccgcttgtactcaaagtgctaattcccttcccgtggtttcggtgaattcttgaaatgaggaaaagatcatgtaggtgacggctcctcaggagattggnatgttgggnattaatgtctcgaaaaagccaggtaagggggtgaagcatcagtatgtcgccggcggctgggaacattgagatcccgacggaaagcattggacgggtcgctcgtgaagatactcttccgtgcttctgagttgcggcggggttttatgaacgagcccttgcggcgtcgccgttggccctccttgagagcaattggcttcggtggcgtggcgctctcgaacgagtcttgagagggtgacggagtgaatggggccccttgctcggggacgggaacccgttgaaaggcctcgtgggagttgatttcgcggatgatggcatcttgaagagtttcgaatgttgggtgcggtgttaacgcctgagtggaggtgtacgctttgcggaacatttccatgatctcggctactttttgattcgagctaggtaatggggacggcgttggcgttgcaactggtagagggctgttcatgatctctgcaatgctagggttcttcgttgcgtcatggttgttaggggttggcggttggatggccttgtgtgctatcttttttgagacaaccccgagcggccaactcggtgttgatggacagatccaggatgttcgtctttatcctgatcgtagg

SEQ ID NO: 1570 - DNA, 1632 bp, Emericella nidulans
ttccgctcctcctagacggagcgaggagctcaggggacgatccgaaacccagataggattcggagtgcgcaaatgcgccagtctcgtatctaaaccaaggattttgaggcgaaagagacaagctattccagataacccgtgcggatcagagcaaagcggatcatgaccttgaggctgtgttacagccataaaattggctactgcatctgtttggtgcttgctaatagcatcaggtttatttgtcagtgtctcactataaggcatctttatggtttcgggcttcgcaagatcgaacttcctatatgaatgtgcgcgtccatacgtcttgccatgatgtagcacgcgacggctttggtatggattgcgcgaattgcccagctggaggagtaccatgtcccttgcctctatgaccactagacgtctggccgatggggaattcaatgagcttcgtcgaggtccattccatgccgaacatacagagccatctcgagactaataaaaatggaaggctgtgcaagcagtacgactggccttttaccttagtcctctatccttggatttccgttgctctctgcgagcagcagaggatgagtacatcgacgacggctgatctgtcgcatcaaacatacatcaaatagctacagtacgcttgaatattctcaggtacaattaattgattcgggagaagcaatgaaaccatgacccgtagttgtctgttatcgtccacagaccaaagatcagtagcattcgagcggcgttggagcggtaaagcgtccgagacgcaaggcagcaggttatacctcgacagctaaatttatgcctgaacgtgtcacagcagtatctgcttaaagaatgcagctgaacccttgaaactcgcagaagaataaataataaaccagccagttctgcgatgtttgtgatgccactatatatagttctgcaggcggtgaacgtctgtgctgtcatagtagattgcccaaaattgaatcaacgtggtatgtggtgtatatcggcctgtcaggtgcaatacgtagacgaactccaccgcataattctaagattcgagaattttggtacgatagttatgactctcttctggccctccaataatgtcaatgcgcacctgtgttgttgtttgaagccgaaggtgcaagagggtccggaggtcgaccgtctatgacgtagtctacttctctcgtctctgggactctccaccaggacacgcccgcactagtagcatggagcctagaacttcctgatttccagccctttggcaaaacttgctgtcggccaagatccaaaaaaaattgtagatctagtaaatctaccgaggatgactgcacaagatcagcttctagcaggagcatcatcggagaaggggatgtctgacgatggaggccacttgttgaccgatgcactagtggatgtcatattgaatgttggacaagagactgaattcttgcaagacgatgttagtaagctgtaattggaggcttggaaacatcttccggccaatgtgtgccaggtgtaggtgcgattgcaaggtcccccaatgtagtctgcggtgttggcaactcgcggcctgcccaagtgcgtgcggtctattcctttctccagcttcggggtattctc

SEQ ID NO: 1571 - DNA, 582 bp, Emericella nidulans
aaatagaaaatttcaaaaaattgcgcccgcagcgcgtgcatacaaaatttatcctaatatactttgagggagacttcatggctgctaatctcaagtagaattctataactaccagtataggctatccctatattaagaggtcttgataggatagatagtattacttaatatttatagagcagctcccaggcccttatatatatataagatagtataacttatcctagataaatccttaaccctatcaaagaactaggtaatagagtttataaaaaagtaccctgaaattaaaaccaggtttacttagaaaattaattattaaaaaatactttgtaaaaatcccaagataatttacctattttttaataagatatagaggattaaagttgagtataggatattagataataatatctatagctttgataaaaccggctttgctataggccttatagcaactacttaggggttggagcctccctacatgcattatctttaaaagcagagtccctattgacagatggtataaagaaatcaacaaaatattatattggaggattgagataagcaccaatagctgga

SEQ ID NO: 1572 - DNA, 4970 bp, Emericella nidulans
aatcttaagtatcccgaacgtgcatgctccatctgtcaagttttgtgctcggcgcaggttggatacgatgcagcggcactatacattgatccctaatttagctcaaagtccagtcaaaatatccagtcaacataggagagtaaggtaaaaatcagcacgaaagttcatagtaaagcattcattttacagtgtcatgtccagctttcaggaacagtggccgaggatgaaggggcggtactatgtcacgtctttccagatctttgcaggttcagctttgtctccgtctgtgttgataatgcgtttatatcattccgcgcattcttctcgaagaagttgtaagcaagcattctcctatgacaaccaaggctgaagactaatgtatccctcaatgatagtagcatgggagggaggtctccgcctatatttcagcaatatcaccaccataaatgtttttgcaatggtagcgtcagcagcgaatcagaatgctcagtcaagatcaggagattcggcgtcagttgtcttgtgtagagatttctttgcaggttgagacatttgtcattaggatttttaatgactgccaactcgagatggactttttggtgcagatggtttctcgaaatgaggcatggagctggatacctactggatatctacgttgagccatggaaaagtcagccttcatgtatgacagtcgctttgggttgaagaatacacaattctcgaagctgaccgcgatatgaaaaaccctggcaggagacttgacaggctgatatctggatgcgcaagagtagaatcaaagtatttgataagccgaaattctgtgaatagagcagtatatcctgagtacatgggaacttaaattggatggtatggaaatcatctgggtatcttcaaacaggacgtccaatgaagggtgataatacttctagggcgaaattctgtttcattgtaaatttatgacagtgttatctttagtgaatgtatgaaatctctgctattatgactgacataccaatgatccattttgctgtgaatggtctgtgatcacttgtgtgcactgggcagtttgccctgaagggatccacccgtcttctgtgcacaccattcaaccttacgaattcagaatttttaggcagggatacctatgctaagccagaaggtgaagtcattgaggataaaattcttacttgccttgccctggctctcttatttcaagagtatggtcatcgaccagctccctctatcttttcccactacttttatggtggtatctccctgttcctaagcaccctgttcatctcatcagtgcggtctatcactataaggttttttgaatcattttcttctctcattgtttaccttgtcagttatagccatgcagttccaggatatccccgaggagatccttctgagcatcattgacaccgttgcagacgaaggcatccactacctgcattccctcgctctgacctgcaagcgctgtaatgtcctctgcaacatagacgagcggcgttcctaccattgtatctttatacacagcttccttgactgcaacgccgctttcaagaagctcctggccatcctgcgcaagcctcgtcttggaaggtatgttcgtcatttggaggtaaacatgcagtccaggctcaacgtcccgtttgccattcttccgccaatttgggagcgcaacctgcccgatgaggatatgaagttgctccgagctgctgttagaaatgccggttttgagggacgccacgagcagagggtgatgcaaatgctcatgcaaagggatgcgcacagccatttcatggccccggcttacaggtattatccttcttcccaaagatctttctggatatctgtagctaaccaaatctttagtcttgatattgctcgcgaacgcggagtctacattggccaagccattgccgctgtccttcttaccgtctgcactgatatcgaaaacatgggcattggaacccctgctgcgagagagctgacgtgggaccagcctcctcgtgacggagtgctcgttcacgcgttccctctttgtcgaatcatgaaagctatccataagtcgccacttcagtgtgggtatctgagcaaattaagaatactggaactgttcactcctcggccgggtagccggatgtacgaccaagcggatatcattgggcggatggagatcttccagggactaccgagcctggagacacttgtggttgagggtgcgagctggggaaccagatccaccactagattggtcgagaggcgtttcacggtaggcgcttgtcgcgcaaagaacgtctacatcacacactcgaagtttggcaccgatgtccttgcaggtgtgctctctgctgtctctgagcttcgcgagtttacctattgtaccggcggccgcatgggacatccacatttccgccacgcaaacgatttcaatccgtgcaccttcttcaagttcctcctgattcacaaactcacactccgcactctcgacctagactgcgatgctcaactcggggagtcaatgaacacctattacgatggtggcgaaaccatcctggagcattatcctgatgagctcaaccgcacttgcggcccctactgccggcacatagaaaacctccactggatcttcaaattagatggtggactgcgtgatttcaccgcgttaactcatatgagaatcggcgctaagaccctcgtcctttttgccctgggtatcaacactcggctttctcgggcgcgcccctatctcgatggatttatgctgctccatgctctgccgccgaatctccaggtcttgactgttcggggcttccgggtgcctattcctggagcttactatagtgtggattgggctctcttgagacttgctggtctactggctagacatcgtcctgaccttgttgttgagggattgggtccgctagttcagagcgggcatgatcttactcgtcaatcgcttccggcggatgtttatgatcaacttattgggtcttaagtcattaatgggtacttgtcttcattttccttctacgaggattttgtatgttgcttctgtagtactttctgttgtcccaacacgctgtatgcttgtcatctcacgcggattagccagtcttgttttcttctgctagaagtttgagtttattactgtctcctctttgtcatttgagtgtatatggctaagaaaaagtcgcggaacggaatttatgagctgcaatatgtctcctagatgaataactataagacatagtatttgagtacaggggcagcgccgcatatgtactaatattcgctactgaatccactaatctatcaaggctaatatcaccccaagtcaggacggactgatttctttctctgcttgtttagaaacagaggtcaaaaaaaaatacggtccacgtatgaccaccacggctttgctaatcctgacctataaaatagcactgggacccgcaagatcagcctttgacggcttcgtcaagtttatgtcaccctaaattccgtgctctctcctcattgctagtgtgaaaactgatagctccgtacttccggtatttgctcgctataaaccagacttggtattattgctaagtaatgcagggcaaaaatgccggcgtgaaccaggacattcatagacacaatttccttctcccagtaaaagacaacctctcaaagctccaattcttgttctttatccttattctacttaatgatatttccatcgacacaatgggctgtttgtcaccttacaactatagattggccgggttgaaatcactatgacggcagactagtgcctaatgttgttgatagaaaaattggtaacagcactatttctcggcatttaccagatatctcgtatattctaaacaatgaatgttcagagtcaacttgcctgtttgctcggtctatcgatcagatttccccaatagaaaatagacaatgggtcgaactcggtgttcgaaacgcaagcactagatagagatctgcgctttcaaaggttgaggcttaaacccacattgcaaaccggatcaggtggatttgaggttaaagtatgggcaattcggacgtaatatctagggggttggtaatagagaatactagctaagcagactccatcgcagcttctgctttgtacagcaacttggttgcagtcgctgagcaatgagcaggcgagtagcaggggtacgtctcggcatcgagatagaggatacgagatatcacctcgtttctgaaggattgtacaacaacatggttaacgcgtttttgacacacttatatcacgaaggtcgagacatacccgtcctaagttgctgttggtgagacagcagcgggctgattaattgcctgatgcaggtgatcttgacccaggatggacgggctggatagatgagtaacgggatgggtgggaattttgcgaaatcgcgttatttgatacaactaaagcttccacggatatgtttgaaagataggcaggcggtgatgaatagattaactgagctttggagaatgctatcgagtcgtgagctactacgcctctcaggcttgaaattgcttcgatcactcgagagtcctaatggcagtaggctcattatatagcaacagtataccgatccagctatcctgaaaagcttgcatgaatctcattctgccctctccggtaccgtaaggccttttgataaccgaagctggtactaccagctcaagtgctagtctctcttcgtgctgttgtcaaatccaaaggtgcctccaatactctgataccaaccacaggcagccgtaattgaataggctgcactagagactaccagatacatcaaagtcagttcctgccgcgttttgccttggactctctcagaccaattcgatgtgctaggatctgtgaataggaggtacgggaatggatgagcagctatcatacgtcacctctcagagtggcttagcaattcaactactggtaa

SEQ ID NO: 1573 - DNA, 6496 bp, Emericella nidulans
aggggttaatgcatttaagctgcaggtgggcgcgaacttggaggatgacaggaggcgcttgacatttgtgagggaggcgattgggtatgataaggggaacatcctgatggttgacgcaaaccaggtatggcaaatttctttttgttttttaaagtaaaaagctaacagtgtctccgacaggtttggtccgtccccgaagcgattgaatggatgcaaaacctcgccgagttcaagccctggttcatcgaggaaccaacctccccggatgacatcctcggtcacgcagcaatcaagaaagccttggagaacacaccccacggccccatcggtgtcgccacaggcgagatgtgccagaaccgagttatcttcaagcagcttctgcaggccggcgctctgacggttctgcaggcggacgcttgcagagtcggcggcgtcaacgaggtcctcgctattctgctgcttgcgaggaagttcggtgtgccgattgtgccgcattccggtggcgtgggcttgcccgaatacacgcagcatctgagcacgatcgactatgttgttgttagtggaaagaagagtgtgctggagtatgtcgaccatctgcatgagcacttcttgcacccatccagtgtgaaggacgggtattatgtcacgccgttggagccgggctatagcgttgagatgaagccggaaagtatggatcggttctcgttccctggagaggaaggggtgagttggtggaagtccgaggaggcgaaggttattctggaaggacctaggatataaaatgtgttggaataatctgatattttggcgagttaaggctggttcttcgtacaactttataggaaattgtttcattgggatatcatcttagacccataagtaagaatgaaacgaagtcccaaaccagccatataatacaaggggcataatgccctgatgataacgccagatgcctaccgccaccggatgccgaatatcttcacctcgccgccgactttagggtcatggcgctcttcaaggacgacgcgggaatagcctgcggctgcgtcagcacaccttcagttccactcgaaagagatgacagacctttgacttccaatgcaagaagccgatactcccactcattcgcatcggtcggtttcaccatatgtacgaaaacagtccccgagtttcgtggtcccgaaacatgaaagttcattctcatgtgctcgcgaccttggtgatctttctcgatagttgtgctgccggcaattagattcgcaactaacgtagtgactaaagcatggcatgtccatacgcaataggcctattcctcgcccaccgactccaagtgttctctccatacgcctggatttcccttctatcacccaggaggttcgtacaccgcgcatcattcttgattcgctctacagccttctcaaattgccatgttttgctattcggtgagaagacctcagtgtatagtagatagaagacgccgccctatcacacaaattatcagcgctaatccctcataccgactcgcgatcgtgtttaccgtaagagcagcaccggctaacaccaccacgaagttgatcgactgctgtgttgctcgcgcaaccttctcgcgaccgctcagctcgctccatgtataccggccgtcatctgatagtacggtgacgtttcttcgtcgcggtgcggatgcggagcctcggccgaggtcgctgtgtgtggcgtaggtgctttgggatgtgcgggggattagtggctgagatagtacgaggctcggacggaggaggggcgagggtcggaagtgagtgaggctcattttggggggtttgatgtagaacgtcgggatggcttcgcaggtagggttcaagggtggctgtagaggtagctgcggtcgcccgcttcacagttgatggagtggccagtcgccctgtttcagcgtacgtttcgtatggcggtattttaaagcataaagcgtatcgttgccctgtattccgaagattggatttgatctgttgctggattctttcatcgggacctggatgtggggatgaggaggtggatcacgtgccactgggatgaatatgtttttgcaatacgacatgtatggaccccaagggataatgtagagcaattgagtgagggttttgtctgtttcaatggctgagtagcagtgagaagcctctcccaaagtcctcgtagtatacttagctgttatcctatagacctggaaatcattgggtactgcagtggcggtaaattgcaaatacggttaggcgccagaccctttccgaccacgttcgccctcccgacttggctgctggggatcccttcaagtctttctccgactcttcaccaactcccacccttctcattcctgtcgtacttggatttgctgcctttgattaccgcaatgagtgccaccaaggcggagtcccaaaagatctttgagaaactcaagaccaaaccagcaaataaggtgacttaacccctccatataccgcaatctcgtagactgaccccgtgttcgcggaaattacccagatatgttttgactgcggctcaaagaaccctacatggtcatccgtgcctttcggaatctacctgtgcctcgactgctcagcgaatcaccgcaacctcggtgttcatatctcctttgttcgatccacaaatctcgaccgtacgcaccgactgcccttgaggtgatttgtttctgactaacctcaccctattagaatggcaatgggaacaattacgtattatgaaagttggcggaaatgagtccgccacgaaatatttccagtctaacggagggtctgccgctctcgcaagcaaagacgtcaaggtcaaatacacttccaacgccgctgtgaagtacaaggaagagttgaagagacgcgctgctctggacgcacaagagtcggtgctcgcctgaactgtcgatttattccgcaagatgctgaccatctgcactgctagataccctgaggaggttgtgatcacagatgttcccgctggtgcaacgtcaaatggttccagcacacctgccggtgacgacgatgatttcttctcatcctgggacaagccttccataaagcggccgagcaaccccccgtcccgcactggcactcctccagtcgtcagccgtacatcctctcccttcttgaacgcaggcgcaaacaccgcgcggtcgaagtcacctctttcatctgataaggaatctgcaaccgcctcccctgcaccgacagcgatcagggctagcgctgctgctcggaaaacttctggaacaactaccgcgaagaagggcagtgttcttggtactaagaaggcaccgaagcttggtgcgaagaagatcggtggcgcggatctgattgacttcgaggaggcggagagaaaggctaaggaggaagcggaacgtattgagaagttgggctacgaccccgaagctgaagaggcagaggccgccaagacgaagacttctggcacaggtgctactgctatcgcttcaccgaccccgctcagccctaacaaggtcggttttggtgccactaagactactcacgagcggaactcgagcgatgtggagcgtctaggaatgggtatcggaaggcttggcttcggccaaaccgttggctcgaagcctactgctcccgcgccgaagaaactcggctttggagccgttggtgctgcgcggtccgctgaagatggtacgccctgttacctttattatcagcgcatagctaatatttctacagaggaagaacttcagcggacaaagaacaagtttggtgctcaaaagggtatatcatcggacgagttcttcggtcgcgatagattcgacccagtagcgcagtcagaggccaaggagcgtctccgccaattcgacggtgctcaggctatttctagcaactcgtactttggccgacctgaagatgactatcccccagtagatgacacctacggcgatctcgaggctgcagccaaagattttgtccgacgattcggtatcactgcaggggacgacctggagaacttgacgcagctcgtgggtgatggtgcgagcaagctgcagggtgcgtcgtgcgtgacttattcctttctgacatccactgacgaatactcaggtgctatacgtagctatctcaacagctaaacgagtgcaagagttcctatttcacaatgatatcctcagcttacgaacacgttagttagccagcctgtttcttttcgcgatgtcgttatttgacccttcactcaatatttagtttgttacggcgtacagaacattagttcgacttcatttgtttgatacagaactaacatgtagtctcccacgttctacagatccgttgttcctatccacaaactaacacgaaacacttgatacaactgattcaccttaccttcagtcaggttcttgtacatctgttgaaagataaagcttagtccttattttctctaaaaatctatagaatgtagtttagacacctttctccttcatgatctcatcaactactgaactcccctatatattgcatccgcaaccctcgtgacctgccacatttctttaacgtcatggacccttacaatgtccgcacccccagccacactggccgtaactgtcgccgctgtgccccaaccgcgctcactcgccttctccactcccgtcagcctcccaatgaacctcttgcgactcggccccatcaaccaaggaaagtattccagcccctgtgttttccggagcgccgcaaaatccttcaggatagtcagatcctcagcctggttcttcgcgaaccctagcccgggatcgagtatgatccgccaccgcctgatacccgttgcttcagcggctgccacacgcgcaagaagttccgtgcccacatcggatattacgccgttggcgtacgaggttagttttgtcattgtagaaggggagcctcgcatgtgcattaggataatggatttgccggactgtgcaacagtgggaagcatttcggggtctaggagaccagcggagacgtcattgatgatgtctgctccggcggcgagggcttcggctgcgacgcgggcgcggtatgtgtcgacgctaatggctatattctttgcttcaggtatggacgtgcggatatgccggatggctggaataatgcggcggagttcttcgtctaccccgacgggtgttgaacccggccgtgtgctctcgccgccaatatcgataattgtggcgccagattggataaaggagcggactgtggaggttattgcttcaggctccgctaggtgtttgcccccgtcagagaaagagtccggggttaggtttagtattgccattatgtgcgtgcgccgggaggggtccgtggcgcggagcggtggaaaggatggggatatgtaggttgtcgcgacgggggtgggcgagggtggggggagggaagccaggtgggagaggtaggttgttttgtggcctttgaagggggggacttcgttgggaattagtctggctcctgttagattactacttgctcgaggtagggttggatgagtgcttactggctcagaggtcggaggacaaaatctcgctctagcataagcttgtgcggtatgttgagacggtcgtgagtgaagacttgttggtcatagagaaggatgtctaggtcgattgaccggggtcctttgtcgatcaacttcttccggccgagactgacctcaatggactgcagcttgtctagcagttctagaggttctaatgttgtttcaacctgaaaactagtcagaatacacgaacaaaggtatcatgggatatgaccgcacctcgcaaacgccattcatgaagggttcctggtcgagatagtacatcggggcggtttcaaacaaggaactggttcgttggactttgatgccggctctgtccatttccagacaagctttctcaatcatctcgactcgctcgccaacattactgcccagcgcaatgaatgctctgtgtgacggcttgagagcgtccattgtggcgtttaataagaccgctcgtccactggaaaactgccgcgcagtttggaaggtgttcaccggttcattgcgcgtagcaattttgaacaacgggcgccgaggggttgttcgtaagcacactggtgagatcagcttatgctcagatttccagtgggatagaacagcttaatgcgcggaaaactatttcataccacagccccaatccctacccaaagttagactgatacatgaaatgaatggttggaaattcacctctcctgcaaggtcccgtacgactttgtacttgagagccccggtatgcaggctctaggtgagcgctgtaagcggaaagctgatctcaagtagacagcaacaagatgctgtcgacccactgacaaagtcctcatcttctgtaacagtatcattcataaaaccgtagcagccgctagaataagtcatgctatcaaaaaagtcactgagtgcacgtgaaaatctagtgcctgaggcatagaggaattaaagg

SEQ ID NO: 1574 - DNA, 2335 bp, Emericella nidulans
cccgcttggggcgcccagtggttcccatcgtgggtccacgaatctgggacacattatcccatgctccagctaaggcccagatgcgtcttttctgataggtacacgttacgtctcgttgattccccatcacaacggatcaccttcagtggctctcagtctcgtggctgtccgagtccctcataaagtatcgtgctagtggcttttcccataatcatcgctgagtgtgtccacggtcggaccaccccttcatcaagtaaatcacaacctcgggaacaactaggacaacattcaaaacaaattccattctttacccgatatcagatcctccatgaagatacatctgattagtgattatacaaggtcgcaagtatcgttgctttgagcctcatcaaagtggacgtatctgccttttgccagcaacccaaactaccatgaaaaagccatgacagcgagaacggttcccgacctactcatgttttctccctttcaagtagtttgcttttggactttcgaaagaatgtccggaacattgaccgatatattggctttccttccacggtatcgctaatccacccaaacaaaacgagcagaataattgacaagaccatgatcactgcgaaggccacccagtactggacttgggtgtacacacctttgaccccggcgagctctgtcgagaagtatccggtcatcagactgaccggaaggaacaagatggtgaccttggctagcagaatcgttatcctcgtcagtttttcgacggcttgcgagtctttgagagcgatcaagttgaagttctattctcggttataagcagtgcctcgtcgccgagggacggtggtaacgtacgaggaatgtgagtgactctttctctgtcaggcaactctcaatctccgacaggcagtacagcttgatacggtctagcaatcgctcaaatctagcgacagcgggtgggctcaagcggacacccacagatgtttctggagtcgaggcactgaaactttcggtcatctgtctatgaatctctgggtcgaaggtgtgtccaaacggcgtcctttggtggttttcgcgtgcttcgtcctggagcaaccgctgtctttggaggagacgggtcatgataagctcatagctttgatacaaccgcttgagaactgcgagctgccgtcccagccagtgcagttcgtctatcaagtcgacctctggtttgtttagcatgtggcgcctctgtcaataggtcagcattcattgattttatgtgaaaaggttgtcagtaccagacggtcgaggtccacactgtacccatgctcacgctttgcgactagtgagtagctcgagacccaatcgtcaaagatatagtaaaagaggagacttggaccgtcttcctgtttaatgctggcagtgctcgtgtcgggatcatgtaagggccggactctgattgtgaccaaagagtcgttctcagaagtcgccgagtgctgcctggatacgccgcggaagatcagttgtatattcctgcggctggcggcagtcaaggcttccagctcccgttcggatagtgcggtgagatcaggatacggattctcttggatggacaggacagtacctgaaaaagtcaaccttgacacgtcagaaatgggatcgacgtaccatcctcgaataatataagccatgaccataatctccttccatctggcagcccctgtccgtttgtcatcctcaacttcggaacaacgtaaagcgagttgtatccgatgcaggtatctgccggtctttgtcagtaaacccctcagaaaagaaaatagaaaggaagggagtggcctcgcgcacatttaggtccatagtccgtagagcaaaagtgccaaatctgatccactacatggccgaacgtcagtcctctaaatgaggctgcagcatgaacctctttcgagctcggcagatctttcagggcatggccgtcttcgaggtcttcatccacgtttacttgaactggcttagaactgttcttggactggaagctcttccttgggggttggggtggagcggctggttttgatggtctggttacagggtcagtgcacataagaccttgcagccgctcagagacgccgtagtgattcgtgatggcctagtccgtagaggtcagcttcgcagcgagtaaagtgcgtggcgcagagccctagtcagaccttgatcagatgtttttgtttctcaggcgcccatatatttctaagtagcaggattaacaagttgttattgggatgcctgttgcgacttacatccatcgtgtcccaaaacaccgtggcttctatatgatggtcagctcctgggcaagtataac

SEQ ID NO: 1575 - DNA, 4315 bp, Emericella nidulans
ccagtcttcattttagcgggcaatggactaaattaacaaggcactggtatagtatagtctgcagctgtcgtaatttctgcagcagctttgtatgtacagctaccctaaggtccgccctatacatactaggcttattaagcatgcctagactataacctcatctaggcgactttgatgcaatcacgaatggatcttttgtctgcaatcaggatcgaactggggaagacggggctgaggaggcccatatatcagaagtatagtgagcagtcacagtgccattgcaatagatggctttattagtctgagtctacacctgttcagtcatactaatatcctgcctaccctcaacgcataaatccagactcaaatcaagaccattgagcttcctccatccgatcggcagtgacagagaggtagacaaaatattaggaggcaaaggtgaaatcgatcctaatccaagcatcagcactggtcaagccgtcgcaggggattagactgtaggcaaaaaggcgcagggcttaccgtttgttcgtcatgaccggattctcgcgtagatagctctctctctgctcgctgctcagggcatcccatttagtcttattttgcctgctcctgtcagtaaacatagggatagggtcagatccatgaatcgccgtacttgtttctccagacgtagtagactttggccgagatgaacaagaagatactgactactgctagcgcgatgagcactttgttgccctttctgtagtacggctgatcttcggttcggtacacctgcagtactgttcagcaaaactagtatctggggtgaataaaggagagtaggagtgcaatacattcgctgccgcaatactgctgacctgcacgctcatattatacaatgcggatgccacagtgcgcgtgcgcacagagccggcatttctcgaagtcaacgccaccaacacagggtgcaggctcggtccgccgacgatcagggtgaggatcgcgaatcgcggccatggcatgctcttctcaggcaaggtctgcaatgcgatcagcagaacaagataccacacttcgatggcggcgccgaagagcaggcgttggtttgtgcgctcagctagccaggtcgtggtgatcatggtggtgatgctgacaacggcagcagggatcgtgagcaggttcgtctggaaagtggtgaagccctgtgagcggagctgcagagtaagatagttggtctctggtgtgtaggggatcatccacacgaagccgaggatatagattggccacatgtggtagtccttgagtgagtcccagaggagcctgggcgtcacggcctgccgattgtgcatactgcctttgctcgggtcgtcgtggatcacccggttgaccataatcttctcctcgtgctcggtgaaccagccgcccttcccacgaaacccgcccttggtctgcgtcggagaggccggcatccagaaggccgctatgatgccaatgactccagtgagtaggccctcatacgcaaagaggtacctccacgagccgccgccgttagagtccttgatgtgtaggaggccgaaggcgagaaacgcgccgatgatggtggtgacggtgtacgaaacccagaaacaggtcagacgtttaggcagctcgctggacttgtagaaaaaggagagaaagaggattgtgtcagggatgaagccgccttctagcaggcccaggagggcgcggagccctaagtagccggaccgggtcttgagaaaggcctggcacgccgcgacgagactccacgcgaccatctgaatggggatccagcggtcggggccaagtcgtttggagatcagctgcgaaggcagctcggcgaagagaaaacagcagaggaagatggtctgcccagtgttgtagtcgttggtcgtcatatggaggtcttggaggaggttgtcggccagggcattgccaatattgccccggtcgagctgcagcgcaaagaaggtgacgcaggcaaaagtgcaaactcgcgcgtcgatctggtccctcttagccttcttctcttttgttttttggtgatttatgattttgatattgtctttaatggccataggtagctgtgggctcaccttacgcacaatcctcctttcctcctcctccgtccactcaaagtccgggtcccagcggtgaagtccctcgtaggtgtcgataggcttgtagaaacgcggatcctctgtcgcattgaacgtgcccttcttgaaaccagaccggccttgctccctatccgagtcatcgatctcgctgacgccgcgagaatcggcctctacctcgccggtggagatcggcggagtcttcttttcgtctacagccattgcacctgcgtcctaaggataaaaattgcgggaaaaaaaaaggcgactcgttggaacgaccgcgcactatatagattggtccagcgagccatgtcgtgcctgtgcacgtaaatgagatgatgcccagtagtcgccccaacgtgcatccaggcgtaacagagtggggtttacaaagtatctaactccaggaaagaagggttaagccatctagatcatcagccgtcagtatcgtgattccagtactttccttcgtgtatactgtagcagcagacgactggcgattgggagaacccctccgcggagatatacgtgtccaatactacagggctgttcaattggagattaggcattgaatgcaatatgccatcgacaagcttcattccgaggtcaagcttctgttaacctctcattggcaggtctcctcgtctaggactgggatccgctggcgacatctacggcaatcatggtgcgcgatggtgtgagaccactatcgccgatagatcggcgtttaagccctactgcgcgtcggtgtctctacgttatgtagactgtattgtgtcccaggtagaaatctagggactttacaaactgcggcctcggggtcctcaatggatgtaagcaatgcactgcagatggcgacaccatagctaatgccaccggcctttagccacgggcccatagccacattaaattgattaggagacagcttgactcgcttggttcgcttgacttgttggcttctttggttttatctaatcctgcgttctggtacattgctgcgtcccgtcatccgaagggctaccagggtagataaccctaattctcatcccgtctccgcagaggaatagatccacctgtagtgtttatcgtacacatacatacagaaatacacattccgtgccgggctccctccgtaaggttgagggttatatagttctgctactactgctactattactgaattaggcagttcgacgagaggggtacccttttcgtgcgattcagaataccttgcgcaacaattaaattctgtaggtcaaccttcaagcaatagattatcatcggattattggtacattgcgcagtagtagcatagcaagcagccgcagattcacctctttcacgttcttctggacttgaacgggccgtggctcttccgcttgcttctcaatcagtatcccttgtccagtacactttctcagaattagtaatagatagattatggggttcagcagccaaagggggtttttggagtcctgccgcgagattttgaaatccctatctatctctgcgaaaggctcctgaggtcacacatctagtgcgtctaatttccatgggttgcgggcgtggttgaacatatccgcaaggattagtttgtctgtaacgctcgacaggattgccggacttctttcatgcaggttttcaaggtaagaacgcagcgcaaaatgggtacctagcagacccgcagttgaggttgggcactaggaatagttagcaatatcggctcaatgtacatggcccaccatctaattttaaaaaatccccatatttaatgccatagttggttggactcactactagagctggagctggaggcagatcaaaggtgaacctacatagcttcgaaaaggaggtccttcaagtcggctcggtcaagagtcagaagtcaagtatataaaaggtcctcgtgaatgataatcctacgtttggtagcagctcattcctgagaatccatgtcattggagcaaatcgagcttcatcttgtgattctgaagctcctaagtaatgtttgttttgcgcggcatggatagtatggatagggctgacgagtacccctctgattgtcaaaggttccttgagactgatgaataacacggaaaaaaacgctttagtggtaaacagggcagataagttacaccaggggtgtctgcttattgccctagctcattatcgtctagagatatccggcctgg

SEQ ID NO: 1576 - DNA, 2524 bp, Emericella nidulans
gcggtctggcccggaccttcgggagggctgcttttgctcgaccttcccccgtcgcacgccgcgccctccagccctccaagctcaatggcttcccttcattcgctcgcctcgccagcactgagaccgctgccggtggaaagattcaccaggtcatcggtgccgtcgtcgacggtatgtacctcagataccgccaattctccctcgttggcggctacgcgaaaatcttttctacacccgatttcatcacaacatccatcaataaaaacctcaaaataatgtcaagacctgatatctgacttgggaattacagtgaagtttgagggtgagaagcttcccgccattctcaacgccattgagaccgagaacaacggccagaagctcgttctcgaggtttctgtatgtaattgatatcaagaaaccgattgataacaccaagttctgatggctgacactttcaaagcaacacttgggtgagaatgtcgtccgtaccattgctatggatggtaagtcgcttcctttctggcgtgaaacttcgtgtgatcaccatgtctttgctcaagatattgatatctccgttctaggtaccgagggtcttactcgtggtgctcccgcccgtgacactggcgctcccatcaccatccctgtcggccctggcacccttggtcgtatcgtcaacgtcactggtgaccccattgacgagcgtggccccatcaaggccaccaagtatgcccccattcacgctgaggctcccgagttcaccgagcagtccaccactgctgagattctcgtcactggtatcaaggttgttgaccttcttgccccctacgctcgtggtggtaagattggtctcttcggtggtgccggtgtcggtaagaccgtgttcattcaggagctgattgtaagtttcgtatctgggacttcacacgaaaatgtctaatttctctttagaacaacatcgccaaggctcacggtggttactctgttttcaccggtgtcggtgagcgtactcgtgagggtaacgatctgtaccacgaaatgcaggagaccggtgtcattcagctcgatggtgaatccaaggtgtctctggtgttcggtcagatgaacgagccccccggtgctcgtgcccgtgtcgcccttactggtctgaccattgctgaatacttccgtgacgaggagggtcaggacgtgctgctcttcattgacaacattttccgtttcacccaggccggttctgaggtgtctgcccttctcggtcgtatcccctctgccgtcggttaccagcccactctggccgtcgacatgggtggtatgcaggaacgtattaccactaccaccaagggttccattacctccgtccaggccgtctacgtgcccgctgacgatctgactgaccctgcccccgccaccaccttcgctcacttggatgccaccactgtcttgtctcgtggtatttctgagttgggtatctaccctgctgtcgaccctcttgactctaagtctcgtatgctggacccccgtattgtcggtgaggaacactacaacaccgccactcgtgtccagcagatgcttcaggagtacaagtcccttcaggatatcattgccattcttggtatggacgaactttctgaggctgacaagcttactgtcgagcgtgctcgtaagcttgagcgtttcctctctcagcctttcaccgtcgcccaggtcttcactggtatcgagggtaagctcgtcgaccttaaggacaccatcgcctctttcaaggctatcatgaacggtgagggtgatgaccttcctgagggtaagtgtattcttttgtttctattcatcgactccatcactaacttccttatagctgccttctacatggttggtgacttggcctccgcccgtgctaagggtgagaagatcttggccgatctcgccaagaactaaatgtaatattgctttgaagcgccctttttcctttttgttagacatggacttccttttctcattgttccattttccgtcgatgcgtgtacagtactcgaattgagaagaaggaagttgaaaaaagaaaggtcaattcctctacttttaaagggaaaaggagcactcagtcccggcaacccccttgaagtctcggatgcagaacatctagactcgtgtgacaatatattgtgctcatgtaagtaaattaaatgaccacacccggccttataccctcgggcagggacaacatgtatcatttcttttgttggattggaaaatatggtttattctttttctccattgtagtacctctcgtatagcctctgtagtatgttgtctggagcttgtgcagcttcatcaaatgatggagattgcagcatggctctcgcagtagatgttatgtccctgctatctgaactcatcctggctgtttaacgtctcatgtactatgtacgaggccaatgatgaacaaaatcacccatagtgtacagcaaaaagaaggggtgagaaattgcgcggttaacaaagattaaattatgctatgaacttttta

SEQ ID NO: 1577 - DNA, 2547 bp, Emericella nidulans
gtatccggttgaagtatccctgcgctgctcgtgagcaccttgtctggcagcggaacacgtccaggcgagctcctttcgagcccaattcgtccttcgcgcgctggggcggttaccttcactttagcaccgcaggttaatataagtcgcgagctgcgactggtatggactcgacggatggccagtctacacctgcagtgctccgacccggcttgcatgctgcagcaaaatattacaagggtgtgaggattcggacagccaaactgcagaggcacgatcccaggaagccttttctacccaggttgccttttctcgctaatgccgaccgaccaagggcgcaaataatcctcgcgcaagtaagaaacaggcgagtatcaggctgcgcatttgaagaaaacgataggatctcaaaacagagtttctactatacgatgctttggcctcgtctgacgtccctcggtacccgtccccagcattcgagccaactcgggacggtcaggtagtcgacgagctaccaaaggattctttttcacatcccgtgaggactcgttgacgtttagctagccggcggctggtttaacgttttcaatagtcattcatatattggtcgaagaagcaacgtgaaaccgcagtctactagaccacctccatccgatcagcagtaaggacaggttctgatctacagctactccgtacctcaaaccgatgccagatatggaacggggtcagacaaccgtggctggtcgctggaccgttcggccgggtactacctccagcatcgagccacctttccatcctcgtgggctgccacggccgcctgtttggaggatgcgcccaatccttcgcgtgcatgttatctggagaaattttcccgtagttgcaaaaaaaaatcgaccctatctccctgtcgtgctgcagccacgagtgacaggagttaattcgatccagctaaactacctatcttgcatatgctacctcggaaaccccgtccgaaccattcaattctatcgctttgagtccatgtcaagatatgctctcgtacctggattttccctttgccttcgctttctggcgacatacaaacatgcgaggtaacttgcatttccgattcgccctggcaatgccgttctgtactctggactacttgcgagcgtctacaggtttcagagtacgatcgtactttccgaaatgctctggaattctgtgcttacggcggcgcctagatccctctccggcaatttttgcttgttccaagctctgaattttggcgcagctcgactgatgtcgatcagatatcgtgattgaccttgtttgtttctccgtcgtccagagatctcactctggaaaaaagaaagcaagaaagagcaaagtcgggtgcccgttccatgcctgtacccgagttcgacataattatattcaaagaaggcaagtcactcgcgaattccaaccgcctatctaggcgcggattggagccctgactaggagggagttggacgtgggcgggacggatgcacggtagcattagtttgaatgagccagccgatctcatgcacaagcaccacctcctcccgcagtcgcaactcacgatcattaatgccgcggtgacgggacttcccctgtctgtcatcgtagtcgagcataagtactttgtaccaagtacgggagatcaagcttatcgagactgtaaccttacctcgcacacttgacaggtagggtagtttcagggctccgtaatagagacaattcgagggcgttcacaaaatagcgtaataaggtattaatgggaccaaactattcgaccagagcttgccatttgtccgcgacactccccagcccacgaagttataatcgcaatgtcgccatgctatccatgcagaatctagcccgcaccctccgcggtagttctccgtaggtacagtcgtcgaaaatgttgagtgttgagcgtcgatttcgatagtaatcggactagtcatcgggatattccgtccaagttctcctggcgccagcagccgaatcactactgtactggcggttcacctgcttgttttctggcggtacataagtacgtgcgtagagtgcggtgaggaggtacagcagatgagtgaggtacctttaggtaacatcacatatgcaagttgcaacggaccacgccggccaaagaacgaatattgggacacaatattccttctccgtagtgatgagacgggatccttggtatgacgacctccagtcgttcttcttttcactccgtcattattcaaatcggtgtccccagcaggcgcaggagcagtgccgccgtacttgtagtagttccaccagtccgactacaagtgcagtttcaggtggtcgctcgttagcggaagatgcattgcatcccgtccccgcgaatgagcatgtctgttttctttcccagcttgcagttggactcgaaactcgaagtcgagagtcgattcgagtcgagacaaacagacgagcggatcgcgctttctcttcccctttcgttcttacaggtcaccgagctgtggattctagacgtgcagcgttgtgatg

SEQ ID NO: 1578 - DNA, 491 bp, Emericella nidulans
caagacttgacagtgagttctgcaagcgtcaaagccaactactcgactatatcagtggacggacgggccagattcagaactgtcacgattggctgcagagtcagagattccttgatgtgcatcagcagagtgagagcagagggctcgttgcgacttgagtccatatgagagaagacagctgttcttccagaagcagatggcgaagagagagcagaagaggcagagcggccccaagaagatggcaggtaccaataatgaatatcgagacgatcgataatgcaaggaatatgtacgaacggtcccaaaaccaaattgagaacggctccgtcggtttatgcgtctaggaaggtttggggggagggaggtctctctttaggtccctccaaggctatagtccgatggacatgcacaggcagaagatacgaaaaaagcatatacttctaggtatgagtcaacattgaaagacagaaagtcatcgttctgagaaacaa

SEQ ID NO: 1579 - DNA, 5515 bp, Emericella nidulans
ccaatttgtaccagctgtatcaactatagtaactcgaggatgtccaaaatattgctcaatatcagaataataaggcaaggcttttggttgcagttgttggagcattcgtgatttagcattgctagactgggaagttggtataaacagttggggtaagccaattccttgtagctctctctcaggaagagaatatctctggtaaagattatcatgcatagcctttaaaataagtttacctgcttctttatctttaatctcactcagaattaggtcttctttgacctgaggatccaggatcagagctgtgtagtacacatcacaattatctatgaatatgtagtactttttgtactttgttaagccttcctttattatatatgcaatatcatgatccaaccctgcaaaggctccttgagattcagatgctttgtgtagtaaattatatagctcatagtaaagtggtacagcaagactgatctgtggtctcttctcagataagaataatataagttcattaaatttggcaagaacttggtgtatttgagtaagccataaccattcatcatctgtaaatggagagatctcagcctagagagccagaaaataattaatctgggcttttgcttttaacccattattaagcatttaatatgtagaattccatcgagtttcaacattatattcaatatatttattagagaggtctatgaattggcaaatatccttccatttttgcctttgttgagggctgtgatcaatccaaagactgagaattcggagctttgccaatgctgactgtgtagatataggctgtctattacagagactaatgcaggcagcatatgccttcttactactgccaggtttcagtgcttgaagaatgtccttcacaatcaagttcaagatatgagctaggcagcagatataattatcaagtccttaaaactaaagtatactgcttttacctatatttcccttcaaagtatagtatagctctgaagctattatcttgttgttactggcattatctctagtaatcatgattaacttctcttcaaggtccaacttagatagagttagttgaacagcagcagcaaggttttctctactatagactctatagagttctgtaaactctagcaccttttcctggtatataaagtcctccataagccagtggccaataataccaagaattggaaggtagttctggcttgtccaaatatcaagagacaaagcaatagacttgcatgttattttaagctcttcttttaattgcaaacattgtatcttaaagttatccataagctgccggcgaagtgttgctcaagaagaaaatagaagtataattcctggaatatcttgaaatatctgctgaaactctggtaacttgatagttgtaaatacttgtttatcttgaataatctaacaaagaatatttttttcaaggtgttcttgatgtgagagactctcttgcttggtaataaagcttataatactaggctgccctgatctaacagaggctttagcttgggaataaggtataaagattaaatatttctctagatgttgttgtatattggtagtagaggtctgtcttaatgagtctgatgtactctaaagatattaagttccagttttattgttaaaataagtatatcagatatctctgtctgatgacatccttttcctagttttctgtactgtccattcccaattcacttcagtaatctggaagtgatcccaaacccagccagtaactggtgctgaccgtggtcatttttgagagtaatgaaagcgggtttcagtgggcattgtgctggctatggtctgtgatattgactctgaaggcataatatcagaggaagtagtaatattggtaaatgtatcaagttctgcttgaaaggattcagatatctgatctttaggcagactctcatcatcatacccattattaagaagaaggtaattaggtcgtcgttgacgagtagtcattcattcattttcacttaaggccatagttgcaaaatttgcaacttaatccttagaattagtggtcttgaatgttaaaatatttagctgtcgagcaggaaaatttttcaagggaagcagaataacatccctaagcttattaagaatataagtcgggataaccctgtaaaacttcatatctatcaggcaaagattatcataagtaggtaaaatcatgtgatatttaacaataatagtatcggcaatgatatttaacgatatagtatcggcacctgaggatctcgacgatattatttgacgatcaagatagtcaagctttgaatttgacgatactattgccgatattcgaaaactatgactatatagtatcgtgaacagccctggagaggggtatgtgtttgacacgttccacaacgcctcgtcactgcattaaatcaccaaattatcaattttcgaaggtagatcatagttcgctgtgttgctagatagtaaaacccaaaaagcaatatctcgcccgacattgaaatgacaatactggtaatggattctgaaataccgtacttacagcactatgaccactccattgatttctctgcacctggcgtaccattttcagtgtcttatattttgttaatggagtccatgcactatagttattataaagtatgagactgaggcggggcctgtttaatgggtgcagtctgcgttcgaaatagttttgttcttggaaaactgatttgcattcgattcgatcttcattccatagtcatatagagccgatttgacaacaatcaaagatagttctgaatacttggagtcctcgaggcaggccacggtgcgacgccgaggaattggtcgccagaggtaatcatgcagagggagggctggccactattcctcgcggataccaataaccttcacgcggactttccaggggccatttgtgctgcgcggcagcagcatgtctcgcacgaagcgaacattctcctcagtggtctgatatagctccagatcgaatcgacggacaacaaaagctagggtattgtatagttcggcataggccaggctggacgtatcagaattagcagagtccgcaatcaattgaagatttggcctacttcatgcctatacagttccggttgcccttgccaaatgtcacaaggaatctagagagattttgcttcttttcggccgcgagtatccagcgttcaggcttgaatgtctgcggatcgtcgaagatgtctggatccatattcacgaaatgggagatcatgctgacgggagtctatgcattggctggttaggggttatgacgagcatcctgggaaaggacgtaacatactccaggtggaatgacataattcttgtattttactacctctgtcggggcaattctttgttgtcgcatagtcaggccggaacagcggagggcctcgtggatagtagcattctgtagaaaattagcccaataaccaaaaaagtagaacgggtactgcaagcaagaaatggccataccagatatggtaacttttcaagctgacgccacgttgtcccggcttgcggtgttggcagttcttggtcaagctcattgcgcagtttccgatggacctctttattattcagaatgtgaaatagagccacgcccaaaatggttgctgtggtctcagtgcccgccgcgaacagaactaatccctcatcctggaggcgttgtaatgttcgttcttctgggggtacttctggcgcagttagggcatggaacattgttgtcttcttcggaggaggggcggacatatccctctgtttaagcgcctcaattgactgctctcttacgccattcaaaaggtcgtatattgccgctctggctggcagcatctgggccatgaaccactttggaacgactcgcagaaggcgctcaaagaaagggaaaaaccggtgcaagtggatctgggtcgttccttcttggaccacctttgtgatcccgcgaccgatattttggggctcctggagcccatagctgttcccgtaagcatattgtgtgatcacatcgcctgtcaagccctggagtctgtcaataaggtccaccacggtgtcttccttgtaggctgcgacaaggctatctaggaactttgacagtgactcatggacaacaggttccagccgctcgatcgaccgtctcgaaaagaagaaggtgagtagttttctgcgtatacggtgcgtgtcgtggtcaaccgttgcaaccatcgcggtaggggagctgaatatctcaacggcttgccggtccttgtctcgtcttcccccgctggcaggcgcgtatatctcctcatagaattgcgagtctttgatatggacttcacgggggttgatccgcactatgggtcctttcagataaatcgcaggttaatatggactgcttatggatagcggttttttatcgattgacgataccgtattcccggtgcatcttctctatttcccatataaacaacccccctcggatgacatcgtgatagaactcgtagaggtgagtaattgctgccagcttagggcccggtatgtggtgtagcggatcaaaatatagacggtatatggtccgtaccaccaagccgagtattaagagcactgggatagatacggtgagtcgttccgaggcagaagccaaagcggagactgtgactgcgagtattcgattcatggtgtgagagaagagaatggacgtaaaaagagtgcaatgtatgaaggatagatttctaaacctcaaaatatcctcaacgtaagacacagtgctactatctccccctcaccgcggttactactgtaaaaattgtattattatgcgtgaccacttgcttggtgtgatacagagagcatctgcaggtcatttcgaatacgattggcgcctgtgatgaatcgtgcattatgtgcttaggggtgtatgtgatcacattaagttggacagcaccatggtgcaggaaaacttgttttctgcgtcttgcaagttaatggataagggaatgtcataggctaaccgctgtcaaagatgatctagacttttactgatgatttatttaaacatggtcaaatccatacatgagtcgattcaaatcacctttcagccatccactgatagttcacacccattttcactagggtatttccaggcaaatatgggatccaagatggatcacaattcagtggctatacttgtcgacgtgaagcggagagccttgttcgagcgcttcgcggagtcgtatcatccgacctacggtttaggtacaatgtctggcaacatatacgacaccgcttgggtatcaatggtcagaaagcctactgaagagggcaagtctatctgggcctttccggctacttttcaggctcttctacagcaccagctcccttgcggcagttggggcgggacaaattcaaatttggattctattgctagcactttgacagctcttcttgcattacagaagcatgcaagggaattgagtgcaactgaatctcagaatgagctcacctcgag

SEQ ID NO: 1580 - DNA, 3748 bp, Emericella nidulans
cgatagagacgagcgctctgccgaaaggacttaccaatattggctgaatctaaatcataacgggtatatcgtatgatcaccaccccggagttgcaaactacccttgtaccaggcaccgcgcacgctccggaaccagcggatcccggggaaacagcgctagtgccgtactcggctagctcctcaagaattctgagccgcggaaaagacctcatccgcgcattgcagcggttgggtcacctggttggcatatcagacgcccgccattattaacctggggaaccggactttggagatctggggactgccgccgctcagtcggcatgtgggcacggtactatggcccgtccatgggtagccgattcatctgccgtcacctccagctcccttgaacgatataaggcccgccacttccctcacgatgaccgtccttcttccatatcctcacagcttcactgaccgccaatatgtctaccaacccccgcttcgaccccaacttcaccccctatgtgatcaactccatggggcccaagacccccgagcgtgctcgcgtgatcttgggatctctgattcggcacattcacgacttcgctcgtgaggtcgaacttactcccgccgagtggatgctcggtgttgagttcatcaactccatcggcaagatcagcactcccattcgcaacgaatgccaccgtatttgcgacgtgatcggtctcgaatcgtaagtcgcatttcctgactcgtccaattttgtaacgtatactgacaataaaaactagtctcgttgacgaaatcgcgaaccgcatcgtcaccgaacagggtctctcgcccacctccaacgttatcctcggccccttctggtctcccaacgcccccttccgcgaactcggtgactccattattcaggaccccaacccgaacggcaaggttacattcatgcatggtgtactgagggatatggaaacgggcgcccccatcgcaggcgccgtcctcgatatctggcaagcatctgccaacggccagtacgactttcaggaccccaaccagagtgagaacaatctgcgcggcaaattccgttccaacgagaagggcgaattttactggtactgctaccacccgacaccttattctctgcccaccgatggacccgccggtgtgctcctgaacctcatggaccgttcgcctatgcgtcccgctcacatccacctcatgatcactcaccccgactacgccaccgtcatcaaccagatttacccctccgacgaccctcacctagacatcgactctgttttcgctgtgaaggacgacttggtggtcgacttcaagcccaagactgacgaccccaaggccgagctggatctcgagtacaatgtcaagatggcgctgaagaaacaccaccccaaccccaactctgcgcctcccgtgtcgtcatttgagcggtataacaaggccggcaaggagaagctgtgaagcgtttaaaaaaatttatgaattatgtacagttagattcctgatttttagcaattcccccgcagagcggttttctcttttcaagtcctcccatttttctgtagggcatccccaaggcaaagcctcgtaagtagaataatctagacaatttaaactatgtggtatttattcagaatgtacaagggtctggcttcgcaattgggccagccgctctccagtcccttccctcttgtcgccccaaccggtcccaggtagatacattactcctcctgaatcattttctcgcgttgctataatgttcaaaagccttgccgtctccgccaaacgaacaccagtccgcgcgaatgacaacgctcgtggccttcgacgccaagattttctcatgtgcttatgccttggccttcgcccattctctgctgcccggcgtccgctcaccattccgccgtacccagcgaaaggcctcgcgacgcgacttcgtcgtcaaggcgctggtgaaagcacatctgccatatcaattgcaaactctctgataccctcacaaaagttgactaatactactaaacaataaggctaaaaacgaggtaaatactgacaattgacgcggggtttggagactttcgataagataagcgataacgataaagaccagcagcctcggatcgtgcatctgccgtcctggccgcccattgccgaagccagccgattccatttactctgcacagatcatattgactaaccaaatctggctggatgctcgacgatcttagtttatttttatccccttacgttaaattcgtcgaagtccaagtactagcataggtgatgagccatatcccgaaggacatagtaatgcgcccacagcgccaagttgagtgttaagcaaatgaatgtgtctgacaccgggactcatttcccgggcgtccaagtccgactgaggaagttgagtggcatagttggcctctgtgtagccgggcgggggctccggtgctgctgtagaggaaactcgagtgacaaacagtacgtacataattatgaagctgatgaaaccatgtcagaacactggcatgggactgaagggaatactggtgattgatattgtggggtgctctgcatccgctggccagggaagaaaaatacctctgcgatatcataacactgatgcgggatcttgctgaacgaaagagtacaggtgttgacgggacttcacgatatactctctaagctctggtttggctaatgagggcaggttcttcgatccagttcagctggtatcgccgtccttatacatctgcccgactcttgaagtgtttgcgctcccagttgagccaatgtatggccaccacgtggttggctctgctgagatcagatgtgtagctgtgcagtttgcacaattacaagcaaccatgtttccttcctcagcttgacgttagagctttatttcacccttatttagttttacagctctcatggaatccagggaccatctctgacggtgccctttccagagccatgagctgaatagtgatcctgacaagggtcatgattatctgccagactactctcgaatcaagctcaatgatcaagaaggcttgataactttctctatcaggagctctgggcgaacggtctcgagaaaatcgcaactaagatctggtagatgtcaaaaaaaaagatagtggcaatatttctccgcttcttcgacagacagtaaaggctcagagaaacttcatcttgtctggatcgatgaccggatcttcctcaaacccctagccctttacctggcatcatactcattctggcatgagtatatgaacgacagatccgcacagagtggtattaccaacctcagaacggctgcgcctggatacctacgggcatatttctacctcctccaacatgaatcagattgtcgcattgcacaagacccagctctctatctagttccgaaggaggtaatgtgaatccagttcggtcacttcccagccagcctgaaagacatccctgataccgaggtttcggggcgatactaatatggcgaaatcagactcactcggttgaactactacggcctcccccgtctccattccaagcgctggtggctcaatatattaatcggtctgatgtcttgtatttgggcggacaaccgctgtcatatgtttgttggtgaaggtgggttcgagggcgaatgtcccctgtggggttaaacatatggcagtgaaggacatgctgaaaactagttgaaggctcgacactaatgcagcccaatgcacccgatctgcgtagc

SEQ ID NO: 1581 - DNA, 2458 bp, Emericella nidulans
  unsure (1)..(2458): unsure at all n locations
aaaaaaaaaaaaaaaacaaacaaacaaagcaagtgctacgccgtgcgcacatatgcagcccagcatgtaggcatagcaacctccagggttcgcggatagccagagcgttgtccgtcgccacatgacaagggcagctgccatctccatcggaaggcatgatccgattgcccttcgatatcaatgtggcaactatactgcagagtgttgaagcacggatggaaggccaacaaacgtgcgagtcgctcctggactaagcatccatttcagggtaagaagtcaaggtagtactgaggacatctctggtatgatatcaattgacacaccccgagagaccccaaacatcttgttttcagctgcgcagtattcctgctgatcgagcagcctgcgaggctgagcaataatagttttgacactgcatgtgaacagacggtgagtacttgcccaataataaatgtacgctgtcaccgtcctccatcgttctagaagccggagtattgatttctgcgtgtcaagtgttatccactgttcctgcccacaacccagagcctctcgtcacaccacatcctactgcaggtcgcctgacatacatgaaatcaacagctgtaaattcacttgcgaagctgtaaatcaacaaagttcattgttcgatcaatggccatcatagacgaaggctagtgtttgtctgtctccccgggacaaagatgaagagcttccaacgctaggatgagttgtcattgacaattatagtctatattcgcatgacgacgattatgaagtagagtaggagccaccgggcttcgcgacgttaggacgacgtctaaagaggaaagcgcaggtatgggccgggggttgctgtttgcttggtttgcttcactttaaataaccacctatcctacatccacgatcggtggaacccaatgctaactattcctgttggtcctttcaacatccgatactttctgctctacccagtctcctctcagagcattaacataaccatctactgactatcaagctatcgactgcactcttgtcgccatggaaaatcttcctggtaagctccggaaagccccccatcatgctgcgatctttaacacgaacaaacgccatagaatacgtacaatcgctgctgctccaccccacggttcaacaactggcctcctctccattagcatctggtttcgccaacatccacgcgacatacctcaacccatctcttgcccatctgagagaatcctaccttaacccgactctcgcccatctgcgcttgacctacctagaaccctacgttgtgcagccgctggcgcacgttctcgccacaatgccagatcttgcctcagtaatggccatattcttggtactcttcctctcgttgaagattcttgattatacacgtcgcgcagtgatgtggtgggtgtggacaataatctgggcggccaagtgggcaactatccttggtgctgcaggatacatctatctttcgggttgggagaaggtggtacaagacctaggctacgcttttaactttatttcggggctgctggagcagtacggccatacccttgagtcggcggcgcgagacgggcaccgtcctcgcggaggatcgtggcggggtgatgaactatgaccttggtgttcgaacattgtcccttctttcttgcagttggttcgggccggggtgtgcaaaaaatcagcattatgtgttttgttggcgttggtttgattctattggatatgatataatgatcatatttccgcatgcatggctttctactgaaatctgggacgattggatgaggtatgcgttgatagaatattataagtattgatgatgattccaaacgcagtattttctaaggttggaaaagagtgtaatgtgcccgctccaatcagtccgtagcgagacctgctaaggttgacagcgtgatggtcgccgacgcgcctttctcctctaggcgcagaggatgtcatggtttgtagatgtgcccggacgggagcgtagcttgtatgcgtgtcggataacggtagcgaagccgaatccggcgcagtgactgatggccgatgtctatacagattgagccaataatgtagttcggctcaaactcccatgttattatttcaatcctcgtaatcaacatcctgcgcatcgttaggctctttcggctcttgtgcctcatggaattgaatggcggcatcgatatggcttagcacggcagcaacactatcctcgtcctgaacgtccagctgtaagaaagataccatactaaaatcatcaataagttgagcgacggcacggttcagcctctcgaaagaacctccgctcatcaaagattccttcgacatagggtccgagatcgcactgtcctctgcctnccttgtatccagcaacaactgcacattcactcgagcgaaacgcttaatttccgacgttgtaccatcttgcgcacctggtccattt

SEQ ID NO: 1582 - DNA, 3263 bp, Emericella nidulans
cagtacgagttatatacgggagcggagttctcaagaatttcagcctccgcaacgcctcactcattgatatacggaaccaagctgccacgagacaaaattcgattagcctgtttatccccatcgggggaggagagcgctcctattcatcttgggcttgagaaccatattttggctaacagtctggagtacgagacggtctcgtatatgtggggaggcgaagatggggattacaccacatacaagccggtgtatattgggccttattgggatgtcataatgcaaacgaggaattgccatgaaatgctcaggacggcccggctggcacgaaagccgcgaatcatctgggtcgatgcgatctgtatcaaccagcaggatgacgtggaacgttcagaacaggttgcgaacatggccaagatctacgaacaatgctcgcgagtcattgtctatctagggcaagaccttgtcattccagtggaatcggactcggtgctccctcggcgccgtttgcatgagcttgaatctgaccctgtctttctctcttccagtcgacagataacgctagcaggcattctgagtcgcagatactttagtcgagtctgggtgattcaggaactagttctttcgcagcgtgcgatcattcgcattgggacctgtgaagcctgggctgactcgcgtacttggcatagtctgtcgcgctcctggaggtgggactcgaccggcgctccctgggtccaacatattgctcaaaaagccgtcccagtccagaatattcttggtgtgctgcgtcttgtttcgaagtcgcaagcatcagacccgagagacaagctatttggtgtaataggtctgtatccagacggtgcttcagaactaccgcctgattactctatatcagttcagcatgtgctcacaggatttttcgcgtattgtatcataaggctaaaggaatcacaccttttcttccgtgctgctggtcttgacgcgcctgcgtcgaccccttcttgggtccccaactgggctactgactggcccattatcttcactgagcccgacgttcagactgccgatgcgataagttgtatcaaggattggctaggaactgatcgttttgcccctctccagccagaccctcaagtacgtggctggcaggatgaccagctttcgacctgggcgaaagatctcttccggaggtgcccctggtaccataacgccactgttaatgctaatacgggtgctttgtctatctacctaacacacttttgcgctctgtcgcatcggccacgccaagtacctctcaaaactaaatcatggtcttcaatctttgacttttgcggcccaaagacccgcttctttttggtctccgagtatcctctcgatacacttatagaaccagaccacgattgtttatttatacttaacgcggggaactgtgacttattatacctagttttacgcaaagtcgacaacttgaacacgtataagctcgttgccgcctgcacacaccttttcctagcagacttcagcccaaccgttccggtgtcgatcaatagcaccccgttccaacttgatctggcccgcgcattgctcgaagcgaagatgtctgacgtcaaaatggaaggcgtggccactttcttcccaggtgcaatctgcggctgggacaccttcccaacatactatggaatgcatgatcagaagaaccattcatccgctggattccgggccgcgtacctctcctgcatcgatcctcaataccgcccgcgcattgttgacgacttcattattctctcgttcacgtcgagacctaagaattggccgaacacccgttcgggatacgacaccacccgcagcatcgcaatccgggcaccgggaaagctcgcgttttatcaggtgccgggcaactggcagaaacagcacctgggaagatgggtagacgacaccttcgactataagctttctagcgggaagttggtgaggaaacctgcccgtttcaagttcggaggtcccttatccgcagtgcatgtcagagccccaatgaagtttgtatgggaggctatgaagtgctggttctcctgtctggcggatattcaccggattctgggctgtagcattagtgagctggagagcctgctccgatatgggtccagtgaggaagaacaccatctcataggcagtgttcccggcgactttagggattttgcgggcgatggacgcacatatcaagttcagattgtgtaaatgtgcgtgcccctgtgcgtgctgttcgagctgtatgagcgcccatacttacccataagcatccgacgaccactgcctgatatatataaaggatatatgggggtcaaatttgcggcgttatttcgcgcgttattatggcgaaatcgccaagccatcagataccctgacagcagctataaatgtatgatggcaatctatataagagtaacgaacctaaagcaagccacagtagataatcttgtatacactaagaacttgctaccaattgcattatattataataataaccgtcgaaatttctctgcccttctccgttatacatcgagcactgagcacccctacagtcgggagcgtggcactttgggaggggatgtgcgcagagtggcactataccttcctagtcaatagaggacgcggttcacttagtcttgagccacgagccgcttgagagagtcatgggcgattaattgtgcctagaggtagccggtctattccaaaggaagcgttagtcttggtccatccctcagccgcagctgtgcccctcctcggcaaacaataatctcctggacttggccctcaacaatggtccattgatcatcaactgcggagtttagcttgtaagcagaataaaggacactgctggcacaaggtaagcagtttccggagcgctctaggcacggctgactgctactaatagtaccatccatcataactgtcaggctatagtgtaggcatttgtcagccagctcagcacagacaagaagctcctatttcaggcaacagacacgtcagagaagctcatccatgatctggttgacttggataaaaaatacagcaaggtggccatttcgcgctgaatagtgccaatatccagttatttgtagcaggcattgagcacttcttgggggcgctggatgcccttgcaggtttggtcttactaatgcagccaatatagggcagctgcaaagttgttttgcaaattacaaaggattacagtaaggttttgacaaactttctggaatatttgaaga

SEQ ID NO: 1583 - DNA, 2374 bp, Emericella nidulans
cctggagactaggtatagtgagagaacaatctcccagctcaatacttgagcatgtgctccatctgcagtcccgctgtccggaaattgttttgggggggggggggggggggggggaaaaatttcaggaaaagatgttgtaagaatatgaatgaatgtgaatggcgctaaatttgtacccaatttgggtgaaatcgacgtagtaaatagccttccgaaaaagtacacatgctgtgaccaacccaatagtgatatcttaacgcccatgtaccgctaatatacaaaacgccaaaatgcatgtcaaaaccctaaaaaagttgggttcgcgtcgaccagtctgccggaaatgcggtaaacatattcgcagtgaccggatcaaggcggccgacagtatcgtggctgatcgcctcatcactcatagcgagtgtatcgctgctaacagtgactggagtagcatcggtcccagggggaagcatgtttacatctgcctcaaggtcaggaaactcgcggaagaagtcgtctgtcatgcaccaattctgtagatcgtaaaatgacttggtaaacgcatcggaaaaccggtagagccccgtctgaccctgctgaacgaaggcgtcctgcaagtgatagggccatgtgaatcgaaagcaagtccagaacatagaccagaatttttcagagcaatgctgatgcgggaacataatcaggcgctcacgtagtgacggcctgcgttgggttagccagaagaatcgactgcgtgactgcatgacgcattcttgttgaacttaccacacgacaaaatctattagcggtttgtggatgatgcggtgctgggatggccgttgtcgcataaatctaggcaggtgggtcaggtttggctctgagggatcggacaaatactatagtgcgaatattagcagggatcaaagtgaacactcaaagtgagcgcaagtcaacatactcgtagcatcaagctaaccacgcgcaagaccgccagccgctcaattgctccgcatgtacgccagaccgcctcgtcggcagttcgaagcatggcccaaacaggatccaaagggtacaaatggctgacggcatcccagccatggactatcgcgcggattgcaatgtcggcgtcacgaattctctggtcagccatgctccgcgtgcaggtgagggcaaatcggccgagcatgtcgttcatgtataataattgtttgcagcagtcgcagggcggctctgtagaatggagggcttggattggcatcggcatatcgagagggaaagtgtgtaaggtgctattgaatggaacattgacctcgtctgggtgtttcccggtcatcgagatcccatcaggcagactcacgtacgtgccattcggcgagtatttgtcaataatggccgactcctcaaatggcgggctggcggactgcggggggacatgatgttgctggctgagtcctacgaggcttgactgttgcgcgacctctcgagcaacaccgttggtcccaataagcttgctattttcgctgtcggatgaaatcgatccgtcggtgggctgcttcccagggtcgaggctctgcttcctcgggtcgtagcttttgagcgcaatgtctgatagaatggaaagtcagtcaagttcaggatagagagcctagagtaagcaggcgacatacttgcttcagcaaggccgccactgatggccttttcgattgaccgtaatgtagcgcgcagcgcttcgtttgctttccgctgcgcatccaactcttcgatcaactcttggatattcccgctgctgtgaaaacgagtcaacgtttcaatccgatcctcgagtgcggcaatcttctgccgggtcttttctctcgcactcctctgagcttgtcggtcttgctcccgcttccgggctgcacgatcgcccgttaacttggtggtctttggcgtcttgcggggggtttccatcaccatgggcggttggacgggaaacaaggatgtctgatcgaagactggggcgatgggcgatcgccgtggtaggaaagcagtcgcggcggcttgggatcctcggtttgtcgatgcctaacgtggagatccggtgatactgcggcggagagacgaaagaagaagaaacgattcacatgccaaccgggcccgttaaaagccggcgatcgatagtgcgttaagagatctccttccccgcgacgttaattgatttagattaagagctcaggtgctaaaactcacccccgccctcctaacgcgtggcagttgaggcgaacgccggatggatccggtgtatgcggtgtgcctgccgcaatacccgagggctgactggcagtcaggattcccaggaactagtgaaacagtggcgatgacagcctgcaggaaggat

SEQ ID NO: 1584 - DNA, 2886 bp, Emericella nidulans
cggtgcatccatgtcgactgatatagagctccgcggataattgatataccagtgaaacggtaaattgactcgaggacaaagcgagacgaagaattttgcagagcgagaggttcttatattgtttgaaggcgccaagtgagttgttttggattattctatccattctatgacttcactgcccatctgggcactcattcacgtggagttatacttcccgatcgggtataacagtcccgtagcgagccacgaactggagctgatagcggtccgagcgcctaaaggcatgcacacgcagctatgactctggtggactgcttacaagtatggacgatgtcatggtgtctcagaagcctagacaaaggagtagttttcgcaaccaaggcgtcatcaagttcatcaacccggggagtccgagtcaagggcccgctgaactaggaccgctacaccaaagggattcggaacgctacacagagccctagagccccttcttcctttggcggccctggtcctagctggcatagtagttcaggtacctcaggccaaagccagagactagatagagtcagtgcgaagcaaggggttaacaacccgctatatcgccgacctgcataccaaatcacgggcgtacatttgacagatgcaagtcggagaatacgctccttgcgctgatcttgtctctttaggactaggtggctggttctcctccttagggccagggtaagggtcagatccaaggattggactcgtgctcaacctggccatagagaagcgctgcggcgtctacccagggaggacaggagccctggataatgcccaggggtcggctcacgtcggtccttcaacgaagtcagtgatctacctcactctagctcactctcttgagtagatgacaccaccgtaggcagggaggaggcgagagatccggcggccggcgggtgttacgaagcggattgtctgtatctacagcacttatccgcgaaacgtcacgagacgagacttctcgagtgcgctaacgttgagtaggcttgactgaacacggggatcaaacactgtagtggaatggcaattgccgtgctgattctttatttccgctgcaagataatgcagacgtagccaccacgagaccaactcgccgaatcggagtgcgtctgcatcggcaagcaagggctcgggcatatactagatgcacaactccatgtgacgcataatacggagggacttgcaacttgggacaggccagaagttggtcacactaaccagtaaactgtgcctgagggagatttcgaacaaggaggccaggataccaggatagtgccagattagcagcttcaacttgcttgccagtcaccacttgcgcggccgtgcctgtgcttgactgaccctggggaagaatatcaagaatatcagcccctctcagacggtagacaagcaaggaggctggggtgcatggttatcgataagatgcagggccagctctgagcaggtgctcggcacacggccggatcgacgaggcgattgattgcagtgggcagccgactaacggtcaagcagggatggctttcatcttgccccatgttgctgcaacgtcacagtgaccaaactaacttgagtatgatgggatgatctaaagaacagtaaagccaaaggcaacatcacgtgaaaggcactggttcaggcacagaattatgattggatgacgcgcctactacgcgcttgaacgcgttcgcgacgcgaccgcgttattttcaatcttgcctttttcggactgctggtgcgggattttgtgacttgggagagtgccgtcaggagtgccgctgacggcgataacagactatcttacgggtgaagaggtctttatgaagcctcgactgattgtatacggtgtcctgggaagggcagaggaagaaggacgagaggatcgaattccaggattcagggacaccagccaccatgaagactgacgggtagagtatgtaggctctggagcagtgcactaagccgacaatttgtttaactccttgttcaactcctttgttctatattgggaaacagaggactccatacggcggcagaatttcgatatgtataatgtatttaatacctgataatggtggcatacaacacatatacaacaccattactggtatacaggctgcaatgatttgcactgcatgcagacgcagcagtgtcccgcacggcacgggcctgcgtgactcagtcagaaggcactgtcaaggagatttgcaccttgcgcaggaaccgactcctttctccttgtctcagtccacgagggggcgctctggagatgtagatacaggtctgtagtattataactaggccatctcctgtagagatgaaggagcagagggagaatgaaggaagccagcaccccagtcaatggttgaatccgcatgagcagtacattcattgagcagtcagcaacttttcgctgagtggttgcattacagtcattctttcgtcagactatacctggttctattattacatctgatctgatacattcattattctttagtgagcagtccggttgcggcagtggctccactccccttttctcccacttatctctcccccaacaccacaccatctctcgtttcatttcttcatccaccactctcgccctaatactgttgtatcctcggaatctgtttattcgaaagcgccaatttcaaatcacattttcaatcaccttgtgaacggttccgaccctccctgctcctcaagaacctatccggcgcaaaccagcgccaccgcgcagcgcgcaaccagagtccgaccacattcataccgtcgcgcatatttgattttttatcgcatcgcgtcgcatcgcagccattcgagaaccagccaggatctatttcaaac

SEQ ID NO: 1585 - DNA, 4762 bp, Emericella nidulans
ctaaaaaccccctcttaccgcgcgctcgttggttcctaaaaacacacagccagcgagtttttaacaatgactgtcttctggatacctgctgcgttcatccgctgggttcgacttaagatctatcagtatgaggtgacattcgctgtatatatgcttacccatacggagaaattcattttcagtacgttcagcgcctcaacggtcactgacttcatctactgaccatgcaatcgctagactctatcctcctcaccctcatctctatgatccttaccgcggcctacgtctacctgcccgaccatcttcggacaatatacggccacctctattactactgggtcggtgagagaccaattgtctcgtccggaatggcggcattaagcacggcctttcgcgatggtggtacccagaccatagagatgatgtacgagacggtccagaatactgctgcaacggcagcagcaacggtaccggagttgtaatgcagcatggatactctttttcagtacaaattttttttttttttcagttgtctttatattttctgtcgaagcgagctgcccggatcggtttaccttatgtttcgacataatcggcggcttcctgctgtgttcaactgtcgccgccatctcttactttctgatacccgtgcccctagtgctctcaacatcaactcatgtttaccgctctcagacctgaagtggattaccagctcgtttcggtcctggcgttgagtcgaatatgttggaaagctgcgtgattggcgttttgttctaggcgttagatcttgtccgtttcgggaagaattgtgttgtggcctcagggcctcattgagcaacctatttttatgacagagcctgcattgttctttatacttatgcaggggttcttgtactggattgcttccgtagccctgcgtgtactccagggaaagaaacgaaaatctgaaagacattaataaccaagcatcacacgtcccatccaaaaccagtcataactccatgatgctcagagaagagtattatcaatcaatgctacatactatacagtgacatgtgacccacgagcaagccctaagaactcctgacaatgtcataagaaacgtcaccaggcgacgaggctcaatttttaccaacccagaatcccacacagaacaaacataaaccgcgctgtgatcaccaaatcactccgacaccgactgattttgactttgcgcctgcgcctgcgccaaggcttgagattgggcctctagttcctgctgcatggccaactgccgctcccgccgctccctcttcaaggcatcaaccctccgcatgcgcgccagttcctggtcaatttcttccttctccagcggaatcttgtgcgattgttcggctgttggccagaacccggggacactgaagcgctcgtcgagattcgtgccgaagtagtacatccagccgatgggaaagagaacgtacatgccgaactagatgtagttggaaccatattaggtcggcgaactgaaatgagaattgtaggtatgtaccttgaatacttccaggtttcctccttggaggcgacggagaatcgaagacatattaatggtggatgatcttataagatgggctaataccagatgatttgcctcggcgcagaggactcgggaagtggtcgggaatggacgaatgaataaaaggactgggcaatcgtttcgcagtaattgatcttttgtagtctgccagaaaatgcgattcgggatcgtggagttgtttgaggcccggatggtccgatctcgaatctggagctccgtggaagaatatatcacgacctatcagacggtctgacttattatataacacgtgactagatccacaatggcccatcttatcgccgcgtaaaagcggcatcagttcgtattagatacggaagaggactgtgaatcagaaagttggaaattatctttgtcgagtaaaacaccagccatttctctcttttgacaatattccgtttcaaagtagcatgcctcttatcgaatctgatgcgactggctcccccacggaccagctgcaaagactgcctttccctccggtcacttactcgcatatcctacattgttcctacgactattggcaaccaaagtaagcaatatctcaactggatttcagcaaacgcagtaactaaccgggttatactgcagatatcgtgcgcttactccgaaatctcgaataattcccctaacatcgtccttcgtttcatacctccacgccgatggaatcgtcctaccaccggagaataccccgccgaccaacgatgacgatgacttctcagacgatcccgacgcggaggaagaagctgacccctcaaaagactggccggaagttcacgcgcagatcaaatccgcaattgccgaactcgacggcaaagtcacgcccaagttaaattggagcgcacccaaagacgccacttggatggccgcaacgaacgacctccaatgccgcacgcccaacgacatttacctcttgctcaaaagcagcgatttcatcacgcacgaccttgaacacccatttgatgattgtgttccggatacctcgtactcgcctgcccccatctctaccccgcctgaggtaaaatataatcttgtcctccgcaaatacgtcaacttcaacccctctctagaattccggtgtttcgtgcgcaatagaattctactatgtatctgccagcgcgaccagaaccacttcgatttcctcttcgagctgcgcgatacgcttcgctctcgtatccagtccttcttcgatgagaagctcaaggactccttcccagactcgagctttgtctttgacgtctacattccagcaccgcatcagcgtgtctggcttatcgacatcaatccttgggctgaacgtacagatccgcttttgtttagctggctggagatcttacgcatgaaagacccgatcggaattcaagaagaggatgacagcgcggaggaacaatttgttcgactctctctaaacgggcatagcaacggtgaccagaaacctgagtctgagtctgaatctgaggaagaagtcgagaaggcagaagacgacgccccgttgctccctgaattccgactggtcaagcgcgatgacccagaggcatactcattcacgacgccccagtactctgcgcataaactacctaaggaagttgttgacgcctcaatgactgggcccggggggatgagcgagtttctaggccagtggcaggacattcttagtcggcaggggcaggagtcggatacggagagtgacaactaggttcatatgtgagttgtttccatgaaactaagatggcaggagatttctggagtatgtgattacttgttagacggcgtttgctattttcgaaaacagagaaaagttattttgcgtaacggcgttttgacgccatttgatcattgtggatatattgacttcaaccgatcctgatcagaccttacggggtacctgtaagttttcacctttcagatacttatacatataacaaaaaagcccctagaaactaaagcttatgcctcttctcgccagtcgccaacttcctaaactcctcctgcggaatccccgccaaaaacctctccaggccttggaacgcctcgatcgtattttgtcgatccataagctctctgcctggccgccgaatcaattccttgattcttaacaacgagctctggctcaaatgcgcgcccatcctatcctcaacctcttccaacaccttcttcaagaagccatccgaatcctcgggcttcccgcttggcgcggatataaccttattcacgaaaccagcgctcacaagctcttcacacgtgattcgcttgctctggataagcgcttcgttggccttcgcaattccgaggcgctcgacaaacgctgtggaagcaccaccctcggcgacaagaccaagtgacgagaaaggcgttaggatgaaggtgtggggcgcggcgtagacgaagtctgcgagggcaaccagggcggctgagaggcctacggcggggccgttcagagctgcgaccaggatcttggagtggtgggagaaagtgtgcgtaatgtcgatgttgttgacgacgaagttgcggacgagttcacggcgcacgtttgtgccaagaccagcgccggggcgggcggaggttacgtctgcgcctctgtaggcataaaaacatcattagaaacttgcctaggcagaatatgatcagaggaagggtgcatacgcagagaagaaacgcccggtgccagtgatgacagtgatggtaatgtcatcgcgcttgtcaacctcgcggagccgctccccgaggaggtagtagtggtctccactcagagcattgagcttctttggttgattgagcgtgattatcgcgattcggtctttgtatgtgacggtgatgtcttgttctgagaccatcttgtctttagtgctctctttaccaagggaaagggtatctatatgttgcttgaaggtagatattgaatgacgatcggtaacgctgatataatgtaatttagaggggccagcaggttgaggaaggaaagcagcagctctccgaggtctagtattatatggttgtttcagtaccgcctgccgaagttgttggagatttgaggtgagccgttgtttgcgggggcctggcccgacgaaccgaggctgagggtgatgcggattacgttaacaaacacctgcttcaggcgatcagggcatggttaagcacaatcacgtgtatttccgccccagtatctatatttat

SEQ ID NO: 1586 - DNA, 1298 bp, Emericella nidulans
  unsure (1)..(1298): unsure at all n locations
aactcacaaacatgaagataacccgccttcaacggaacccttcgcgtctccccgctgcccgccccccggacgccgtagcaccaccctcctacgatgcaaatcctccactcgcaaacgagtctgtcctctttccacctggcttccgcatcctctcaaagtacatttacccctaccttcctactctcgaagccacgactcctccccctccaaacccagaagccagcggcagcgctaccgaccaaaaaccccaccgcaccaaaccctccgacgcaggcggcggggccggcggaaacccttccctttacgaagaggttgcacgcattgacctaacggtccagaataccggcacacggtccggccaacaagtgatccaactctacgtctcctttccccacaccgtcactgaatcatcgggtcagaaaagtcatgaaaacattgacttccccgatcgtgttctgcgtaatttcacgaagatttcgctggcgccggggcaaaaaatggatgtgaatatgactcttaccaggaaagatctgagctactggagtgtgcgtgagcagaattgggtgctgccgaaggatgagttctatttttgggttggctacagttcaagaaacctgccattgggtaaaccttttgatccatgaaatttctggagggatcaggtttttcaagtatattggtttgtttaaaagtatatatttgggttagtaacctgtggttactacatgaaataaagcatgaaatacgaaggtggatctggtttgcattttagatatacatagataatttagcacagcatagcatactagatcagcatagatatgctttgctcgtacaccctcgaagatgaatcaaagaataaccatcagtttggaatcataatcatatctagcataacgaacataacacccaagattagaagaccataaagaaaccggtaacaaaaaaggatgaaattagagctttgaagcagtacccggagacgaaatctcgttgtacagcaggctggtcaagaagtcggcgtaatcttcaccggtaacctggccggcaaagtagcgaccagcaagctggaacttgttgcccttaggacccttggctgcaagggcatcggcctgttccttcagcagacgtaaggcataagccttgtcaaccttcttgccctcagaggtggtaacaccgtggcgggcccattgccaaagctggctgcgggagacttcggcggtagcggcgtcctcctatttcatcattaacaccncttctttgggctaagaaagtgcagggtccttaccatcaggtag

SEQ ID NO: 1587 - DNA, 2444 bp, Emericella nidulans
tctaggtattgccccatccccagcggcgttatactttggtctggatatcttactgtccaaggatatgaaaccaacataagatatagaacttctgcgccttacaactgaaagagaacttcaagtccatactcgacaggatggccggaaaagtatccttgaagtcttaagtggattgagcatgaaacgtaatataattaatgcaatggttaaaattaaaggagtaaccaacgggtacgtctgtggtagtttaacaatcccccaaccaatctacgggtctataatgagctgtaacaaaagaagtctgcgaaacaataatgcggaacaagccagtactggaccagatcaaataatgatacccttgttctgcttcttgttgacattgtagttccgccacacagcaatagcagggatgccaagggcgagaaggcaagtggccgcgatggatccgtacatctggctgcggccccaggcatagttgatggcattgcggatatcaccgcccacagggtaattcatctgcgcaaggtatccgccgttattgatctcttcagccatgtgcttgagatcattgggcaaccgagaccggagggcaccggtgaaactgttgttgtagatcgcagcccccacggcttgaccaatggcgcctccgagactggaaaagagtccaaggagcgaaagcatcatcggcacgccttctctgtcggcagaggccatgacagccatgtcctgaccaatgaccagagtaccacctccgaaggcgatgaagatctggcacatgatgatgtagccaataccctggtcttcgccccggaaatggatcatcaggcccgcgccgagaatgaggagaggcaggccaaacaggagacaagcgtacttgaagtgcttggtctgacggatgtagatgccaaagagcacaccctggaagcaggagccgacgttgtagatctgaagcatgtatcctgcgttcgacacgctgaggttgtagacaacaatacaaaagttgtaaaagtagagatcccaacagtagaaggcgaagaaagaaatcgcagccatgcagcaagctcccagcacagtgcgctgtttcaagagctcgtaccggatgaattgaacacgggcacaccatttctcccatgcggcgaaaacaaagaggagacagaagccaatcaccaccatggcgataaatgtagcatcttggtactgagaccgaccagcactcgtcaagctgaaggggagaagcaggagaacccaaccagccatcaacagcgcagcaccaatcactagtccgttagcagggcccatgagaaaattgagcagtgaacatacaatcaaactcatggatgtaatggataatcgactgtattgtggtacgaccactcggctcgtgctgatacagccccatcctctcggccttcttctggtaaaacttgaacacaacggctagcggcgagaaggcgacaacgttgataatgacgaaggctccatgggcccatcgccagttggctacctcaagaaacgactgaccggccaggggaccggtgaaggcagtgcagataaagggagtctgagagaaagcaaaggtgaacgctcggttgcgcattccagaggtatccgccatgaaaacgtccatgatgaggaagagggcattgtagcccacccagaaaaggacgtaacctgccgcataggaatcaggtccattgcaagcggcgacaatgatcagcccgacggcgtagactccaaggaagattaggaagccttcggaacggccccagaggttgaggattttcgcaatgggcagtttcagcacgccgccgatgatgctgtagaggatattcgcggttgcgacttggggagcgctggagaagttggcgtacgcgttatagatcacggtagaactaactgaagactgaagagcgagcaagaagaagcacacccagatcctgatctgttagcagtgacaagcagcagaacactcgtctcaactcaccaggcgtaggtcgcgtagacggccggtctgctccagacgagggcagctgcctcagctttctgcacaccgagatgggcatcttgagtgaccttgtccgggttctgctctacttccttctcgtttcgagtgaagagatccagatcggagggatcggaatccgaacctgaatttggagcgacgcgctcttgaggtcccttggggtctgcggggtgcgactccgccggggcgcggtcggcgcgggagacgattttatccaggatgaccatagcgacagacgacaagacgactggcgacaagccgaaggacaacactcttcacaaagacggccaagggagggcgacggtgcgttccggaatgaagggaacgaggttgcccctggaaaaacacccgcatatatagagaggagcaaatttcagagacagcagccggcacttcacagcgacaaaaggaatttttgccc

SEQ ID NO: 1588 - DNA, 1076 bp, Emericella nidulans
tgtcactcttgttcattcttttgataccccttgtgctgtctgtttgtgtgcagacagccatctaatcccttacgaggtccttttacgcgttgtagaggacaaagggataacaaccccgcttacatcttgtctcttaagaaattctgaagtaaaaaaaaatttgcacattcaatcatcatggaccagcaacgattcctgcagcaactgcaagtcgttcttaatcgtgagtacaatctatgcataatatgtgcaatgcgtgcatggaatatgtcgctaacctggtcacagctactcagggcaacgttaaggaggcaactgggattcttcagcgcgagtactacaaacaccccgaggcgctcgtccttctcattcaggttgcgactggccatgatgacgcgcagttgaggcaactcgctgccgtggaggctcgctccttggttggcaagcactgggctaaggttcaagctggccaaaagcctgctctccgcgaacaactccttcgctctggtgtcagcgaggccaacgaccttgtccgccactccgtcgctcgtgttatctcagctgtcgccaaagtcgatttggaggatggcgagtgggctgacctgcccaacttcttgatgcgcgcggccgacggtggaaacaaggatgagcgtgctgtctcgctctatatcctgttcactattcttgagaccctcggagagggcttcgaggagaagttccaggatctattcactctgttcggcaagactatccgtgacccagagagtgccgatgtccgcatcaacacactccttgccctgagcaaattggccatgtacctcgactccgctgagaacatgggacccgtcaaggcattccaggaccttgttccttccatggtcgctgttcttaaggacgccatcgaccaaggcgaggatgaccgcatcatgcaggcctttgaggtcttccagaccctgcttggtttcgaccctgctctcctcacagttcacctgaaggatctcgttctcttcatgaacgagattgccgccaacaccgagattgatgaggacaccgtactcaggctatcagtttcctga

SEQ ID NO: 1589 - DNA, 2587 bp, Emericella nidulans
gctaatgtcattgggccagtctccaatgtgtcctggctggaccaacgggcctacttcggcttaaaaagagttgctgcagacgcgagtcttcgagatacagtctcgtgttggcattgagcagccggttatgccttatgcgcctcgtgcgggcaaatgacagctaacgtaggtgcttccagagtatcttctctgcaaaccggctctcagaatccgagtgcctgattggagtgtacttagggctacagaggcaaaggagtcgtatgtcacaaaatattggaaaaaaaaagaaataatatatttgaaggtactgctggtttgaagcgcacagggcaacgggatagaacactattgtgataataagcgagagagacagcaggagaacctagtccgaataagaaataatcctatgctcgcccaagctctcaattctatcaagttctatctagaagagatagaattcacctaagtggctgacagtatatccaacgccaatgtttcaaccacgtccaccccaggacagaggtccaatttgcccattattctttcctacaaatacgagtcttgacgtcaaagcaggcccagaatttccccctactctaccaaagaaatggtgaatcaggcaatgcactccccatacaaaccggccgcaaggaggctcatgagcactgcgttccccatgaaaaagaactgttcacacatcttcccgttcttcagatcgactcttgccacaagtgtgaacagcgtcagagcagacgtgatagcgccagtgaaataccacttgccgaactcggccgcgagaccactggccaacacaagggatccatatgccactgccgctaggaacaggactggcttggagtagccttggatctttaccgcgaggcttccaatgcctgatttgatgtcgtcttccaaatctgcgtgcatgtagatcgtctccaccgaaacgttggcgatgaagacggctgccgcgaggaggaggttggacgtaagcagatggtccggggcagacaagatatcatagccaatagtgcgagaggcgttcaggcctgtggccacgtacaagaaggcgaggtagagcagggcgaagttcgtgaaacgcttgaggaacgggtagatgatggatcctgccaacgcgacgggaatatgtacggccggctggtctgggaagaaggtctttgtgagaaagacagcaagagaggccaacgacgctgcgaagaggcacgcagaagtggttgatacagcgccgcggaccagaggtcggtgctggcagcgctcgaccttcctgtcaaggtcctgatctgcgatatcgtcaacaacgcaaccgtaggcactgtagacgtagcagaggggcagccattggagacaggaatcaaggatattgtcgtatggaaggcgggcgacggctgcgacgtgcaagatggcgactaggacggggaggtatgaaactagcacgccgatgggaaggtagcccacgcgggtgagctcgcagtagggcaccaagggtgctggaagggcattaaggatccaggactttgagtacatggtgaggagcggttgcgcggtacagatgacaggtgccggattcgtgacaggaaagatgcactggtggtttgaggaggaccgtttgcggtatctttaagactggcgattggaaaggcattattaggcacggcaaagacgcttcttgggatcgagcatcgagtcgtcaccgacgatgtggatggcatcggtggacaagcacgcgcgccggagtaattcaagatcgactaactcagccgctgtgggggcgtgtagaaagccgataaaagcaaagagaagatagggcaagtagtgggtctcatattcagctctgactatttcgagagacagctggcgatagggaaggacaaaatgataccccgaaacggtggaaagtcgagggctgagctggcagggcagccgcagcggcaaagtttgcgaataactggcaattcgaagcgggacagcgaagaagacagccgaaggttccagctacagctgcgagtgggaaagggaagcgaatgaattggttttgaagaaccgatgtgcattgctgcaggtgaatcccccagtagacttgggctgaaacacgcccttggccaaggttctgggtattatcctcacttgcaatgaaagagtatcagtatcaaaagtacaggcagaggtctatttgcaggtatgaagaagaagataataagttttgtgattaaaagtatatctacaatagctgcctatatactgtccattgctgccctccggccaaagctagtttcctttcttgataaggtctgcaatcttctcagcgaccatgtagcaagtgctctgcggatgtcctggaggaagtgttgggaagatactcgcgtccactacacgaaggttgttgactccgatcacccgtgcttggggatcgacaacggcttcgggatcatcttcccggcccatcgcgcaggttcctgccacatggtagaccggaacgatagactcgcggatgaagtcaagtagaacctcgtccgtgctgacatccgcaccggggacgaccgcgtcaccgatggtaatttcgctgata

SEQ ID NO: 1590 - DNA, 383 bp, Emericella nidulans
cgtcatctcagccgtacttaagccacacgttcaacgcggatgaacgagcaaccagccctgagtgtgttgctgcttttaggggtgagagacattaagcctagggtgagtgcaggtgagataccctgataacaatgccagaatatcacccatttgacagagtggggagcgagaagggtgagaactaaaattcaggccactactatgatccctccaggcttaatatcgataacaaaggcttttttacttttatctgtacttttgaaccgtattatagatccttttacctttatcttgtctacattttccctaccctatcactcacgtgacctgatagccctgtgcaaagaggatttgacatgcaagaagcttgaactgctttagaa

SEQ ID NO: 1591 - DNA, 6008 bp, Emericella nidulans
  unsure (1)..(6008): unsure at all n locations
tggattctctaccactcctaaccagaatggctatacatctgacatcatcttaggaagaatcttcctattttaagacactgtaacataggagaaatttttttcgttgtaattagtgacatgtcctttcattgttacagtccactgttgagacaccgttaattgccagctgcttctctgaacatagcttgctgctttgcgacgagatacaacaaactcctgcaaattcatatgagggtactctatatgtggctccaattattcataaaaactcactttaaactgctttaatgacagtgacctagtacagcttagtcaacctagtacagcttagccccttgaatgattggtcataagaaagagagacaaaaagggtgagtctgagagaccaagtctgcactgctgtacggcgcattttatagcatcattcatcttaatggtatgcggcacagtttctattcccctcgtggctggcgatacggactgctcaatcctagttaggtgcatatgtcctttgcagcctgactgttacttgctagaacaacgacaaatgctactaaagatacgagctcaaaatgcttactttcgtcctcacctttgtcagttttgtaaacttcatactttcaaactacttaccatgtataaggtactgacttactccacttatgcaactactgcagggccctgagctcccattggcggcggcaagcggccccactacaattgatccaatagtatcatgcgcatttacagggatgtcggggagatccgtggggctcgccgctcgccgccgctcacagccatctatatggccgccaggtttgtcagatgtcggccgctgtcggtgtctaggggataagtacaaataaatcaggtaatcatgtctttcttattgatgccgctcacttctcgtccttgtttgttttgtgcccatccttattcaacggtcaatctctccacaaccagctggaaaaagcctatcatcggccattaccaggaaactccatcatgacattgcagacagaaccagaagaaatagacagttcattgaatgcgaccagcgtacttcccgatactgtcgatattgaaaagtctgtgactacggatcaagatgcgcctccagaggaaaatacacgtcctggcgcaaaagctgggctatcgctcgctcagttctggattgtcatgtttgggtatgccgtctctcttctaaaactatggctatctaatctatctctcagactaacttgtatagcctgagcgtaggcatgcttttggccgccctggattttaacatcgtcgcgacggccgttcccatcatctcgtccgaattcaatgcctacaacaattcgtcctggctgggaactggattcctcatctcatttaccctagtcttgcccctgtacagtaagattggtgacatttttggacgccgcaacatgttcatgcttgggacgctcgtttttatccttggaagcggtttatgcggtggctccaagagcatgaacatgctggtctggtcccgagtgatccagggcataggtggaggtggtatctatgggctggtcaatgtgagttatctgccagagagaggacgttcagtatctgacgtgctaaggtcatccttaccgacctcgttcccctccgttatgtgggaaagtacgtctccgttaccgggcttgtttaggccgttgctgatgtggccggccctcttctcgcacgagcgttctctgagtaggtcttccagccatatgacgctgcacaaagagcttggacaagtctgacactgccaacagattcgccacttggcgttggtgcttctatgtcaacttatgcatctcccccatcagcctcatcatcacttttttctacctgcgcatccccacccctaagatcgacaaggagcgtatcaagaacttcgacattattggcaccataaccctaacagggggtaccgtctgcctccttctcgccatctcctggggcggcaatagcttcccctggaactcctcccacgtcatcggctgttttatcggcggtttcgcgctcctccaggcctttgcgatctgggagcactacgccaaagatcccctcatgccgcccgtctttttccgcaaccgtgccatcgtggccattctatttgccgagttcttctacggggctaacctcctcggaatgatgtactacgtgccccaattcttccagctcgtgtacggcgactccgcaaccatgtccggcgtcgctctcctcccgatgatgctgggcctgcaaatcggtaaccccctggaacgtcttgcattcaaacctgcagaatctcaccctgacgtcggagcaagttggcgtcatccttacggatgtgcagagggtcaagactttgtttgagggcaagctgtatgattccattattgatgtatacgcggagagcttgcggaatgggtggtggtggttgtttgcctgtgcggccgccatgctggtgagctcggcgtgtgcaaagcagcgcaaagctgtagggcaatagatgttcttattacggagagagatgctggcaggcagtcaattcctttctggaattaaaggcagcgccggaccgccaccgctgaacatagttgggatggtacgggacttggtatcgtagcttgcacacgcatcacagggcaaatcaagccaaccctgtctgtagcagattattggttaggggttgtgtttagatggtcacactgaccgcatctcatccatgagctttacctcttctaaggacaggagaatcagccgatgttatatctcttcgtcgagctgtgcatagtcggtgttgtagctatacaatgtcaatggacccaaaatgactacgagtaaagcttactatttagatgagatataagtagacctaaatacttagttgttctggtgatagtttagtttataaggacttaactgtccgggcacctaatacagcctagcctactacataatcacctgcacctgcaagcctaaatactggctttttacggtttcattgataatccttctcgtttaataactgcagctggctctaaacgcaagacctttcccatgtctgatcatacgttcagaagcatgcgtccgggcaaacatactcttaactggaccaaaagcattactatggtcagacctagttcaatctgcagggtacattcctatatagctggctcgctgatactaaatgacacactttcttaggttattaaacattgaatctttactattgagattaatttctgcattattctaggttattttgtgcccattaggcaaaaaacgtattgttggtctagctaacaaatggctatgcttcttttcacgcagctttttctgttttgctagctggtcaatcagctccaccttcgtttgctttagaagtttttacttcatcatgatgctctgaccgtttaacgcctttatcaggccacatctggcccagcgattgtcttaggctccgcattaattccatacctctgatagtgcctgaagcatcttcatcaatcaatgaaacctcatcagcggataaccgcaatggaaacggcgggttgccagaggcttgcacacccggtaggcctgtccattccttctcaagatcaaggcagctagatagatacagtgcctccccatttgtaaggagattttgagcaagaaatagcatctcaaagctggtagtctctcgaaattccatggctttgaatagtgccatgttattgctgtaagtgaaccttcgatacaacgccgagaatgacatttttaaatagagaccctgggcctcagttttcttggccgggttgagtctgtcaaaatcggctgggaatgccggtgggtcaatacctgtcgatggaggaccatcataaacaagaaagtatggcagacgcgcatggtcaaagagcggcaacacttcacttgactgccaatctatgataccaagcacctccgttggtcgtccagggtgaacaaagatgttctctgcatggaggtcagggtgccataaaaaggcagatgcgattgatgggtccgttggtagaaggtatttcacaagctatctttttcgaacgcgaacggcagtcggttccggggccatatagcgatattagggaccgagatagctgagtcatattctgcacacatgcaatctctcgaaggcaaccgccaatttgttctgctctacactattccctggaaaaatcatgtaagcagtagacttaaaagtcatacaggggcctctatcaaatccaatgctatccgaccatcgtcaagaaattcgcggcctgttgacgggccatcagcaaaccgatgatggttaggtacagacatactctccttcacaaggtcacatccataggaatgttccatgtcagatgagtaatagagacatccgtatttggtaaaagatgtcgacatccagcttttctgatatccagagctcgatttgacgagttcaaatctttccctaatacctattgtgggccaaactttactaagctggacgccggcgaccttttccattattatatcttcggcgccaaccaagttctcttctgctctggagctccatgctaattctttcggcaccggagtgcgtaactcattttgggcctagaggaagcattaggtaaaacgcgagtatccgagtcaaaacagattttatggacttctgtttacaaatccactgttgccacttcactagctattgtgtagtgagctcgctcggcattcgggttcggcactttccctacaacttgcgtgccatcgtgcactgtgaggaggaaaggtcttaatgaacatcccatcagggaacttctcaacccgaatgcattgtgcaaacgtcaagccaactgattcagcagcgcacttcaccagctcgttcatattaaatctgatataacgtaccgacatttcctgggtctcgttggagagaaaccggtgtcttgtatagcgaaaaccagtcatcatttgtgttccagttcgtgttggacagctgggttggaactgactgccgagtggccagaaggatatgacatccattttcgcttcctgagaagagaaaggaattgcgcattgtagctttcagcactagaagaagaaggttgtcgtgcaaggtgcaaagtcactcgtccctgtccacattgtccataatggttgtgtgttaagcaggttacaggcaggttacaggaaagaatcatgcgacaagctgagtcagcatctgcctttgggaaggtcagtagttgcgctgccttgacgaggtcatggtcgactgcagggactccagcgattatctcgaaaactctccagccacggctaagtcagaattgtgtttaactaacggctaccgctttggtatctatatcatctgtctcgactccccttgatgaccctgatgaaaaacgattcatgtttcctcttttgcgacttcccatgaatcttgatgggttagttctgccgatctgcgcctaatatcgcgatgtccctaagtaccatgtcattagcaaacacatctaaaaaagcagtagccaatctagagacttgaaataggatgtgaatgaggttgtaaagaggtcctcattgactggcataggctctgggcctttttttattaatttttttttttaccaggaacgagcacatgccagtataggttacggaaacttccagttgcctgtgattggcaattcccttctcttcagcttggtaggccgtacgcgcgctgtgccgtctctcgctgtcagcttcgaacaagcttatatgtaggccaatatacttggcttttcaaccatttctgtgtctattaattcaaccttttcaagacctctgtccatatcttctcgacaaaggttcagccagggaaaggtgctacccccagcggacctcgactcggtgccttttgcatgtcgtaatggcgcataaggtttttaacaacggnagcgaatcgctattccaggacaatcaggctggagtgtattgactcatcattgcgccgacatcgatgttgtatg

SEQ ID NO: 1592 - DNA, 4989 bp, Emericella nidulans
gtccaagcgtacaaaatcccccgtcctctccgttcgctatcgcctcgcccctcaaaatccattccccgccgctctcgtcgacgctctcactgcgtacctctaccttattgccccaccccctggctccttccacgctcctgtccccccgaacaaaatcatcctggccggcgactccgctggcggaaacctcagcctcgtgctcctccagaccctccttaccctgcatcgcaagtccacgaccgtcaccttccacaacacctccgtccccataaccccgcctgccggcgtcgctgtctcctccccttggtgcgacatctcccgctctatgccgtccatccgcaagaacgctccctacgactaccttccggccccatcacccttctcttcttcaaaagcaaatggcaaacccttccgcccgcctcctgttcccgcagatgcaatttggcctaccaacccaccgcgcgtcgactactttgtcagcgcatccgcaatcctccacccactcgtctccccactcgcagctccttcggacctttggaacaactgtcccccagtctacatctccatcggtgaggaaggcctcaccgacgaaggcctcgtgatggcgcggcgcatgcacaaagcctccgtatccgtaatcgccgaacaggttgaaggcatgccgcactgctttgggctaatgatgcccggccaccgcgctgcaaaggcattttacgactcaatgggttcgttttgtgtcgatgctgtagcggagacgcttaaagagcgagtggatgggaagttgcgcttccttgctttcaagccggaaaataataaggagatcccgcttagtgaagtggcgagtcacttgccggatgaagaggttgataggttgttggcggagacgaagcagtggagagttatcggggagaaggtgttggttgatgagtggagtgcgaagattgagaatagggcgcggctgtagggatgatttacaaatttcgtggtactgagagtagctcccttggtggttgttgagccttgtacatgtctatttcgtatatagttaacggtaacataatgcggcgggttgttttgtgacaatatcgtgttcttgttttccttctactcatatatcatcggccgacacagcttcccgcatcttcatattgttggacgaaaagcggacatatttcgtctgtttgcataaaaaaaaaaacttaactagccgtcatgatgttcagagggacgactccagctaataatagaagcaccagataaggttccgtccgactgccgataagaaaagcttatttttatgcttaaacaggatggtggaagttgcatacatcaggttgtacggtaggtttcacttgtgaaagtgacgttgatgacttgttgaaaagtcctagattagctgcatgataaataaagcttgtttaacaactcgcagacttaatgccgagtgcagagtttctcccgaacgaagcatagacatcaactaaagtgtatttcagtaagtcttgagtcttggactgtgcgcgatacgctatacgctatattttaaaaggctctggtcctgcctaggtacgagcggctttaagaaagtgaaatgtcatgttctttagaaataactactggctagaagaaaggataatgatataggctcaggtaacgccgccgccataaaccagtaaccaccaaaccagccatgtccaatcggccagcattaacgccaggatgctaagtgtgcggaaagatcaaacgcgggagagcaaatgcaaagaaaaaatagagatacctggatgcgccgctctaaagaaactcgtcctcatccatggagatatcctcccagtcttcgctctcagagtttgtgtcagagtgaatatcagaaatcggctttggaatgtgagttgttttctcccattcaaatttgactaccggtggagcgaagactttgtttgttgatgtttcaagcggaggaatgtcttccatcctggtaccgttgatccaaaccttgccggacaagttgagtcttggaagttcaacatcatctacatatccatctgacagtcccagcagctgtgagaaaattcgggaaaaggcgacaagaatagcccataacggggctagaatatcagataggtgtaaccagcgccataacaacgtcgggatgacaaatggatagcgaggtgcatctggttccaggcaatagccttcgcacgtttcagcgacaactggatggcagaattcgtcgcacatagtgttctccaaaatataccaagccagcgggatgaggatacaccaccccaagcgcgttggtcggggtaaccaccgaacgcggccccgatcccataagtgtggaagcggaatgcactgatggactacctcgacgttcttgagcttcttgcatgtctcacagctttcctgtggtcgcgtagccccctcagttatatcgaggggattcttagtgatggaagcgataatctgctcggtgtcttgagatatgcggccctccaactggttaaggcccgactttaaatgggacatgttgtcagacaacgattgcagcttcccttctatacgttcgaaatctttcatttccgaagactgggcggattcgagttcgctcatcacttgctgctcgtacgcggcgtcatcttgttcctgagtttcggtgtcttcgcttggctgctgatccacaagggcttggagagactcgatcgtatcatcaccgacgtccagagagtccttgttatccctgtgttcctgcaagacagtttccaaagcgctcttagggtgatcaggaagaggcagttctactggctccaaatcccttttcatttctcgtgtgctgtgggtggagagactcggcgtcggtccacctttctgtggttgtttctcttcaacgtgctcaagctcgaatgtttccttaacctgtcctgctgacttttctttcgtttcgtcattcggttgctctgctggcggcttctccttttctatatcattcaacggttcgaaatttggtatcagtgttgacgcgtcctcttttttgttacttgcttcctcaatcaatctcccgagactccatgcattgtccaacttcgaccccagtgctttgatgacaggttgtgaaggcggggctcgctgtgtcatcggagtatcgatccagccacccggcgcaactggcgttttgtcatagatacgtcgtcccgttgtcgtctgttctggagtctgagttgcctctgtcgcattttgacccggactcccagtccgcgaaagcttgcggatcaagtcgtgcgagtcccgctttgttggactccgcttagtaaaggttgaacttgggaaaatagaaatgggtgtgtttggaatcctatggccaccagacggaaactcctcttttcgctcagaagatggtgctggagagggtggaggaagctcgtgatgtgagcgtattgggttctccacgccctcttcctgactctctgcagcccgttgagcgcgtttcgaacttacctcgccccacaaccgagacgaagtgtctccagactcatgcagagtcgacgcccgttcatggttcctagtaaggctcttcatccaggcactacccgattttgccctactcccccaggttgaaggcgccttcattggtggctcaatgccatagtcctcctcctcctcctcctcctccgcttccgtactgttatcctctgagtctcgtcgttgtaaatgttccgacgaaggtgcactacccagagcagccttgtctagcaccggagaccgactcgatgtagcccgcttcaaccgctcttcgtccattgtgaaatcaaaccgacgacggggcgactgggttccgaaactcgattcggacacggtggataatcgctgctctctttgtgcagccgtggcggatattcgcttgttgagcttgtccttgccggccatatacacgacattttcgtcgtcggacggatcaatgtcagtaagactgactgcgtcctccacctgcctgtaggcattttctaagtctggcggattcgaacgtccagacattgtgctggtgctctgccctcgtttgcggggtgagcctcgtcgcgcgtactcgggcaggaaaaggtcgtcttcgatctccgttaacggcaggcgcgagaccgtgtgcgcgaaagcacccgctagtgtttttgtttggctgaagcttgaacgacgccgcgcaggtgatttttgaggaggactgagcgcgtccaaatgcagacgttcacggcgcgcccgtgagaacggagactcgtgttgctgttgttggcgacgcgcccatgatgtttggccaggtcgacgttcgggggtggccattgtgaggggttcccgttaacacatgtgctgagtttcaaggcgccagccgagctaagaaatttatttcgtctgtagcaagcaaagtggctcctatgagaggtgagcctggataacaatatcaaagcaagttgaggccgagggaatccccgtcccaatttggttagcgctgcggagaccaaaaataatgctgtcatgccgtggcctctgacttgtagtactcctgctcactgctccaacgacgggcaaagtgtctctcactggccccattgacggtaaagtaactcgtcagttgatcgaaccaagtgtgcgctcatattccttcccacgctttcgtttagaggctgccgactgacagcatgtgaccccatcagatgttttgatcatcggtctcccttggcttcgtggcttcctcgacatctgatcttggagattataaagctacacctgcgtctgctgcttcgagcagtactgtttcaagatttttgggaacccgtttcgtatctggtttccaacccgactgaatccagcccgtaccgcatcttctccgcaccatggccagatccgcaagacgatcaaccaagggcaaagtcccgctacatctacaccctcctctggaagttcaactcccagttcccaatcggggcctattccgccgttcactct

SEQ ID NO: 1593 - DNA, 4643 bp, Emericella nidulans
gtcccagattctgctgtaaccctcgggaagctgcctctaactgtgggacgatgcaaggggcatagtttgcattcttgtttcttatctcccacacctccaggccatgcccgcacagcataatccgttgcctctaatgatatagctttgaatccagtagggtagtaaggacccacgggactagcaatgacaaagagaagagcagagcctggtgggccaacgccgagagtgctttgggtaccaatcatcgtaggtcgcaggtaaagtgagtagccgcgtgcgctataaagaaattagcaattgaattagcctgcaagatggttgtgttactcagggatgaatctgctatcgagcttgaccagctcgccaatcaacttggtgagggcctcaccatcaacagtaggcaaggcaatacgcgcagaggacttgttcaagcgctgcatgttcttgtcgggccggaacaaacgaatctgacccttgctatctttgtatgccttcataccttcgaagcattcaaaggcatagtggaatacgcaagctgatggatctagttggagcttttggtagggaacgatctgtggagcgagccagccgtccttcgcggtccattcgacggtgaacatgtgatctaaggaacaatcgcatcagcgaggtgttgattttcgtgccggattgtggtagagtatcctaccggtaaagttcttcccaaaaacaaggtccttagcgggtaacaactccttgggcgtgcttgttttcgtgatggtgagcttggaggggtccagctgagcgccctcagaggcagcacgagtagcactgaagcacctctgccatagtcggttcgaacgagcgctttgagcacgtggagcagcgaagctaggtagcgctcgcggacgagctagttgatggagggatttcatgtctgctgttgcccctagggtctcagttagtcaattctcagcaaaacagcgaagggatcatatcaatgccggctgaggggagacagaagaagtgacccgcggtagttataaaaggaataaatgcatgactttccggaccgtagtaacaactccggatggccatgtcaacatttgacatccagggagactaacctgtggccaatagaattgctgatgggtaacgtaagtcgtggtacaaattaaaaggcgcctcttgagtcacaagtcgcagcttgcaattgagggagcgaaggaatccacaaccaaaacgcatcctccgcacatccactattgacagtcggccagatctccgaaatcggccttgcacgggtattccggcagatcgaggccttaggcggtgagccagcttgatctcttttcaactgaccgccctaattgcatagagtgctagtttaaactactgtagtcgataacggaacgaccctcagagcctagcaggaagcgctgtctcaattgcatgtgtattcgtgaggaaaagacgttttggtcttctcgcctccaattcacctcgctttctcaacacttaagttcctgtggtgacttcaactgttttgctgcttcccgctatattgagtcgcgacccgtgctaggctgcgagcatttggggcacgcagaaagcgatcgaccgcgcgctcaagaattactatgatagcgaatcttgtggcagataccccgagactcggatcgctttaacgaagatgttctcgtcggcgcttaaatcactaagctctaacatcacagccaactaccaggtttccccgcatcccgcgttagtttgcggtccctggaagattcatgatggaaaaaagaaatcgaccggtaccgcagcttctattttcatattcgacaagaaggttctggagcctcgatctggcagcctgggaggtcggtccggggcatcgataaaaaagctgcaggaggaagttgttgagcgcctaaagcgggaagctggtaatctcgctcgtctgagacacccttctattctacaagtgctcgagcctgttgaagaaacgcgcaatggcggtctcatgttcgcaacagagagaatcaccgcatccctcgccgggcttctgcaggagaaggattcgcaagaaaacagcggaaggctaggcccggcgtcttcgcggtacatagtggaagagcatgacggctcacggaggcggagggatgtggagattgatgaattagagatacaaaagggactgctccagaccgcaaaggggatagagttccttcacgagtccgccggcttagttcatggcaacctcaacccagaggccattttcatcaacgccaaatctgactggaaaatatctggcctgggcttcgccggtccagcggacacatccaactccaagtcaactctacctcctttagctctgtcggaagttctttaccaagacccacgccttccaccatctgttcaactgaatctggattacacttcccctgactttgctttggattccaacgttaacccctccgccgaccttttctcccttggacttataattatagccctctataactcgcctcatgcttctccattaaagtcccacggtagtctggacgcgtacaagcgactgctcacatcgccgtcaacgactccctctcaaagcaacaactttctttgttccggctcgataccgaaggacattcttacgcatgttctgccaaggttaataactagacgacccgcgcagcgtcttactgctcgagagtttcagcagtctcaatattttgacaatatacttgtatcaactattcggttcctggaatcactgccagccaagaacccaaatgaaaaggcccagtttatgcgtggcttgcaacgggtgctacctgagtttcctgtttccgtcatggagaaaaagcttctgggggctctattagacgaacttaaagaccgtgaactcctctcactcatcctgcaaaatgtctttgcaattctgaagcgcattcccaatgcgcgtcgtgcactccctgaaaaagtgattccgcaactcaaagagatctttccggcaggaaaaggcgcttcccaggagcgggattcgaaaaaagatgcggggcttatggtagttctcgagaatatgactgttattgctgaaaattgtcctggcaaggagttcaaggacggtaagacaactgttctgaagcatatgggacttgctaatatccttaccagatatcctacctctgatccgcttaggatttgattcgcctactcataccctagttgatgctgctatcaggtgcctgcccgtgatcctccccgtactcgattttagcactgtgaagaacgaggttttccctccgattgcatctactttcagccgcacgaacagtcttgccgtcaaagtacgctgtctgcaagcattcactgtgctttgtggtggctccgtggataataaggatgataccagtgatgacttgtccggcattgtcgaaatgaacaaaccacaacatacgaaatcgtctattctagacaagtacactattcaagagaagctcgttccgtccttgaaagcaatcaaaacgaaagaaccggctgttatgatggcggctctaggcgtcttccagcaggtccagaaagttgcggattctgattttctcgcccttgaagttctccctgtcctctggagtttcagtcttggaccgcttctaaacttgagccagtttagccaattcatggctctattcaagagcatttcctcaaaggttgagcgcgaccaaatgagaaaacttcaagaattgtcttcaggtgattcttctgggtttcagaatgggccagcatccgcttcgagaaactcgggcagtcttgcgcaatccgagacagaatctacaagagataatttcgagcgtctagttcttggacgcggcatagctgattcaaataaccagggaaacgatctttggtgtggtttagtttcggatacgtcagctgcacaagcatctcctgtttcgcagtcaaattccacgacgttaccctggccttcggccacaggttttgctggtagacagcccagtataaccgctcgttcagtgactcctgatactaaattgagttcttttccatctttgcagccgactggagtgcagtcctcgtcggggaccccatcatttccagctctccagccctcggtgaacccttgggcgacggtaaacacacatagccatcaaattcagccctctggggcaagtccctctattgcatcattaatgagtttgaattcgtcgagcccttctttaccgaggacagacatgcaaacaacgccaaaatactctgcgttctcaataccacctccaccttctacacagaacggtgctgcttctgcgaacagtcaactcccatttgctgggagtatcagacaacagtccccattcttgagcaacggcgtactgcaaacgcagcaaggaacccagaaacaggggcttgacaaatatcaaagcctaatatgacggcatgataatggccagctgctatgctaggttctacttctacctatatcatttttctgcacatcttcagcggctttccttatcgttcatggaactcctagtatatagatgacatcatgctactcattctgtgaagccacctcgacgaataatcagagccacgaccgcaggatccgaatggtagtggcattcttaggccagcatatattt

SEQ ID NO: 1594 - DNA, 2029 bp, Emericella nidulans
gatgttcccacccttttaccgacctcctgcacccttggccccatgatgaaacgggaagattcaagagatggattagtcatcaagaagggtctgccgaatatgagtttggctgaaatgccggcaggttcagtcgttggaacatcttccatccgccgcaccgcccaactcgctcggaaatacccgcacctgaaggtgatggacgttcgtggcaacatcggcactcggcttgctaagcttgatgcagaggatagtccgtacacttgtcttatcctggctgccgcaggcttattgcgtctggggctcggagatcgcatctaccagtacttggactcaaggaacgcggggatgctgtatgccgtgggtcagggagcattgggcattgagattcgcaaaggagataaggccatggaggatattctgaacactattggtcataaggagacaacctttgcttgtctagctgagaggagtctcttgcggactctagagggtggttgcagcgcgccgctaggagtagagactgagtggattcaggacactaacgggtcatcgaaactgcggatgaggtctgtcgtcgtcagcgtggatggtagtgaacatgctgaggtcgagattgatggaacagttgactcacctcagtctgctgaagaattcggtgtcacggtagccaaagccctggtcaacgaaggagccgggaagattctctcagaaatccagcaaaacagacagctgaaggttcccgtttcggagtcaacctaaacaagatagagaaaggagttgcaggcctctcctttacttagttctgacgctggtttttctggttatgctggacataggtgggctaggtcgctaaatctataaaagccctcctgcattactgtatgtaagaaatctgatagagttcatggatcctggtaaatatcaagacaacgtcatttgtttcttccgctattctattaccccctatttaatgtgtttccagagcctcttgggtttgcttctttgaattcatcccatgccctcgctttcattgtctcttcatcggccttgtccatgtcatcttcgtcaatctcaaccggttccggtttacctcccttaagcacatttccttgtctatgttcttccgccaggtactcttcaatcgtcatagtgggcaggttatgtcccgaccggaagacgccatcgcgaagttgcgtacgacggtcgaggagtgtgaaaggctgtaaaggttttccatccttgcttagtatcgggccattctttcctcctttgaggagctgagatatcggtgggtccaagcgctctgaatagttttcgtcattgctcttagctcttcctcgcgcgtcgacttcatgcgagggctcaggcttgggaggcatcttcttcatcatcgacagcatcgacaattcttgtgctaacatatctagcgactggaaagtttgatgtgtgtatagctttatttcagcgagatagagctgtcgtaagtcatcatcgtcgctctggagcttcttctgattttcggtataatactttacagcagcgtaagcgaaattcatccaaaagttcgggtaccaggctttccaacctcaagtttttgtttgagctccttctcctctcggaaccgcgttactttgacgtctcgtcgagtagcggcatcgttcgtttgcgtcagcgagaatgacgagggattcgcaacgtatcgctcgtagagctttttgtctttttggctcagaagctcatagtcttcaagacgcgttagaaatttctcgtattgacccagcgctcgttgtaatgtcgactcgcggtcagagctataggacttttgaaggagctctgcaatgtgatactcgattgttaaatacctatagcaagggaggtcgggttatagtgtgcgccccaggagagtcacccagtgcgtgccggtgagtcccatgtaaggatctcccacagtgcctcctgggaccatgagattgacgtgtgcggtgaagaaggtgggcgttgttggtgcgttgcctgcccaggattcccc

SEQ ID NO: 1595 - DNA, 3734 bp, Emericella nidulans
aagctccgggatgtcggggtcgtcgtcttcggcgtagtagatgatgctcgatggggtgcaggacgacgaggtccacgttgctggtaaggtgccccagtttgcgaggctccagccgagagtggaagtgccagagggcatactgaaaaggataagatatggtggtattgcacagactaatatgtgggtaccaatgtgcgctgactgtactgagggttcaggtggttgtcaatctttcttatatggtcaataccgacataatatgggatacgcacgatgtcagttgtgttttcaatagcaattacgtctcgttaggcagcaggaatgttggtagcgatgctgattgatctgtcgaggcaaactgctgtacattcactccggtcgagggtgctgcgcccccatcatatgtagtggcacattcagcagccgttctactggttggtcagggccaagaaatttccagcaatcgtttcatccaggatgacggagctgaattgcagcattcaattggctgagtgaggagcacacgtcacttgtgacaccaggagatcgatgccctttgacggaatgtacagagtacatgattgtcgggcgggctaggctggtcagacgaaccgagggttcgttaacttccatgattggcttccatagtggcagagcgagaatatttatacttcgattggccgaagtgcttgtgcggcccagttagcttactcgcatataagctgttgaaaaccactacactgcgatgctggagatgagcaaccataactcttacgatgacgtccatcctgacggaataacaaaaggtctaggtggcaaggaatgacttgcgcgtcctgcactcagagatcagctgcgaagccactgaccgaacgatacgtatgttcacgaggcatagagcgtgattcctggtcaagctgaggacggcagttctttaacactgtgctgtatagtcaccggccttcattcggtgcatatagcagtactatcagggaaaatttcccggggctctagttactccgccagaggcatgacattcatatcatatatgtcgaggaatcttgtcctcacataccgataaaagctatggtatacgtcctgtgtactgatatgattgtggcactaattaggcatatcccatggatttaggttcctgatatcacgcaggtccgacagcactcttaaaaggcattttagtacttgggcatcgtcataaaaacataatctcaatgacaaagatcaacattacagccattctttcacccgccctgcacaccagggcaagaggtgctagaagtgaaaagcttcattgtgtcctgttttccatgggaatcccaaaacgtccaagatactgcttggctgtgtaggtgtacctccggtcattactacgatatcggcacgcgagcgtttgtattcgattacttttccccagtccatgactaggaagtgaatctaaacattcaatgttttccaaagtaactgaccatgcaggatcttgtaagtacgatatttacatccgggtctctagtaaacgctagctgggatcaacccatattcgaataatgccagagtgaataatgccagggttgaatgaccgatccgccgctaaccatgcaacagggacgattaggaaatacgtctctggtatagatacttcggtccctgtcctatccgttccttgcctctaatcagttgtaggtacgcaattcccctgagaaccccaatctccggtctcgcaacctaagggtatccatgcgcataacaggctctactgataattagcatattgtccaaacagacttgacaactagattcttccgtaccaactggaagtatgtatgtgagcatctctttagcaaccgctgcagcagctgcggcggcatatccgttccactcgtcattcttatgggagtcgcagtaattagcaatgccacggacgacgacgcactgaaaatcgttcattaatccagcggcttccatatcgaaacagatcgctccgccagcctcttgagccaggatgtcccgcttcaggccattcttgatcactcgattccccgacgcaattagaccgtagaatatctccgatttcattggctgggttcgtctaacccgggcgacgtatttgttactgtcgcaatgtgtgcatggagcttccgccacggtgtggttatagtctgctgcgaatagaacatctcgctcggggggcggcctccagtacgccttcaactcagggtgtttgtgcatcattctagaggtgaattcatcaatgcgattggcacgcaatctgtgatcggatttcatcttcgttatgatcgatcttcatggcgccggcggcgggcaaatcagcccttttcgctgggagccagccacagtttcccgcaccatgtcatactggacgacacccccggacgtttcagttggagtactgacgacgacgtcgcctagacgaatatcggtattgcggctgggtacgccgcctgcacatccgaccagcaaacgcagctctaccgcggtgaaagtccgcaacaaatgcgctgccacaagtgctgctgcattgggcccctgtgacccttcgagcagagaggtcaagacgacattgtgcccgctcagtgtgccgagtaaatatgagtttgggtcgatattattgccagggactcgtccatgctcctcgtcgagcatacagcgggcggcggttaaatccacctccaaaggacagatcaaggccaccgtatagctttcgtagttgaggtggcttccgggtctttgacttcgcattatcaagttgtgctagcaagtgttttaaagaaagtaaaagataattctggtgcggactcatgatagacggagaggtcgagagcttttgtagtttcctgcatccaggccagcggctacagcgccgcgccagtgaccgtctgcaaccaatgattctacatcgggtctctagtctcatattttgatatagcaagttgtttcagtaggcgctgccctggcccttctatggctggccaggagcgaaacaagagtccttcccgcacttccttatcgggtgccttgcggcagaggaaccctgatccaatctttaggcgccgtatagcgcctcaactatcttagaaaccaggttgacctatcgttctgtagtagtgaactcgtcgaaatgaactgctactatttaatgcacgttgtcaatgcaggttggtacgagaggagctaggacgaaatggcggatatatatttttggaagcgccttatcaccacctatagaagaggtgaccacgcaataaatttatgatgctaaatcatgcaacaattcaatgtcattcatagagatatatctggatgaaaatacattctgtcagtctggacaactaagggtacgttacgtttgggaggctgactctggcaagttatcattatagacagcatgtcactaccaagccaagccgcataccgatggcgtttacactgtgggccgtggctctccgacgatctcccgaccaagcaaacgaaaactgaaagcgtgcactgccaaaagcagtcagaccccgaacctgcgaaccgcagcacagagagacggtcaacactattagtcatcaccgttggtcctgaagaacatacaagcaggtggaagcgagcggtggcagaggacccatgtcagtggccacgcgtcgaagtatcgaaaaaacaaataagcctgtactgttgatcctggcgccctgggtatgcgcgcgagaaaa

SEQ ID NO: 1596 - DNA, 4323 bp, Emericella nidulans
gactaggtccagctccgcctaatgctcgccaggcgaaactcgaatctcgagtctcggcttgtctcgcctcgctccaggctaaagaagaagcgcgcgggttaaggttgccctccacatgaacggtgcggtcaggcacagcgttctgcgtctcgctttcatggccgctgtggcattattcgtgccgtccggcgccctgggtcttccgattgaagttaagccggcccactcgaactgggccatcgctggttagccgctgcaaggtcaggcaagttctgcagttggactctgacacgtatcgaactagacggtcgatgcgttgtccgtcacccgtcccatgctatgtctgccattgccactttctgagagatgttggagatgacgatatgagatctctgagattctagtgacgccttggtcctttcattcgcgcccgatgcgtatgaatccgggggaaagaagcctcattagatatcttgccatctataggccggtatgcgatctcgtggatctacaacgattcaatttcaacgtcaccgcgctccgcatcgctcgagctgcccaagctagccaggatcttctattgcggcagaggattctcgcttgctctctgattgcctcttgcttttgcgccttgatttctgactacggaatccacttttcatccattgtggctgatatccttcctttttcttgggcccaactgctttcaccggctgcctgtcctcctgagcccggttctttaaaccccctgactcgtctattgccatcttaacccttctgctcttgccaggtagcaattaccgtcaattgccagctcactgctggcaaagaacaggcgaccatttcgcctcgccgccttggagtctcacaatgaatcgacgctttcttcgactcttcaatcacaaactgtgcttctcctccctcgctactgtgttctctccgacactgcagtccctggagaactaaaatttgcctcttatctcatcctagatcgtgctcagtgccaatcgatcgacgatagccgagtacatctaaccctttcaccagggcccgaattggacgcaccctaagattactgggaagcacttaccatatttgagacaagctttctttttttttttttttttacctcttttttctgtcgcaatttccgcttttttggtgttccgcttgcggtctgcgccgtacaacatatccctcgcagtttgggaggctcaattgttttgttttgctgtaatatatcgtttggggtttgagggaggtgttcacttcgcagccttcccgtctaccgatatcagtggagaggcagtccgagtcagaatctacgaagggtgcaagctaaaggcaaggaatacgcgccacggtatgcggatgtgaccttgtcatccacgaagtactcactccaagtcaagcataagcgcattgaacctgctcttacttgtttctaagcgttggacacgagcatggaaagctatatgatttagatccagattgtccctgtttatcgactcttagaggtaagccacacctgctctttttggcacactgtgctatccagatacgcaagctgggaggcgctgtattgcaaagattgtatatcacctatcctgaaactcagcaagaccactttccgtcaaattcgtgattgcagcgtaccgctgaggcgcactgccttttgcgtcccatcatgtcgaactggaaacagaagacgctaatgctctagcggttacatccagggagtgccagcatccccagacttttggatggcttcagctgaggtggaccagaaggccttaggcaattttgccgcagtgacgggccatgagaacccattcctatcagccatgttatataagctattagggttgtcggttatgctatcaaacaaactacttcgcgcgcgacgactacggcgactggatccgacacgtgaaaccaaatccctccagctgtattatcacattatatggctttcgcgcgaaggcctgctgattctcgaagaattcgtcctcccactggtggaaggtttcgtggaactgaagatcctagcatataaactcagggcatcattctaccatatattcgtcttgttccataatcagcccgccgtccactctcccggaattggcagcctctccagcaccgcaactatctccaatgaggcggcggaaactgaacggtcgccaaaaggccagaattccaggttatcgtttcagccagagcccgaggttatatccgtgcccaatcggccgccggaagtcgcagaggattcttcacgagggtacttgaaagtaccacaggcccctcctggattggcaccagttcaaacaccccggccgctctcgtcctttctcctacctgccatcgactatacccctaccgccactgcatgtttcaaccatgccgcccttctcgccgaacgattcctccccggctcccaccctcttcgcctttccgtcaagctcgaatacgccgcgtatctctacgactgcttacacgatgtcagtgccagccgtaagcttgcaaaacaggcgattgcagacgtgtatacgcccaagaaggcatggacgatgaaagtttcgaggacgctgctgaaattgtgggactgctcggcaagatggcaaacgatctggcaaagggagcagtcgtggtggaagcacgactcgaagcgtgactgcaagggccgagagctcgcgcagtgagggaaatcgaacacccactgctaggaagacgtcaccaagaacggcggcgactacacctatgccaccatccccgaggacggcaaagaccccacggggcggctactcaccggctgctatgcccaacccgactatgttgaatccgatttgatgcgtaatgccggttatgagttatgtgtattttaatgagcaatgttgcgacagtttatggtaccacaggccacgaaatctcgaggagcagtttgacttcctgtgtattttgttatgttcagatttatatacctttcctgcgctctctgacatctttcgactccgtctatgtaccaatgcattagggttggctcttgtttcctacgtgacctatgtagctttaagcggaatttttgaggcagtcatgtggaggccttatggctcaggccaccagtcccgtccagggaatttgtgaatttggcggctgcttgtccggcttgaactgctgtttatcggcgaatcagccaataatctagcttgtctgctcgaggactcgtaattcgctttcttggcagatgcaagctgcaccagcgggcttatcgtccggttgcatctcgaagctggagttacccaggctctcctaaggttgacgtcagtcaccttccaccctgagtctgcaagcaatctctgccaatcgccctcctccgatctctagggttccagggttctcgttgccagtgcgataggcagcatccatttggccattcatatctagagctctcttccctgcagtgcgtctcccgccactaccttgatccgcatcacgactgtttatcgatcgtggccgggctgttttgttttgcaccccgatcgacccgaccgatcgaccgaccgtggccgaccgactgcgaccgatcctgactgggaattttgatttgactcgcgttagccaaacaaccatcaatctgtgttccaagcgaagagaaaaagtgctggattaccacaggaaaaacaactgcaagaagaggaggactcaaaaggcacaccacgctcaaacggtctggacattgtgctacccggcaatgaagttgcttgtcctggaagcttcccaagcaagtaggataatcaccgcgaattgaggccctcgcaggaggcttcaactctgagcgagcgaggatcatgcggttggggctgcagaaacccggtgctgtcccgtttctcgccctgcttattttctccctgctcagcctggtgccgacgcttgcgaaggaatggaatttttacgggtacagctacagcgctcattttacgtatcttggtcttcccaacggtgacattcacggacacagtcgatgtatgtatagaatctgacagatctattaccccttgccttagcattcggcttagctcttcgggagtggaagggttcgggctgaccggtttgccgaattcttcccccgcgtaagaatgcttttggacggtggatcccaacgcggccggtgtaaccgcaatcacttagacctaggtttatgcgaattattcgcccgcttgccatgacccttattcgccctatatggggacatctcttcccgtatttcatctcttttctttagactcctattttatgtgatacgcctttaccatattttccctt

SEQ ID NO: 1597 - DNA, 4887 bp, Emericella nidulans
tgattatctggagcatcgggttgataccagtaccgccagcaatcataccaatgtggcggcacatgttgggggtgtagaccatggccgccttggggccgcgaaccttcatggtatcgccaaccttcagggtggtaaggtacttagagatgttaccctgggggtaagccttgacgaggaggtcgaagtaaccggcctcattgtcggacgagatgggggtgtaggagcgcacaacctctttgggctggccctcgatagtggcggcaagagagatgtgctgaccgatggggagaccgagaatatcggtgggacggggcagagcgaagcggtaaatggtcacgttgtgggagatgtcgttcttttccttcagaacgaagttctggaactcgttggggttgaggactttcctgggctctgcacgtcatgtcagcccatatccacggaatatatgaccatttggtactactgcacttactgctgctaccgccgacagacagcttccatgcaacgaaacctgcagctagggccacggcaaaaggaacccattccttcttcaaaatgaacgttccgacgaccagaagagcggagggagcgtagaccccagtgatgttctcgagcgatagagcacttgagacaggcatcagtcagcaaatagtgggatcctcagcggtacataaagttcacctcattttgacaattggcaaatcctccggctgtcagatacaaaatgaagaaggaggcaagacgaagaagaagagaaaagggcgtgagaggccggggcggatttgcagaaaatcagcttctggagctcggggaattggggaatcagatgttggcgcgggtattgtgacggtaaatacgctgccctcgttccgcacgccggccgccttctctaccgagcttgtaggacgagctatggagtcttccacaccagctagcaaactctaggattgtaaattgagtgctccagccaggatttaatgtaaattgatgatgagataaagtactgagtagtcggggtggcagcgcagtgcggaatcccaatcccagctgttgagacgctgacttgcagcacagattaccgtgctaagtggtgtctttatgactccgatagatccccgcagaggggacagaatcaccgcatttgcttctgctcaatcctgcctgctagaggacttatttccgcactgatcctgattccgttgcctatctcgactatattttccgaaagtttagttcccctcatccactatgaccgtgccagtggaggaagagcccgccttcaatctcacagacgtagatcgggccgtcctcgctcaaacagacgaggaattcgcataccatggctgggaggagctcaaagatatcattggtatttatctgccccccttctcttctatccccttcccttcccttcccttcccaaagggcaattgtcgctcgacagtcaatagtgattaaaaagctaacccgcgcaaagcacgaggcgatctcggtatcctcaagcggaaaccctccgatctggtccgatatctggcctggtccaaagaaaccaaggccaaatatggcacaatcatcaactatatctgccagcggggcctagggtggcagttgccgacggaagggcccagcttcaacaacccgatcccctttgccgaccccgcagactacaagattctccgcaacgactggccctacggcgtagctaaggggatcgcgcatttggtcgtgtggtcgcggacgccgatccccgtgcaagatgcagacggggtcattacggcggagagccatgcgctgattgagaatttcgtgcagcgaatgtttgtagacaggctggcaaaggaggatggagtaaaagatccgcaagatcgggttctgtggtttaagaattacaccgccttgcagagcgtgaggggattggagcatgttcatattcttcttagagatgttcctgatcggttgatatatgagtggacgggtgaatgatggtatacttaagagtactaagactagacagacatgatacaaaatcaaaggcctcagacgtgctagattgggaatcctgaaaactggtaaagtacagagataatgagcataaatgatagaaacatggtaagccccgtgacttccccttagggaactgatcatcaccatcatcttatgacttctgctcctcgacaaatttgagtgcctcttcccttgacacgacgtcgattgtactagccttttgtcggaagctaactccgtagcacttctcggcgacatgcagcatctctggtcggaaggtcgtgcaaataaactgtccgtttgtggagtcggaaatggttttcagcatctgtgcaacagcagttctgtactgggcgtccagattcgcgtcgatttcgtcgaaaagatagaatggagctgggtcacaagcctggatagcgaagaccaaggcaagcgcacagagacctgtctatgttagaacaatgggctacatgaaatggggacaggggacttactcttctgccctccactaagctgttggatgcgctgctggtcgtcatgcttgctgttgaaactgacgctgattccaactccgacatagttctccacgctatgcttcgcttcctcatcctctgactcaagatcgtcctccgcccgctgggtacgatctgttttacgttggatgatcaaacgccctcggccggcaggaacaagtttctcaaagatagtagcgaattcacgagacacctgcttgaatgttctctcaatcgcttcatcctttcggtgatccagcacagagatcaagtcatcgatagacttttgcgaagcgtcaagttcctcccttcgactggtaagtgtctctcgctgcttggtgaagttgttgtactgctcaaacgctttcttgttgacatgggcatatttcttgagtgcctcattcaccttatgcagcttcttaacaaccgtgttagagtctgtattcttgtacttggtgaatgcttcatccggcaagaccccaaggtcacggatattggcagcacattcagccgcctgcttcgtcaaggctgccttcttctgcatactcttctccattcgacgttgatgcttctcgatggacttagcaagctcctccaactcccgtcgggactccgcattgcgttgggtaagttccgttacgcgtgagtttgcttgttccatagactcgtctacctgtgcaagcctttgagcaagcttgtccaaaaccttcgtcaggcgcttctgctcgcgctgtgtttccttgatgttcccttggccatcttcatcagctatatctgcgtcttgagccaggagctggtctaggcgagggttcaagttctcccgcagctcgacctccagcactgactttcgagtctctagctcacttcgttttccggaaagctcttgatattctcgacggtattcttgaacattagagttcaaagactcaaggcgggcctcttcttcgtcggtaagagccttgtggaagggcgacgagagttcagcttcgaatgcgtcgacttgatcctttagagcagcaaggttgccttcaatgttccgaagagctctccgtttggcgtccagattatcattttgcttctgtagaaggtcgcgcttgcttctcaattcttggcgtaacggcccgctgctgttttgtacctggtgcctttgctgttccagtttctgtaattcgccgacagccctggtaatgagctgatctagctcctcgagctctttgcggatttcacttccgcggctcttcttagtttcatactcgtctctccacttggcgaggttcttcaccgcgtcgagacgagattgccgtgagtcgtggaaacctccggtaagagcacctctcttgtcagagcgatccccctctggggtggtggcattaactccgtggcttcgagcatactgcgaagcaacctgaagattgggacagatgattgttttgccgaatacatgttgaaaagccttttcatatgcacggtcatattgtagcttctcaatcatcgggatcgtgtcgctggcttttggcatattgagcggcttggttctgagccggttaagaggcataaacgtaactcttcctgccttttcatgctgaaggatctcgaggactttggtagcagtatcgtctgtgtcaacaacgtagtgaaacaaactctggcctgctgtaacctcaacagcagtgcggtatctgtcattcacctcaaatagctctgcaagtgtaccgtaaacaccttccaaattgtgctgccgtttaatcctccgtacagcagcaataccacggctggtgttgtgatccatcatctgagacaaattgcgctctgcacgatcaacttcgtttgaggcattaatcagaatcgagtcaagttttgcttcttctcgccaaagttccctatggatagtcagcgttgcacatgaggttctaggccaatcaacatacttcctctggtccatgagtctgtctctttcatccttggccgcttgtacctgttgttccacgctttgaatagtatcgcccctcccatcgatctgctggcgcaggcgttccgtttccggctccaagagagcaatatcattctcgatatcattgatatcttcctgtgtctgcgacaacacggactgcacgctcgaaatagaagcgttgttattctttatctccgcctgtagccacttatcccgctcagacttgttcttgaagcgtgaatttcggccctgcttagcatacagcctttggcgggctgtttcagcttccgtaagtttagctctggcagcgtcctctgcatctttggccgaaatgaaacggggaacgagctctttgagttctgtctggcgctcttcaattgccgattggacagctttcaagctttcgtcatggcgtgcttt

SEQ ID NO: 1598 - DNA, 2481 bp, Emericella nidulans
gtctcatccgccctaaagttaaggatggggctattgatcactgtggtaaaatagatggatgctctcaaggaacgagcctgaacatcagtactttaaggaggaagaccctcttcctcctatccaaaccctcaagctcttttcagagagctatattgtgctttgtgagggccctttaccaagtcagcacagtgtcttgcacaaccttgcctgttttatcagtgaatgggaaaggctaagatcaattaaactaccaaataccttcaaggacgatgcttataatgtttgtttactatttccctcatatacttgacgtcttataaacagttggcagcatatcaaaaatgaacttatttgcaagtataggcttagtacaaaatacagagaaaagtatcctgtcacaagactggatcttgatatactccttaggcatctttataaggataatcagcatgtctatatccatgaacggtgtcgctttcaacaggcctttggtctgtccttattttcctcttctgcagccagagcaggcactattgtggaagccagtgcctgccgcaatactaatgaggctctatattacaaggtatttatggtacctacaattgaaagcatctcctctactaacactgtgtaagacgtgatctaacgtcggggttctctagctacaacgaagcgatgactatcaacaataattatccaatggagggagctcgattggtactgaagaatattgaaaggattgcttggagacctctatatacatggcatcaggaggccctttatataacctccagtgtggttagttcggcatctccaagcaataccattacagtgacgcattggtgattgcgtacaccaccgcatcccactgcaacaatatatgggttgatcccagtacggctcgtcccttgaattcctactggcggaccggtacggctctagcaatccctcatattcctactggcggataggcaccggtaaggcgcccgtccgcgttacgtgggaattgagggattggggtcacgtgtcacagggccagtgttggttatcgaggtggttatgtaatcaatatctaacatgaacgattttgattgaaggtcttaatttcctaactacgatctgtatagacaatttatagtatttagagaacttcaaaaggtaagaacctcggtacctgaaggtacctcagcccatatggatagctgtaatccgtttatggcggtgtaatcgcatcatacgatccggccagaaaccagttgggttcgacgcgctaaaagctggcatcgacgcactactactctgcctcaggcatcaatacaggtggaatttggcccgtgccccaaattccacgtggaatttacagctgtatccatcttacggtattatgactttcaatacctttaaccatcaactctacaaacatagtcttgaaggacaaaactctcgcataaacagtaataaattatcctttagattatggaaagtactttttaaatgcttgagaagcatatataaagtagttaatagacaattctaataatatcgtggtagattctgaataggtaacagtgggatttacagagtacgctgtagatatatatcttacccattaacattgccagttcataactgctttgtaagtgcttgggaactgattgataattttaagctaatcttcattttctagctctaattcacgaagctctcgctccttttttttgattcttaatctgctttgcgagtacttcagctcttagattttgaatcttcaactcttcctctaacctctgtagctctgtactctgagattgctcgcggaaattagtagcagcaactctttgaaggctaacttgagaggagctagaagagtatttagcaagtagtttacaagaagttctcaagcgcttgaaaatagaccttaccttaatcttgcatgggagcttccttgctggctgtgactaccccttcagctgcctctttgacttggcattctttgtaatggccttctactactagaagatggaaagaatatttcatcttcatccttaataataacttctgaagaatttgattcttcttcctgccaagctagctctatagaatacttagtacaagtactttcaaagcatttattaagtactttacaacctaagataaagacataccagatcaagccatataattaagataactagcttcaagagtttgggttgtatattaatattgtatactataagagctatatgctctgttttgctggatatcttgtatatcaagcttccatgatctatatatatttggtaagttgttagcaagcaatttccaactgcttgataaatactagatacttactctaaaattgcttgcaagagggttaagtgctttccacggtaattagacttgttatatatttgctcaactgtatttgtactcttctgtactagatcaaaaatatgatgtggaataagagaataatacttg

SEQ ID NO: 1599 - DNA, 1159 bp, Emericella nidulans
ggcgttggctaattatcttagacttagtaaagatcagctcttttatattccttatataatttatattatacaatttagtctcagggaattgcttggagagataaaagcaaacctggttaataataagattagattaatatagattaatatactataataattaaagcagtcaaacaattaacaatactctaatattataaagactctaaaaaaggtaagtaatactagctttcttcccttttcctagcagaaaagttataccttctatttttaaacttagttactaatagctatctattcttcttatagattcaagatctagctatttttattaatactagtctatagtactggaaggtatttcttaagctataaataacagagccaagactagtactaatctaagatatttatatataataaaactcaaccttcctaatacttgatcaggcttgaaggatttagtcagatattaattaatactataatacttattactatacttaatttaaactcaatccagaggagtggcgtcaggttgagtatcttttattacttacaaagcctttctttgactttaccaacgtgctatcaaagataagagatgtaactatctagcatatcttcagtatctataataagctattcaactatcttgatcaggctgagataaggcttaaatacaaagctgttccctggaagaagaatatacttatagtaattcaggctgctaatacaaagctccggaagtattatactaaaactaataatcagctatatagtttagtttatgctattgcaactattctaacactattaaagaagcttcagtactttgataatgcagactagagaggccttgataataataagaggccagttaactttataaagtactatcaaaatatcctccaagcaaggtttaagctttattaacagctgcattcaaaggaagctgagcctattaatatagagaggatcttctaatcagcaggggataagcttaaggagatgtataattcacagactactcttcaggctgaggttaatcagccagataataaaattacctggtatcttgcaaagggttagtattatctaatactattctagactatatcatatctttactaacagttagatagggcttactaagggt

SEQ ID NO: 1600 - DNA, 3563 bp, Emericella nidulans
tccaccgacgcctctgatttaacaacgaccgctgactgctctttcatttacgcctgttcagccgacgtcgtgcattccttggaagctctttcttcagcttcttgccgggaccgtctgcatttttatccttactgtcctcatctggaaattccctcgacttcttcgctccttcaccaagggtaggattctcagagagggcaacacaacttcgtctcgttacgcaaagacctggtacggctgggtgtcgttgcagcggcacgaggccagaaagagggtcgtacgggactgcatggcaaatatacacagttggaatccgtggaggtcgtcgagggcggattttgaatggatttggcggtattcagaccagaaggaactcgccacatacaaggagagcggaaaacatcagttgtcatggcctgtgtttcatggccacgaaacaatcggtagcatctggagtcattgtagtccatctatcgccgagcccttgacaatcggaggcctggaaacagcttcacatcccattgcaactggtgcacttccaactccgcacacccctcgaccgatggctacacctgttcgagctacgaggacagacatacctatatgcgaaggatatgggaataatagtcttccgagacattcgacagttcgtcagttgcagcgcgatagaattggcagaggtttccgttcggattcaagcacacatgagctatcttatatcggcaagtccttcacatctctgacaaaaattcccttctcccgaatctccaggcgcgttccggtgtggtatataaaccatacccaaccatccccacacagcttttctatgccctgccttccacaagcgaaacaatctccgccttatcgatatgcacgctcaaccgtaacaacaagatctggaagaactggcagtgaagatatgccctcagatatttatttgactttccatcgctcgaggaagtaccaggtttggtctgctcgcatgggattgcagaccctcaaatgtctggggtacagcactcatactctgccaaggggcccaccagggagccctaagtctgcggtccttgggagcctctctctggacgccgctgcctctgagattgtgcaccagcatcggcagggtccgaaatggacatcttcttcagacattagcgatttatttctctacggcagcgatcaacagcacaatactagactccccgtttcattgcccgaacacaaaaccgaaggcaatgtgcagaaggagtggccctctttacccctgcaacgcagccccttggcccctttacatcgaccaacgctcataacctggtatgagaactcactgccagacctacagacttcaatcacaaaggtcgaaatcgagaagaaacagtcgagcaatcggcggcgaaagctgtcaaacccagggaaaatacctcatcgcgtaacacagccgaaaaactggagcaattgggaggtacggttgattgagaacttggatcgtagactcggctggatcgaaagccagttgactcccggacaacggccctttcactttgccctgcttgcaaatcattggttaaaccgggatacttggattgttttcgatccagtctcccgcgtggacactgataaacgacgactttggggagatccacgattcaacgttccgtatcccaagccatcatcagttcccaccccaaagtatcccaaatcagctcgtcaaccggcacatacacccaagatcaattcgtggagggttgcagtgaaccagcagagaaaggcatccgggcagaaagtgttcttacattctatcgaacactatgatagctcagtagaggatccgccagacggtcatatcgacccagcgagttgggttctccgaaggccgccgcagggcttcggtctctcgtctcgacagggagaaagatattatgaaggcggcgccggatggcaggagaagctgagcgactggcaaaaaatcagacgcggatatcggatccgcaaggcaatatttgaaggtcgagtgaacagaagaagggcgaaggaactcgtgtatggcatcgctcgatactaccaatatgctacaaaactcctccagcccgacaatggtcattgccaagtaggatcttgggagctttcgatagacgagctgtcgtgagatgtatatattcaaaataaaatgaacccacagcctttattgaatattcaattatgctaatcatttcatggtctcccaaacagggaggggaaagaaaaaagtcaggacactcggtaatgggtcaacatggacggatccttgtacgatcattcctcaaccgtatagcagcacagaagacccctagagccagtcggatgctcttatggagtgtatgactagggacagtataataatatcctgcgtttctgcttgaattctcctgttttgtgcccgatcgccaaagattcagactaacagatatggtcgttcttttcaagtcttctttatatgccggagcccttagtcatgccaaaacatcgatatgctggaaggacattaatatgctgggtttctattttttgatctcgcggtactgccaccaagctgattctaagagcagacggcagcatgctttaataggatatattgcaagtaccgtacaaaaacaaataggtagtgaacccctatttccgaaactccaaagatcctaatatctggcttgaacacccattgccgtctctaatagcgagtaggacgacgaaggaagagccgtataatacagtaggaacgcgaaatcgattgcacgtgtccgttagtagtgtaggtaggtagacagtggaaacggcgaagaaagtgccgttgatataggcatccgtgaactacgaatgcagttcatcatggcgcttagaaaccaggggggttgacgcgctggctgactctcgtccacttcggtaattctaattgggattccgttagttacattgcctttgttgcgcgatttcctggagcaggccagcgtaaggaatatggcaaacatactgtgaatgcccttgcggtatgtcttctccttcttatcaaagatcgtgtatttgtcacgcggcagcatctcctcctctcggggcatctctctgtaccatctctcaacagccttcgtggtctggccgtttcgggccagggccgcgctgacggtgtcgactaccttgtcgacagcacgaaggcgtttacgttgccgggccttctggggctgcgagatacgccatgggatcttcctattgaaaagaggtattagcgacgattttcgtgatgacggtttgaatgtgggttgcgtggtcgattgagcaccgccgcggcagaaaccagagcgttaagagtttgtagaaagagcgtaccagagaagacccgagaataatggtgatgaaggcttgaacattattgtgctatgacgggaaacaagagagtgtccaaagttctgatggaagtcttgctgaatgttgaacggaaaatcccgtcgaggttacggtggatggtccgtgcgtttccaacctccgcggcggaacgaattccaagatcctgaaggccaataaagttgccaactgcc

SEQ ID NO: 1601 - DNA, 3698 bp, Emericella nidulans
cgaacgcaagacgccagaggagacagaagctttgaaacaagagcttaaagatctaggagcaacagtggtggttacagagactgagctactctctggtgatttcaagaacatcgtcaaggaggtcactaagcaagggaaggaacccattcggctggcgctgaactgcgtcggcggtaagaacgcgacagctttggcaaaggttctagctccgggctcacatatggttacttacggggccatgtcgaagcagcctgtcgccctaccctccggacttttgatattcaaagacctggtgtttgatggtttttgggtcagcaaatggggcgacaagaacccacaactcaaagagaacaccatcaaagatatcttgcaattaacacgagcaggaaagttcaaggatattcctgtggaggaagctaaatggaaatgggacactgatgcgaccgagcttgcaacagccgtgcagggaactctcagtgggtacaggggcggaaagggtctgctcaagttcgaaggcgacgactaaagttcagatgttagatatgcgagtgccatttcaagagatatatgctcctctattcaggtgtctccatacgccacgcaaataaagccgagtttctcaactgggccgagcaggacaaaagccacatacatcaataagcagcaatcatccactagggtttatctaggtagttttggttcacaccgagcagccccagtgagtcttaacccactgtacaaggagatccgtaaatgaagtagagggcatatacacctcactgtcctgagagacattgacaccgagcccaacttggtcagccgcgaagctcacatatggctgtatgaaatcgatgtacacaaggtccacagtttctggcggagcagagccaccgtcaagagtcaaggcacctatgcagttcggtatctgatagaattcaatcatggaatggactgtatcatcaccatctgcacctagatcatctgtcgtagtatatccaggtatgatctcatgctcagaatcgtggccaactgacatcggatgctgacttgtgggaatattgagaatcgactctgcacgatgtagtcgagcgaggtcaattccgtagtcacgagcagcttgctctggcggcgcaagagcccgtagcagaagcccggttgtcccttcggcgcctgtgaagatttgtggctgctgatttaggacattcaaaacctgctctgcttcggcataggcaatgtccttcaggtaacgaaagccacttgtaaatggcgaaattatatagactgagtcccgattgaattgccccttgaaaaggtcaaaccgaatggcgccagtattgaagataacgaaagctggtttccctttccgagatgtgtcgtctagcatgcttggaagtacctccctctgcaaccaagcgtaaatgttatttgaggctgtatgcggagatcgtgacatccacaaggtctccgggacgcagccgtatatttcgtctagtttcagcgcacttcgtgattgctggataagacgagacacattgcggccgtgctccgttggaaacgtactctcattaagaccagtgtgactgtaaaatgagaagagattattgtcaatataccttcgctcgaagataggatctaccatgctgggctccaatttgttgcgctccgtagacagtccgctaattgacgcaaacccaatagtttccataaatcggccactggcaagcccaacagctttcgagtcgaattgatgacaatcgcgaatgtggaggtgaccaccgaaaaactgaattggcgtgtccggatgactagctctgatttcattgaagaccgcgtcgtactcttttgaccgaactggaacatgccctatcaccaaaaacagatcgacggcctggtcttgaatggcgtgcttgaaccaaggctctttcacaacttcctccaccggatggacaaccgtgttgttatagttccttgtaaagtcgaaaagaaagccaaaggcagtgatgcgaatgccttggttcttcgtggtgaatttcctaaatcggggacccaactccacgagttctcctgtttcagggtcatagatatcgacgttggacgacaaatagtgaccgcggaagttaggtacagtaattctatattcggcttctgaggtgctctttttgtagagctcatgatttccgggagacaacacgtcgatttgttgttgccgtataatctcggaagtatatatacctttagggtctgacgaatcgtaaaggccattgccctctactctatcacctgtgtcgattaagagtaaatcacgcccctctgcctcagccagctcccgcatgcgagtagcaaacgacacataatctccccagtccgccgagtacgacggtctatatataacacactcgttagcttcagaacataccaagcaacgactgatactcatactctgagagatggccagccagccagccatgagtatctgtcgtatgaaggaagttgatttgaccccatttcagttcacgtaaaggagctgcgacaaaatccggagcggagggctgaacagcttgaaccgccgagaccaaagataagataacgagagggttgagataggaagccatgctttgccacgctacagtcgacagtgctcaaaatgcgtcattaatgtcttattcgcaaaagtacaggcaagattgagaccagctgacgagtcgatcacggagccgaatacggcaaaaatatgcctgtgataggtggaacagttggatcagaggttcgccaggatacaccgttgggccagagagccactgcatacctaaaaaggtcgctttgcgatatcctgacaaggaatcctgataagaaatatcaggcgaggcgcagtcactgggagatatgatctatcgcaggaagcacgcgctaagctttgcgcatacaaaatatgtgaaagcggtcatatactctgcagtatgtgcctggaatacatgacacgagcttgggtacctgggaagctctagtttaccacagtttccttatttagatatagcatagcaatccccacgtgacgcagattaacagcgcacacctcagatatcagggataaccacatattataaagcctgatgtcaattgttagcttcctactgacaaaatattccggtatccatggcccatactgtggactgtcgctatctccaagctcggaggagcgattgtccggtggctgttatcggggcgcaaaagtggacacggaagaagtcaccggtgagtctaggcttagtcagcttcatcccaacactccgctgaagagctctcaccaaaaaatcgcatcccgaacgagatcggtaagcttggtttctccttttggttgttcatctttctattcgcatcgtctggtggtggagtctttttctcttgattgcttatcatactcagtggccctgctaccgtttatcccagccatggcttctctccgtctctttcgaccagcagctcgtctgctttcttcgcgcctttccgcgactcgtcctacctttcctcagactgcctgcacaccttcaattttgcgctttcgcggatatgctacagagaacggtaccaaggaggtcactgtacgagatgccttgaatgaggccctcgcggaggagctggagcgcaaccaaaagacatttattttgggtgaggaggttgacagtacaacggagcgtatg

SEQ ID NO: 1602 - DNA, 1678 bp, Emericella nidulans
tcgctaaaatgttcaccaagacccagattctcgccctcgctctgtcgattgcttccgctgaggccgtctccaagggcttcaactatggagccaacaagcccgatgggaccctcaaggtccaggccgatttcgaggctgaattccgtactgcgaagaacctcgagaccacttctggtttcaacagtgcccgtctctacaccatgatccagggcaccggcagcaccccgatctccgctattcccgccgccatcgctgaagagaccaccctcttgctgggtctctgggcttctggggggaacatggataatgagattgccgccctcaaggcggctatcaaccagtacggtgacgagttcgccaagcttgtcgtcggtatctctgtcggcagcgaggatctctaccgcaactctgagatcggagtccaggctaatgccggtatcggcatcgagcctgaggagctcgtctcctacatccagcgcgttcgcgaggccatcgccggcaccgccttgagcggcgctccgatcggccacgtcgacacctggaacgcctggaccaacggctctaacgccgctgttgctgaggccgtcgactggctcggctttgacggctacccgttcttccagaacaccatgcaaaactccattgatgacgccaaggctcttttcgacgagtctgttcagaagaccaaggccgttgccggcaacaaggaggtctggatcaccgagaccggttggcccgtcagcggtgactcgcagaacctcgctattgcgtcggtcgagaacgcgaagcagttctgggacgaggtcggctgtcctcttttcgataatgtcaacacctggtggtacatcctccaggacgcgtcgggctcctctgtccctaaccccagcttcggtatcgtcggcaacaccctcagcaccactcctctcttcgacctgagctcgtccgccagctccaagaagaacagcagctccgcctccgcgtcggcttcgggctcgtctgcccagtcaaccggtttcgtctccaccaccaagcctgctgctagcccgtccggctcctctggtctcggccacggcggctccctcggctcctctggctcgttctctggaggccactacgccggtgtcggctcctccagcgtaattgcttctccttccgccactccttccggcagcgctgtccctggctccagctcgggccctggctctagctctggatccgcctcgggctctagctctggctttggctctggcgctgctgccgactcgacctccggcaccagcacctctggtgactcgacttccagcacctctgccacgcctgctgacttcaccggtgctggtagccgtctgtccggctcgatcttcggcgcggctatgctcgtcgctgccctcgcggtcgctctctaaattctctcgactcggctggttctagcaaggcgcatgggataaatagggcatagggtgtatttatataacataccttcgtttctgtatcaattgatttcttttctttttctcttctatattcttgcgctcttgctcaatttcgctcaatctcggtggctaattccgcgagaagaaaactagaatcaaggaaaataaaagaaactttagcttgagtcgttcttctcctcattttcgtattactagggccaatacccgcagatcgacactgtttg

SEQ ID NO: 1603 - DNA, 5822 bp, Emericella nidulans
caacgatctccacggcttgccgttttttcggttcttgcgcaatgataatgattgtcctctaccacttcttagaagtcaacgcgaaagagaacgaagacgccgcgactccagtcaagaactccaaaaatcccacagaatctcgtacaccagatacggcgaccgcggggggctcatcggcgatgagcggtggaaaggatcgataaacttggttcattgacggcttgttttatgtatttatctggaattctatttgtccggggcaattgattgaaagcaaacattcatggaatcgtgtcgattcgacaggggattttgagcgcatggcctagataaccccaacaatcctgtgagttaatgtacagaatgaagcataaaaatgttccgaaaatatttccatctaatataacacctcaacaccatttcttgcgcaaagaagaatgcagggtatagtacaaagcaaagaactattcaagacgctggtcgtacttcatagacatcttcgtcattgctcaccctctgattgcgcaaaggggtagctagctcacagcccccaggatccagcccaacaccgatctgtgttttcagtcgttgtactgccttgaagacctcgtgagctttttccagctgcgaattatttccatggactctattaaacgcgcggatagagttgtactcggcagggaagattagcgtatcctcggttccaggctggtatgattcgggaatggtcaatggcaccgctgagatatcccaatccactatatttcatgaaacggtagaggttaataaatcatgtgtatcaaataggtattcgcttaatgtgcttgaagagcaatcatggtgctttctcaccacttgtaagcacagccggcccgtcgcctagcttccacgcaagagaatcaagatgctctgtcttgacgtgattcatcagctccgcggccggcagtgtccccgtaaatgtgcagcctttccatccacaggtaatctgataggaaacatggatcttgaagatatgctttttgagcagctcaaggttgtgaagctctgactggcagttaccccaacgacacgcaaatacaggatacgacgaagtacgctgtggtggcgcggctgaagctacaacaaccttgggtttgtttgtgcttccaggtggccgtccacgacgttttttttccatcgagttcgcagtatttggtgtctgggaaccccgctggagatcatgcgagcgcagcgactgctgtctctggagctggacctgcggttggacttcctgtttcggttgaggtttatattgaagatctgcctgttgcgaaggtggggaaggcggctggacttgctgcaagtttgactgcggtggattgtgttgcgtttgggctggatactgctgcggagtgaaagtgttgttcacgggcagcgcgacttgcgctgcgggatgtggggcggttgtttggttggtttgcagggggttgctttgagtagaagacttgattttcatctcacgtgacggctcactagggtccactagatcccatcggaacgtagcgaggtcggagttcatttcgacttgagtaaatatgctgcgcagacaatccagatgatgatttaagtgggcctccgtgggatgacgaccagcagcgatgaggatatcccgggcaatcgtcttggggttataggcggttttctgtgcggcgtctgcctcattcaaggggctcactatgtccgttctgcttctcaaaaacgtcctgtctgcaaggtcgtcggcttggaatgtgtaagctgcgaattttccacgagtaccaagaggctgagaatgaggttcttgtgctatatccggtaagggctgggatataggttgtgttggttgagtagacgtggcctcttgattatatggattctgggctaagtgctgctgtgctgatgttgtggcagtcttcactgttagagaaggtccgggttgtgaagtattttgagaaggaaactggggggtagcttgtgctgcgtgtagcgagactcgttgtgcagtagacttgacgataggctttgatgcttgtttggggttccgctgagctgcagcccgagaaatctgtggaatatttgtaagggttcgaggtagtagttccggtaaacgggtatatggcggcttaggctgagtgtccgacaatgcgactatttgtagaagagcaggattttgatctggcgaagagtgttgcgaaacagaccgcgagactggttgagggtgttgttgtgcggtatactgcgtggttgaaggcgcgacagtggtgggaagaacctggaatgcggtttgcggcgaggcacatggtgaattgcgccacgaaagctgctgcgcgatggttcgaggcctagtgcttgatagagctagtggcgccgctttcgagtgttcctgcagtgcgtattgggagacgcgttgtttggcgatcgctggagactcagaactttgcgattgcgcttgtgtcgtaggtctcgtttcacccggcgcaagatattgagagcctggccgctggactagttgtgacatgcgctgcatagcaggttgagtagtagactctgaagtaagagggttatgagtctggggcgtattgtaatctgtgccagaatgggtatttcgtacggcgggctgtgttcgaacttgcgagtaagccggcgacgccacttctagtgaagtctgagaaggagcttgtatgattaaaggtgcctcaactctctgccttttagcattggggccggaataggcatcgttggcggcgttcgcagcttccgattccgaatgcgattgcggcattgtgttcagcagctggcgaccagttccacgcttcggagagggctgtgaaagtgaagtagtgggcaattcggagttctcagcgtaaggtgtctgtctttgatattctcgaggtggtgacggcccccacctgtatgaagggtacgacagaacgtcctctagctgtacgtatggctccgtctgctggtcagatgggtagtgatgagactgggtattttcattgctgttcggtaatgtttgtaggttcgaatttgagaaattatagaacgggcttctccaattgcagttcgaattcttctcgacgcgaggggcagtttgccccgatttatattgtgcatagttgtgtggccagtcaatccatgtaagatgcttgtcagccatattgcgagggacgctcattcatagaggtagcaaacgacgccgaggggagctgggcgttgcgaatgcggagtgaggggttagcaaatctgcgcataacgacaagctgatatcagttgcaagggcagattaggattcctgccgcgcgattccgacctttgcaaaggtcctgtcacttgcatttcccttgcggaccgcgagtgggcgctatttctagacctgcggcgctgcgcagataccgtcgacgcgactccatgatcttttctggccatctgggcacgccgttagtcagcctcgccgaaaagtagcatactgctagatagagaaggcggtcaactaagagagcgtagccaattaaattgcagccgccagccctagccttagcgggacgtcatgtgacgcacattccactgcccacattttcggctaacatcgagcccagtcgagtgaaaaaagaagtccttcgacgacaacgacgacaacaccacgaccctttctccagagtccggtcagatatcaaaaggaggctctgcaaaaatggccgtcacaaaccagggtatgtcttacggaaattccgtcggctcgttttgttttccacgcttctgatcgcctctgattgagttgggattgttcttcgaagacggcaatggcgattagaccacccttccacgccaacaaagctacgggatgaatgctgatgttttttcttcgaatagcaatctcctcctcgcgccggaagtcgcgcaaggcgcacttcaacgccccctccagcgtgcgccgtgttatcatgagcgcgcctctgtccaaggaactccgtgagaagcacaatgtacgatccgtcctttccatccatcaagtcattctacaacgatcttccccatgcgcatcttgggcggttgagaaaagggtggactgaagattgatttgaggaattgggaacaatggcaagaggaccagagctgacggatatcaacctaacaggtccgctccatccccatccgcaaggacgacgaggttaccatcgtccgcggcaccaacaagggccgtgagggcaagatcaccagcgtctaccgtctgaagtggtgcgtccacgtcgagcgtgttgtccgcgagaagtccaacggccagagcgttcccctccccatccacccttccaaggtcgtcatcaccaagctcaagctcgacaaggaccgtgagcagattctggagcgcatcagcaagggtcgtgaggccgtcaaggccaagtccgcgtaaggaactggaactgggacttgcattttgtgtttctatggatgaatggcgtgggagtacaatgagatcctgctgaatctgatcttatcttgattctcttaaatgagcaacatcaaaaaagaaatatacctgctacgaccagaccaaggccaggcttctatcgcacatcattatgaatgacaacgaacgattcaaagatgtcaaaggaagagtttcccctttctcgcgatcgcagactcgcccggacgcagcagcaatcgcaacctcttctgattcatcaagccatctatacagcccattgatttcttcccttccccttcaccaaccccccaaactcgccaaattatctcctcatcattcccctaccatgattgatgaggtatacggttggcgtagaaggaattgcagattctggatttccagagataacctctgcctcgcttgcagacccgcaccgagctactcactatagcaaggacgctgcgggtttgagagtgagatacatactcctgtaaactgtaaaattggatgtagttgccagtgacacaattgcacatatatggccatgcaatacaaatattcttgttttatacagtccctgcttcggtacaaggccctacatttgacttgtgagcaaatttaaacaagataattaagaatactgtcatgcgcattatggtaaatcggtcatcgagcgcccgcaagtcagcagtagatacagaatgatataacgtgtccttgaatcatcatcatcataaaaattgtcaggaagacatgagaagagaagccgtaagcttaagaaaccaagccgccatctgcccaaacgcacacactagaaggctggccgaaatcaccaccaaataagtatactagtatatcatgggcagttccttacttcgaacctagatcattattagccaacacaccttccccaagccggtaagccacaccctattccaacaaatagaaggatgaggaacacaaccactcctcctaaagcaccataagcttctcatttttccccacatcttcttctgacctagactctcatctaaataatgtgactctcctaacgaacctttattaatataaacattctttccccccttatgctcttatatttctttaataatgtattaccttacaatccttttactctgctaaaataattgcgcttctttatattgctgaaatctattttataacttttatcctttgtattggtaaatagttgggggatttctatatattcttttatatattcattaactcatctttcttattctgcattcttataactactaacttcacacctcgtcttcttatttcaccaaattctttatttctattcctatatactacttcgtaactcatatttcgtttatgcatttacatt

SEQ ID NO: 1604 - DNA, 5875 bp, Emericella nidulans
ccgagtgtcttcgtcctcagcaacatcttccctaaatcccaatggcaggttggcatttgctccgccactcatggagaatagcaggttccctgtccgcgtctcgacgcggtccacataatatttaccttgcagagttgtctatcttcgttagctaagcgaccaaaagggcaaaggagcataccgatgaatcaaccaagattttagttggcgacgatttgatggtcgtcttggttgacgtctctatccaacattcactgctttgggcgctggcattagcgctaacaagtcggattttgatcgagtcaacatcgatacgttttcctagaaggaaccgtagatgtagttgtagctggaagccgtcccgatctttgtaatgaaggataccaggcttgacatctagctctccaaaaaaatccgtcaaaggagcggagacctccttttgcagctcaccggccgcccggaacagctcctccacatactcagagagcagctcctgctctgaaaagattgaagaagcatctagcgtcttctgccgagtcgataatctggattgggtagcgcagcatattttgccagaagccgcgccatcattcgaacgtactcgtcatttcgacctagctccttaagacaccgcgcgtacacctccaacataactccctctagaatagtccaagacttattgccgtaaaacggagcaacctgatggcaatacgaagcagccgcaccgtagtcgctctgccggaagcgcagaacggccatatcagccaacgctgtatgcgttgagtttatgcggtttgccgcgatatggtgacgatacatttgatcagtaagctcttcatagtaggcacggaatgcctttcgagacttcagtgcctccttcaattgcgacaagtcgatcccttttaaagtgttgacgggctggagctctttcgttggctttgagtcttcgtcgtccagagcaatttcggccatattcccagattcagagctctcgtcaaaaagaaggccgagatcagtccaggtttccttccacccgcatcggccggcgatttcttcaagaaatcttcgggccaacaaaaacagttcaccccttccagaagctagctgctccgagcccgtcttaggagtgagcttcggcccttcatatcccacttgctcatgaactgaagaaagggcattggagggtagcatttcagatttcacgggacgggactggcgattattaggcatgacaagggagctcgtacgcttgggaacaccctgcttttgttcaggaccatccacagcgtgtaaagctgactctggcaatgtcaatgccggggtaaatgtctgtactagaatctgcgacgcagcagcataggcccatgacgaaaccaaattgtttatgacctccgactttgcggcgtgctccacctccgcaaggccaccttctagatcagatcggagtgtccgtgcagcaaggctgataaattcggtcgctcgctcgcagacttcagccagaagcatcaggtcttcgggtttcttttttcctgttcctgatttctgattggtatccgcatcgtcactgacgattgatggcgctcttgacgccctgagaaggagggtcaattgtcgagagaaaacgtaggtgcggaaatcgaagatcgagatattgctggaaagaatctcctctctatatggcttcctattgggatcaagtgggaagtccgccgggtcaatgtcggaaatcggagccacctcatcaccgtcgtcagggctttgcacattcgcttgggcatccaaggcagccttcgcccgttcccgccagtccttgctgtatgttagaaaggcactgccatgctgctcactggagccggcgagctgttcttggattgcagcatcgagtccaacagccagctcatcatacccaaccagtgcatcctcaaacagtccgacattctcaaagcccctagcaagaccctccttcagtataaaaaaggtgcagaaattccagcccggcaagctgcgctgagagtccttctccttaatatcttcctcgtactgggcaactcgaagatcaaatgacgccagaatcccattcttcaccttctcaacgaagtcttcaatctgatcagccaactccggagacttctgtgtattacccggcttcggaaggcgtaactgcgccacacgatcgatcgctgttttcgaagtcccgttgaaatcggccttcaccttttccaggacggtcgtggtcgtgcgaccccatttcgacgtcgctaccttctcagtcccatcaccatcctggacaacatgtaagataagccactcgaatgcgtcgtgtttctcctggctggtggcagcggtactagacgtcgaagatgagccatggctcttaatccactctcgcaacgctttcctagctgagttcttatacgtgtcgttatcgtcgcaccggaggatgtagatcttcaagtaaggcgtctgccgcagtccaggaatctgatgacgccggtgggtaaccgtgcctcccggcgcgtcgctagatggcttacgctcatcggtctcggttttggctggtgtgaacccgatacggagggactcgattgatcggacggggcgagtgggagacttccagtgtaggtttcgcagaggtagcttgtgggcgatgatcggctggacggaggaaaagagacccgatggatcagtatactcaactagagcaatggaaaacacgaacaagtgagcaataacgcgcggactggatgtctggggagaggataataccggtgacactgtttgaagcggcctggggtagagagtccataattcccgcgcactattcagggggaagctgtctgcgcgcgaggagcattccggtcggcagtcgggttacaatagcctctactcctacgagcaataatggaatggtgagaggtagaggcaatcgacgacatccgtaacggcggttgtctttcgtggtctcggtagatgaccgcctctccgcagtccgcactcgactcttggcgcgggcccagtgatactccagctatcccgtctatactacgtattgccccaaggggtatctacaacaaggcaacgtccgtgaattcctagttagtcattgacattataaagtaacggctcgcatttccatcgagttccttaatcgagcagctctgtatcatctaaaacgagctatcggtgccgtcaaaaaaaaaaaaagaaatctttccacgaaacacagtacgagagtaaaaaataacaagtagaatagtcatatcccatcattatgcgcaagtatcccgacaaaagagaaatagagtcccagtgtgtctcccaatcacgcaaaacgccccagctgaaagaacttcaatgaaacatgggtagtcaaagtaaaatagtctaggcgccaatatccaagacgcgttgtgtagagcggttcttaaggaaatcatatgcatcagaaaatccctgtgatatgccagggatgtagcttcgagcccatgcgaaaatcaccaataatagaagaggaatctagatcaatgttagcaatcccgccatacaaattagtattaaagcacttacccagatgaagtacaggttcctgtcactagccaaacccttcattcgtcgggcttgttgttctctaagatgcttctgttgttcccgggatatgacattccgaccgatacggatgtctttgatatcctcattcttctgttcactagtggttctcgaagaaccagcttgcgcttcaaagtgttgatccaaagccgcctctgctgctgcctgcaccatgctggtcttctttgctcgcgtcgcttcttcttcgtcttcgccctctttacgcggatacaactcgtcatacgaaggtagctccgttgcacccggtgaggaattaccggtcagcatatcccaccagccctctttcgccccgcgtgaggaggtaggtctatgcggaacaaggttcgtgatgcggcgcattgcgtgatagtctggcagagcgggcattggcggtagagcgggaagattagggaaggcattagcaacgctctgttggaactgattgatttgcgcctggagctgattgcgccaggcaacaagtgcggccggcggtgagaaggcacgtgcatcgccatccgatgtggcctgttcagccgtctgaagtgccacagagacatcatggtggacacttgatcggcgagaaatggtgagaaccggctcgtcatcatcctctatatcctcagaatcgtcgacagcgtaatcgaaagaacctgaagccgaggaggactcccagaaagaatggagaaatgcgaagctgctatgcctgcgacgcgacgccaacgagccaacactgcgcgaacggtagtggcgcgcgggtatcaaagctgcttggtgagcaggtagtgtgctggcaagatcggccggagtgaaacccctgatgctgcgtgcattggggctagacccagcaagtcggagtctgtggacgatatgcgcgtggccatttagggctgcaaggtgcatcgctgtgtttccgacattatcctgcacatctggatccgcacctcgagcgagaagtccagcaacgaaacgcgtaagacccagcgaagacgcgaagtggagcagagtttgaccggtggcacagcgcatgttatacctcggcgggcgagggttatcgtcgaggtcgataaactccaagaaagttagcattctcgagtccatgtcaccaagctttccttgagactccaatccgggaacttgacgctgagttccactggagccttggaagtctttttggaggttaaaggcccccttataatcgctacccatgatctgttgagcggtttggaaagcatctgcttggttccctaacttgtgaccgagtatccccagcgccagtcggtacatctgtaattcacggtcgtccacataacggaaatattgctgttgcttgggaagcaatggttgagattgagattgtagctgattaaagcttggatgttcatgtttgaacagaacgaccacctggccaggttgaagggcaggtggggtaaggcagttgaggcatttgtcgccccagaatgtagtcgtagttgcgagagtatcaccaaacactacctccatgccaggatagaagccactgcctaatagcgttacctctgttcctccggtaactgaaccctccgctggaaccaatttatggatcaccgtaggcaaccggtttccagcgttagtgatgccaggccatatttgtgtagacggtgacgggccgattgcaatattcagattctggtcttggaagctgttcctgccggacgcactcggggtgccaggacgactcggttgggctgagtttggcgcagacatcaattgttgctgaatgaagttgtccaaattctgctgctgtatagacgtcaagaatggattgctgtctccacttgtcggcgtgagcggaccattgcccaaatggttcgacatggcagcgggcgtcacaaacggtctctcgctgggggatgcgaacccacgaggagcggggaactgaggctcattactagaagctctcgcagaagattggcccggctcgagtttggtcatggtcagttccgatgggagtctactggaattgctgtgttttcgtcgtttactcatcggcccttggaagtcgtttggagacgcctgtcgagataggctccgagaagcttgcgaactagatgacggcccagcagtcgtcgaatccatgaaaggactaggactaggttggtactgcgagttaagtctttgttgaagtcctgcagatctgtcgccgaagggacccagtcgactgcttagtagaggcgggcgatttactgcatcgagggcaggaccggatggaaatacccgactcctggaagtt

SEQ ID NO: 1605 - DNA, 4464 bp, Emericella nidulans
acacagtgaatccaccaccagctgcgtgactgtttacgagcgcactctgctttgcggtcttttgtttcagaccatatatggatggtcatacgatggaatcaccacgacagcgaactcggcatgcgagaaaacgggtcctcggtagtataggagatagtccactccgaattttacaccggagcgtacaacccatcctagagagcggaaatggtggtacacaacgtaagagacaaggaatgggtcgtcggttttcaagtccatcgatagatcccggggaggcgaatatgaatggtgacaaagcgttctaagtaaagaagtaggggagagcacggtcttgaggtcatggtcaaagatgtgcaaagcgcctaatccgtatacgaggaaaaatgcttcctcgttggaaagttggaggtgttcttcatttgttatggccagttccccagaagggtcacgcagattgatgactgtgcggtctgcggtgtccccttcaacggtagcaaatcgaacgtttttgctagcagcctccctatctcgttctgccaattgccgtgcctcgaggaacttggattctctcgccttttttacagaaaacttttctgtagttatggcagcgcatttcgtgacgccggaaacggataacagatcggcctgagcgtccagaagtgtacgaccttctcttgcagcagcttccgcttgaagtcgttgttcgatgattagcttttccgaccttgctcgctgtagtttcagttcacgtcgctcggcccttcgctggcgagtaacctcttcactggtgacgccgccgagcagtcctctccgcgttttctcttgttccagccaggttggctcacttctacttagacttccctttccaaagaaacccatttcccacaaagctcggacggtcttctcgtcggtaacatgaaccgacgacgtatttaagtcgaaataggcagaatggacatgatcgtgaggaggggcaataaagtaggtgaggtaagagagtagtacactgataacagaaagtgggttgtgcaggattagaggaggaagagggtgaacaggaagagggagagggaaacggtgaatgtgcctatagtctggcctttggcgtctcggtggccgaggctttgcaggaacagcttgatccggggcagagggagcgatattagatggttgggaagtcattgtgaaaaactattcaattgaactctcagtatctactacggaatgaataatcagcaaggcatttcttcattacagcgaacatctcgtgcctcagaaagaagtgatgcgatatatgttcctcagataccgttgtagtctgaataaaagcaatcatcgacagcagcgaagaaatcaaggttgctactgccttagctttaaatggcgtcatcaccggaacaatcgcaaacaccccttctgagtgccagagattctagaatgaggcttaccagaaaagctgtgtttctggggtatcaagcccgacgggatagccagcaccgcggagggggacaggagatttgattgggctagcgatgagtaacatgcactacatcaagtgtcatgttgaagtattgggatgtttaagcttaatcaacctcatccatttacttctgtcatcgacatcgtcctcaagttcttcgttggggtgcggaagtaaaaaaaattaaaccatcagcgactcagcgcggttaaaaagggctatggtgatgactcagcccaactaaatggtccgtgcaccgctcaatcttccaaaaatttcctgcaccgcgtcaagtcttgtctagcagagctacagattgcgcagttcaattttgagtttacttcaagacctatccgtcaagtgagcctccctaattgatactaattatctctgtcacaaacggctaacaatgtttataggatgcatcttatggtatgtacctaaaccccgtccttcagaccgccggcattatacccttcgactgcttttgcgtgcgggctcgatgcttttttcgtgcaagtactaagacctcaatcagtatactttggaccaggatggaaagcgggtttataccctgaagaaggtcactcccaccggggaggtcacaaagagcgctcaccccgctcgcttttctccggacgacaagtattctcggtaagctcccgactcagcaagaactcgattgtacttgtgtttctcagaaggtgctaacagttatttaaaaaaagtcaccgtgttacgctgaagaagagatatggccttctgcttacccagcaggctggtatgttgattagtcccttttaatgcctaaagcaaaggctgactagtatctttagacaaagaggctgcgcagctatagagccggagaagtcaatatgacggagtaatataaaaagggggtttctgcttcatttgctggcgaatggtgttcaatacggatcaagatgatacgagattttcggattttccaataccaatcacttcgttcaaggcagcttcactcatcgtatacgtaaacagacattgtcattgcttctggctatatagtctatgagtcattcacatcataaatataaccctaattatacccggagactatcataacttttgtgcaccaaactccgttccacataatgcatttaaagggaagaagagtatcaccgcttcctggagttgacatgcctaccggctccaaccctaatacgaccggtctgcttgtttcgttccccagtgaggatgcccggaaggtaatcttcatccatcaggtctcgttcccgacgaagcttccgactttgttccgcggtggcccggacatactccttttgatcttcggcgaaaatcagctctgtgccccagccgcctttaccaccaccacccttccacttcccgctggcgctgccatggacaggcttaggaacgctaaacacatttcctctgttgttccactgcatgtttttcttcaaatgcatcttgaactgcccgctagaatcggttgtgcaggatacacgcgtgagagtatctccgccacatcgtgggcagaactgtttgttcatatccttagtcgtagaaaagcaggcatggcagcgtttgatgaaagacttcaagtgtgaaattctttgcagtgtagctgtggataagaggttaaggttcatttgtagcagcacgttttgacactgagattgttagttacgtctccagcctaagagctgggttagggctgaaactaaccgcaaaatcggttgtcattgtagcaacttgcattaccttgacctcagaagcggcggtcgcgtcgccaacttcgtcgcgggcttgtcgcttcttcaggtttgacggggtaatccactcgccgccatctgactcagaggctgctccgtcttccacctctccggcctcatcttcatcttgagaatcttgaacggccaaatcagccgcctgattatcttctgctgcttcgggttccgcccccctcggatgctcagtgttagactcgtcctccttggtctcaagtgtcgtggcctttaggtcttcagtgacctccttcactgcggggtcttcagcaatctcgtccgttgtcgcagtaccttcgggttgctgtcccccttgctgttcgaccggcttcacaggaggtttgccgttcactcgcttctgtccgggcacgctacgcagtcgccaatctccaccgttcctttcgcactcaagctcatatgctagagccaagacctcgatatcggtcctgctcagcacggccctgtcgccggtttttttcgcgaactcgctcagcacagcgaaacttttgggagacggggtgcgttgtttgaggaacggtaggtacatcgtttcaagtcgctggcgcgcatcgggatcacggatttcagcgacaacagagggcgtggtaacgagttcttcgcatcttgacagtaaggtagaaagcggggggttattcttaaggatgggaccggcgtcaaggacgatcgtgtgaaccgattttgtggtggtattttctaccattttgaatagtttgacgtttagaaaagaccagatacctcaatctagattcaacgcagcgtgaggactctggtgttgcggggcgtgaagtttgcggtggtagtgggtttgaaattgttggaatttttagtggcccgtgcggtgccttttatcttatcggaactctacaggagcagtgcgcagagtagactcacagtatactaggctctccagctatgaatcacaactcctcaaccgtgttacttattgtctattcagacgttgaccattttctcaaacatatagcttgtgaattcagcttgactaaccagcacaggtttcagtaaatttcgatttgctctaccctaatcatgcggctgacaatatatactgtacccaaccgtcatgctcaagggcaaccttttcatacagttatcctattctactctgctcggactgtggctagcccttatacatggtttcttctaagcatgacg

SEQ ID NO: 1606 - DNA, 2337 bp, Emericella nidulans
aaaaaaaggcaattctatcccacctttaattgtttgcttctcttaagaacaacatgtttttactacctcgccccttcctggatctttcccctggtccatgattgttctaaaattaaagctctgcggattattaaaattggcccctaggggtcactttccttggtcttaaagccaactcacttgacaatcgcatcggtaatcccacatcttcctatattgaacttgtttgcgctagaggaatttttataaatttctctgcttctctgagttctcaacgctgtttccgtagatgccctctctgaagtatccaatgattttaagcggataactgaatattgtagtgcaaacatgtagaccagaaatggtgcattctaatgagctcagccgtgtaccctgccagtaacagacatcgagacagagcaagcatacgctgccgcacatattacggtgactaacgcgattatgcagattggctgttggaatgttagcccagaacagccgcaaacaatggattctccgttagtcggtgactgcgggaagagccggggcccgcagccatacgagctctttcttattggatactccatcattatatggctccaccaagaaaactttctgacgtccaacggaaggctttaagggattgggttcatagccagtctcctcgtccaacacagaaggcctgtatagcatggtttcaagctcgttataatcaccgcttgagccagtctactgtctctgattccttagtcaacaatatcaataccctgactctggatgcaatccatcctcagcaactcgcaagggaatcggccagtggcaagaccttgaagctatcctttatgaatggcatcatatacttgattggaaggggtcatatattactggtgatatccttgttgagaaagcacgtcaaatctggagttgtctgcctcagtatcgtgatcagcccccacctgcattcagtagtggctggctacatcaattcaaacaacgctataatatcaagcagcggacataccacggagaagctggctcagtactagaagaggctgaggaaaagatgaaggcaatgcgtacgtttgctggccagtataatgaggatgatatttacaatatggatgaaactgggcttttctggcgtatgcctccttcatggagtctatcgtctgttaatacgccaggaatcaggaaagataagagtcggatatctataatatgttgtgtcaatgcctctggaactgatcgactaccaatctgggtaattggaaaggaacgtacgccacgagctcttcgcaatatcaatatctcagcaattgggattcgatggcaatggaacaaaaatgcctggatggaccagattatcatgcgagaatggctccttgaattctatcaatatattggccagcgatctatccttcttacaatggacaacctccctgcacatctttctggcctggagctggcaccaccgcctcccaatgtacgcatctgctggctcccaaagaattcaacaagccggttccagcctcttgatcagggaatcatccagaatctgaagatatattatcggagacagtggctacgatatatgctttctcactatgaaaggaacctggacccgctgcaatctgtaacaattctagattgcatacgatggcttgtacgggcctggcatcatgatgtccaaagctcaactatcctagcctgcttttataagagcatactggtccaggatcctatccagcttccaattgaagcgcctgatctaaggccactttatatgcaggtacagcaatctggtaggatatcagattgtatggatatctccttcttcctcaaccctgcagaagagtctctagagattagtaactctagtaatgagatatcctcagatatattacttgagcaactaattgctgaggcttctggaaatgcagatatatatcctaatgatctggatgatgtttcgggcgagccggcccgtcttccaaagcctcaggatgctcttgatgctgtacgacttctaatctcttatatggagggtcaggatacggccaaaacacccattcttagatcccttgagcggttagaacgaaatatagagggtgaaatcatcacagcaagagctcaggcaccttagatagttggcttagtattgctagataataatacaaacttcatcttggtgataacctcgtttaggcgatgttttttgctgggatgacttgtatcgacttaacagggccgcactgtatattattcgagtaaagatataaagactaaagtgtaatgaagaaatcttcccgaaaggcaacatgaaacacacatgataat

SEQ ID NO: 1607 - DNA, 4032 bp, Emericella nidulans
ttttccggcgcttccccacagcgtccaaggggtcctattccgaattctgcagacacccagcctttctctacccctcgccatctacctgctcatcgtgccctgccattccgtcccaatccacattattaccaccctcgccgtgcagccaccataagggaaccggagacacaccgcaggtctttcgatccttttgaacctcagcctggattgagacgacgagccactgaacgccactctcttcgtgggccatacaggggccgtatgggtccccgccatcgagcatcatttcaccacttctcacagctcgctacagagcagacaccgaatctgagcgcccccgaggaagggacagaagtgcaggaatacacgagatcgtccagggaagaacataaccagcgtgctatagatgaatgcgtttctactttagttgatatgggttttggaggtgaagaaggaggcggtcgccagagattggagatatatgcagccgcaactaaaggcgatcttgttgaggcaattgagatgattgaggaagaacgcaaggcttatgagcagcgtgaatagtctgtcttgatgtttttttgattacttccaaccatcccctatcctttggtgttggcgtattgggtgaaatgattgattcaagtgtgacagtctgaacatacactcctcacaaatgaactgctatacacgcatattgctttttaaaattccctgcagtacaagagctcctggtctatgaccatatacataatcattaaaacccaggcattgacctctcttccaattttatatcgcatctcttcgatgtcgaaatagtgcagtattatcgataagaatgatcggttatcgataagcttggttggactggaattacggagtatctgaatctttcccgtgactcaacctgaacaacaccgttggcgtcgatccttgtaggataaactgttttcctcgacagaaatgcagacatggcggcggaccttcgtcacgtcgcttcccaagctaaatcataggcctccagccgcgacaagcccgacgcttctccgatgcaaccaggtcctccaaagcagccgtcaagagacctgcagtcttgaagaccaggaaatcaggctacacggcttcgttcgctcagttcgcaagcagaagcgcttcgcgtttgcggaaatttccgatgggaccgctgtcgaaggcatacaggcgatattgaaacctgcgcaggcagcagagtatgtcatctgctattttccccagatttcttgggagtctctctaatcgattcagcgtagactatcgaccggaacagcgattgagatatcaggtatatggaaggcgtgcccgcctggcaaggaacagagccatgagctgcaggcgacctcggtgaacattgtgggcgcagcagagccggaggtcgctcaacccattatcaatgatgaacttggctgtattgactgacacaccggcctcacagacctatcctatccagaaaaagtaccacagtccggaattccttcgtcacatcccccacctccgctttcgaacacccttgaacgccctcctcgcccgcttccgatccgaatgcctataccaacttggtaatgttttccgcggcgctccaaacggcggctttgtacaagtccacccgccggtcataacgtcttccgattgcgagggcgcgggcgagaccttcgcggtcattccgcgcgagacactgataaagggtctcccaaaggaggagcacgaccacttcttccgggcgcctaagtatcttaacgtatcgtcgcaactccatctagaagcctacgcagcggaactggggaacgtctggacgttgtcgcccatgttcagggctgagaagagcgataccccgcgccatcttagcgaattttacatgctcgaagccgaggtcaattttctgtctgaccttgacgcgctgaccgacacagttgagtatcttctgcgtgacctcacgcgccgactctatgatacgccagcggcacaggagattctctccatcaagcgtgacaagggcccggaaacccaggattcaggggaacagatcgaccttcatcagcgatgggccgacctgatgtccggttccaaatggcgctgcataacctactccgacgccattgcggccctccaggaggctgtatcccaaggaaaggcagcgtttgagttttcacctacctggaccggcggcctccagctcgaacacgagcagtacattgtcaacactcttaacaacggccagcctatcttcgtcacagactacccgaaagtcatcaagccgttctacatggcgccctcgcacactcagtccaaccccaaagcggaaggggaaacagtcgcctgcttcgatcttctcctccctgaagtgagcgaagtcgccggcggctcgctaagagaacaccgtctgcccgaactgatccagaacatgcgcgagcacaacctcatcaagacctcgccctccaactcagaggaggaagcgaatcagggggaagcgccatacccccatcttctcccgggggaagatctgagtcatttacagtggtacgcggatctgcggagatgggggtccgcaccgcacggcgggtttggactgggctttgatcggttcttgggctatttgactggtgtgcagagtatacgggacacggttgcgttcccgcggtactttggacgcgcagattgttaggcaacgttgggcttccggttgtactatatagtgtatatttgtaaggtgaatgtaggatacgaatcaacttgagattatgtatacattaggattgtggtagtcttcaagtaatgtagtggaaaacaaagcctttccgggtcatattgttgtcaaactcacaagaggtgcgtccatattccagtataaataaccttccctcaacctgcttatagcgaggttgtatcccaatttgctctggaacggtcccctcagatccctgggaagtaaggagggatcttgagttgagcaccagcaaattcaacgctcttaaacgacccgaagcacccgctacattaggtagcctaaaatcaacatacacgaaaggtagcaggatattgacgaagccatgtatatacaccagtttcactagcacatcctgtagacgggctatattgtctacgcatgattagacaggaaaggatactagtgctaaccagatccttatagcccgagagacggatgtcctctcattctcgccgtctgcgcattccctctcaagcccttgacaattccttcaagatacctctatctccttctattcacaattcccgtatttcccgcgtaacccgcttgatgccctcatagagagtatgccagtccatcgtattgtgcggtggtattgtccacgccgaagggttcaatatttgcacttgcacgtcgaccctgtttcttccgggaatcgagtcgtattcgcggtgctcctcaatatcctgttgtgacagtgctgcctagaattaaagcggctcggagctacagactccccacgcccaaggcatatctttttatagtatacgttgtcgaactcaatagatattcaaaggacgacgagacgaggcgtagattgtggatcgcttgatggtagttaggtaagaattgcaccgacgtctaggggaacgattatgaagggctcttctgtcgtatcctttatggagggcgaagtgcttctcaggggtcaggggtagagttgatttgctgatggcattggccgccccgtaagtaagctcatgcagcctcgtaacgaagaacggctttataacagtatatctagtgtcattgcccgtttctcgttgaagtcgtcctccttatctacgccctctctcatcaaaatcatgtagatttccggcatcgagccaatccactagacgaccaacaacgacgcgcccaactcgaggcttgcagttctgtaccaggcgccccaccaggaatgaagacgagcgacgtctcgtatttactgaagttgagttgttggctgccggggctttgaacattccaaacaccatgtctggctggcgaga

SEQ ID NO: 1608 - DNA, 3933 bp, Emericella nidulans
ttcgatgattctacaagaaacaaagatgtagtggtctacttgatcttataagaagggagtatgcctgcatccattggcatgaatcatgatgacgttatggcgatgtccgcggtcaaggcgacggtggggcaacataggagtaacgtacgtggattactgcaagtcaaaggaatgttcaatatcaaattcccatgggaacagtgctaagtactccgtagcactgcaacccagcctcctcagggtcatcatgttccactcaggtggataggaagctggtggctatacgtcatgcggcacaactgaacctgacagcgccctgactatcatgaccttgatactttcaaacaaactcctaccagcagctgagtatccgatgagtctccagccacatgggttatggcccagatggctttgccccgcgcgcgattgctgctatcggatgtattttgacataatccttccgtctactctggttgtgctgagtagcacgcattgtgggaaacaatatcgaaactctcagtagttatacgtatgcaaagcacatcgtcaaatgcagcagcactcgtctctatagagcaatagaggacattctccgggtgatcgaatacagaccagcctaagattgttgcgaacgttcagcacgtgagcagataagcacatctatgcagcataccgccttctaatccaatgtggcataattttgatcttccccgctgcacaatttcttgctgtacttgatttgctgaatcttctgctctgaatctcgtgaattgattctctgggaactctgtattctatccacatctgcgaccatgccgagggatccgctgattggtttggttgggaaggttcgtctatcccccaacttcgacaagcacccgctaatcaagctgagggctacagccgtccagtggaaaatcgactacattgaatagcttgacagatgcttcttcgaaagtcggtatgttctattgcgcgcaggatgcagggtaccattggcttccatatactaactgagctttcattggttaggaaacttcccgtgagttctgctaaaaccgtcctccgcataccttctcttcgagacgtctttgcctgcaacagaaaacttacgaggcttacttatacatggtactgatctcagaaccccagatttactactattgatccacaacgagccattggctatctccaaatagactgtgcttgtaaacggtacggtgtggcagataaatgcaagccaaactacggtgcttgtaccgatgggaagcgctcggttcccatcgagcttctggatgttgctggtctagttccaggggcgcatcagggccgtggcttggggaataagttcttggacgatctgcgccaggcagacgcgctaatccacgttgtcgatgttagtggaacaacggacgcagaaggtcggtggcacgaatttctgtatagtcgagtagtttattgacgcactggagtgtaggaaagtctacacgaggatatgatccttctcaagatattgagtggctgaggtcagagatcgtgcggtgggtgctgggaaatttgatgcagaaatggtacggcaccagcctacttatgccacaactgcacaccacgctaatttacttaggggctctatcaagcgcagacatatggccataagtgagtgggcgacatctttgataccattgcgattgattgttgactcaaacatcagaggcaaccgcgatggagacgttacaaaaccaattttccggatatggaagtacaccatcaaccgttgcacgatgtctggaccggttagcgttgaaagaaccactcgaagaatggtcagatgagaccgtagagcaagtcgtgcaagcatttattgacgagaagttcccgacggtattcgccctaaataaaattgatcaccctgatgcagacaaggtgagatttttcttctgctgttatatcattgctaaccgactatttatagaacatcagtaagatcgccaagatgcaggatcctcagagaatcgtcctctgttccgccatatctgaagtttttcttcgaagacttgccaaacaaaactatatcaaatacactgagggcagtgaattcttagatacaagggaagacctcattgcagatggagatccggacgggggaggcctccgggagatggacgaaaagctgaaaacgtatgagacagctgccgcctgcatagagtcttactaacgtcgaatcagtcgcgtggagaacttgaaagatatggtactttatcgctttggctctacaggtgttgtgcaatgtctttcgcgggccgccgaggtcttagggcttgtaccagtcttcccggtacgaaatttacacaccttttcctctgggactggtactgcggcatttcgagattgtgtccttgtaaagaagtgagtaattctatacttcgaggttttcccatctgtctgacatctggaccaggaatagcactgtgggtgatgttgcgcgtaaggtcatgggcgatgtacccatatcttatattgaaggcgttggaggtgtccgcgtgtcagaagatgagattgtggcagttgggaagcatgatgtaagtgtcttcttctctgagtatgctctaatcacttaattaattcgttatacaggtactttcgttcaagcctggtcgataggaagcaagtgcacagtaatagatttattttatcaaatacgcatataccgataacacaacatgggagcagccaggcacacgcgaattgctatagaggcgttgcagaatcatagatgtacacaagaaatgaatcacgtcgccactctaaatatttcatttcaagcgtggatgtcaacctttgaccccgaatcaaactcccttctgtaacgaacagtcagaatcattggccaaaatatcagtactttgcaacacctggcttacctctgctctttcatcattcataccaataaccggctcagtcgccttgggatggtccttcttaactttctctgcattcttggcccctcctcgctctgtcgcagcatcagactcgcctctgttccccacgccaaagttttcttctctatcctgcattgtccggttcgccgctatcgtctccgggtctgtattgtcgttctccttctggacgcggtgggttgtggatttttctgcccctgagcccttccaatcctggaatatgccgctgttatggcgagcttgcacacctgaggaggtaggaatgatagcgggctgtccactccatgacagaatcgagcgtttgccatagaaagagatgcatgaggccgaatgtaggatacgggcggtacgatttacagacatattggtgattattttagataatattgtttgttcctaatttgatagaaaagttttggaaaaaatcaatgcttcagtacaggcggcagcctgtgctctatataccaacgtagactccttcgccccgtgcactggaatccaacaccgtgggttggattcaacgtgacgtcgacatgatgcttgtcacggtaccaaaacggaagaaaagagacagggcttagggttgcgctagctccttatcgataacggagatcaagtatggagagcatggccggcatgtgagggatgaaacctagcatcaacaactgtctgcagttcaacgccggaagatcatttacagccccgccgatagatagttcttcagtaaactgaatgctaaactatctacactattatgaagcgagggtacttgtctatagacgcgctcataccctttgcgcgttttataacgtcgccatcgcggggttactttccggaagctacgagcagaggatgggacagacaagggcgggcggatcgttgcgacagaaagaagcagtctggaatgagaagccgcagaaatgatgttttaatcaggtaccctctgcatgacctttcttgagacgttaagaacggc

SEQ ID NO: 1609 - DNA, 4498 bp, Emericella nidulans
  unsure (1)..(4498): unsure at all n locations
tagccatctgcagggaaaattggacgaacagtcatgtgaggcgccgcctttagggttgagacctgcagttctcataaagcggaaggcgtgccggggagccaggggcctggaggactggctaaccttcccaatgtgggcagtataaagatgacaggcattgggattcgtaactgaagccaggggaaagatgtttggaggcagcgcagaatggtcgtctgatcagaaaaaaagagggaaacgaagagcctggaactgaagcgcaaatagcagcagagggatcgcagttgggcttccccacgcccccaccttctccgtcataaatccttgaattcctgataactgtagaatccagattattccatcgtcgcggtccggagggcgagcagcggatgtagtcccaagcaggaacgttgctagaacacttggagtcgatccctgactgtctggagctggtcggtggactgtgcccactgcctgctactaaagaggcctcttccccctcctctgcccctcctcgagtctctccagccggtttcctcagccttcctttcgatgatctcagctgttgtttgtcagtggttgccagtaagaagcaaagtgcgaacagtaatcaagccttaatcagtcccctcaactcccctcgacttcccacgacttcccacgacttcccgatttattctcttcagccattcttgcttgctgcctgttgtcatcgattgactgcttgatcctcgtcgccacctttgctccccgattcacccagggtgtcgttgaaccaggttgcgggctccccacagtctcccggttcttctctgcctacgtcaccatccgcattgcgttcatcttggcctcttctttacctttctcgccctactcacccctcctctcctctccaacgtcttgtcaaaccccctcctgtcctttccaaaccgtagctcaatttttgccaattcctccctgctcaactctccgctctgttgtaactactgtcgattcgggaacgtaatcgttctacctatcggttttttgtcccacctccacctctccgctcctacttgttcccctcgtcgatttcaccataaatattacagcaaccatgcgcaagaacccttttgacatgtctgagctcgacgccgaaatcgaggccaacgaagagcagcaacaccaagtccgcatccatgcccgccaatcaattgacggcgaacggtcgttgttgcaggatgaggagcgtcggcaagacgacttgaaggatcgtttcattggtgccattgaccagggtactacgagtacgcggttcattattttcgactgcgtgggcaaccccgttgccaaataccaggcggaataccgccaactccacgagcattcagggtatgactctcatggtttcggctcgcctgccactttgtttgctaacgtctctttccctcgcttagatggcacgaacaagatccgtatgagatggtagattccgtctacacgtgtattgaagaggccatgaaaacattcctcgcccttggtcattctaagtcagatattgaagcaatcggtctcactagccaacgtgagacagtcctctgctgggattgggaaactggtgaacctctatgtccctcgattgcttggcccgatacccgaacaaaagcccttgttcgagaattgaaagcacaaaaaggcgccgatgaactgaagaacatttgcggtctgccactatccacatatccttcgtctgtctcattggtctggctactccgcaacaacgaggccgtgaaacaggcgtacgaggaaggacgacttgcttttggcactgtcgattcatggctcatctacaacctgaacggtggtctagagggtcgccaccacgtaacggatgtgaccaatgcctctagaaccatgttgatgaacctcgagacgctcgattatgataaacgacttctggacttctttgggttagaccccaagaagatccggctgcccaagattcttccatcctctgaccctgaggggttcggatatgtacggtcaggccccttagaaggagttccgatcactagcgaccttggagatcagtctgcggcgcttgttggccactgtgcgtttactccgggcatggcgaagaatacctatggtactggatgcttcctcctgtacaacgttggcgagaaaccggttatttcaaagcatggcctgctcggtactgtcggatttcaattaggaaagaaccggaagcccgtgtatgcacttgaaggaagtgtggccgtcgctggtagtggtgtttcattcctcatgaacaatatgggctttttccgagactcacgtaaagtgagtgacttggcggcaatggttccagacaacggagggtgtgtcttcgtcacagccttcagtggtctctttgcgccatactggattgatgacgccaagggaacaatttgttagtatattctcaattatttactggactgtaactgatcagctctagttggaatcacgcaacatacccaacgtggtcacatcgcacgtgcgactatggaggccgcctgcttccaaaccaaagcgattctcgatgccatggagatggacagtgggcactccctctctcagctcgccgtcgacggaggaatgagcaactcggatatctgcatgcaggtgagttgcgaacttaatttcgtactatcagtataaaataagctaacttctttgcccctcagacccaagcagacatcattcaaattcccgtcgaacgaccggccatgcatgagacgacagcgctgggcgcagcaatcgccgccggcttcgccatcgatatctggaaggaatttgatgaacttaaaaacatgaaccgcgccaaccgaacctcattcacccccgcaatctcccgcgaacaaagccagaagatgtataaacagtggacgaaagccgtcgaaatgtctcgcggttgggtggataccaaggagatgggaggtgaggacgactagacgattgtctctcctctttcattccgtgtttctataatgatacaaccagtcgagccggtgaccggacatcttccaataagcccgactgcttttacatcgcctgcgttgtacatctccaagctcgtcctttcaacaaacgatcccaagagccgagttgagccgacatgacacttctcccacttctctgtatattcgcatgattcttacgattgagcgttgtctatttcttctttcctcttatcttttccttttccaccgtttacacttggttcggttagaacatggtttctgggggataagatacttgctttttgcctgccttgattggcagacctgacttcttccggattgatggatttcttctccatccctccgagacatgaattatacattagataggtacataagggataaatataaaactataatctggaacgggtatcttgccgcaaagtagcatcatcgcgagccactgctcgaagcctcaaaaagtcggcttcttgatttcaatatctatagcgcgaaaattatactacgaaatgggtatctttattatacagcaaaaaacaagtctaaagctatgccatagggtggggtttcctgaaccctaccttccaataacatacggcaagcctgaaacgctttccgtccgcgcatcagccagccgaatcacgctcccgccactcaaactcacactcgcactaccggatgcagaaccggaccgggatgccgagcgtagactcaatcccgatcccgcgtccgcgcccgaacccgagccatacgaccggtccgggtgcagcgaacgcgccgaatgcgttgagggagttctggcgccagcgcggggccagtatattgcattttccgataaattgccggctttgaagtcaaccagactctgactccgactgcgactctgacctggaggtggtcttgaagcgggctcgaggttcggatgcccgtccgtatggttgtacgtatggtcattcccatgaacaggacgagaacgagggccagagcgagactggcgctggcgacggtgacgccgacggggcgaatcgatattgatattcacagacccaagtgtgtccgtctcggtcgtctcgccctcttcgtctgacggcccaattaccgactcagtttttgagccaaagagggagtgttcaaatgcgcttgtgttccgcctccaatgccccgagtcaccatcctcgttgtagtcattcatgtccagtacagccggtgatgcgctggtaaacccatgcccttaagactccgangaacaccataagttgcggacctgattgtttgctctttcgggaaccgcacctgtataggccgaactcaatcatacttgcggtgtggttaaagcaattaggggtgttaactgccaggccatgtccggcccgagaagaaatcagtgtgaatgcgtctttctcttccgtggggtattggaagccgaacgctctggcaggaaatttctttaaagggcttgggaaggagataatggtatagtccctttatttttt

SEQ ID NO: 1610 - DNA, 4267 bp, Emericella nidulans
agaagaggattaaagagagagagaatagaggaaaagaaaagagagaagagaaaggaagttaaggaaaagaaagagaagagttgaaaattaagaagcagaaagaaaagtgtatagggaaaagaaaaaaaaaataggaaagttaaaagaaaagaaaataaaaagagaagaggaagaaggaaagaagagtgaagaaggaggagtaaagaaaagataagaagtataggaaagaggataatataagatgagtaaagaagaaaaaaagagaaaagaagacaagaataaagatagaataaatagaaaaagagtgcataagaggaagtattgtaggagtgacggaacggcagaaatcctcatcaagaggtgaaaagcagcatgccttgtgatcctactttggcgaagaggtcatattcacgtcctcataccagcgtctgcggttctggcatactcacacatcaaaaaagtgttccgaacctaagagtcaccccagatccaggtaatcgcggtgtgaaagatcaggtacctggccgagcaaaatctgtgaatggcgcgctcccagagggctcggatacgggctcagtgctgcctaaattctcgaagaccatcagtaggagatttccaaaagccaagctcgtgaccaaggcagatgtcgaagtggcggaagatatgccaactcgtccctccacgggtgtttcgagcaccctgaagtctttcaggaaaagcaggcatggacattgccaacagttaaagcaacaagagccaactagggaagcgctaccgcccgataggagtaaaaaaccaaacacttccaatacaatgacgaagagggaagctatgagggaacaacttttacagtttttcaaatccgatcgagttctcgaggcctgggaaggcgtcaaagagagtgaaaagaaaattggtcaacctcttttcaagaaagatggcctctggagtagattccaggcgaggtcgccgagtgcacattcggaagattttgcaactgatcccctcgatgcacagatgcagctggaatggctggatgaagaaaccaagaacctaaacacgtattcgttaaagcccaggtctgggcctggccccaggtttcatacgatctcggaacacttgggcttttatcagcaaacctcatacaaagagaaactccaacacgacaacgctgatagctctgtggtgtttgaggatgacgagtcgataataacagctcttccggcattcccccttcctcctgtgagcagcttaccgccgttaattcatatcgtcgactcgctaactcatgtgataggtcggccatcgtcttccagagccctatgagtctccactgaatggtaccactgttaagaagcctgtcgcccaaggctgattttgtcgatgctaaaatcaatgaccatggcaacctattaccccagaaccgttgttacaatctgagagcgtcagcagagaatgatacctgtcgataggggttatatagtggacatatatgtagccaccatgactgggctttttcgcaactgttatgctatgatggcggcatgcgcatttcgacaaccagacttataagacttataatataccgttcgcaggacatacacagctgggaagccaggtactatggtcaacagaaaacaaaatgagatagaccaggtcgcatatcgtgcgacggtagaaagtgatttattatcagccctccaacgcaaacgcacgtcacgcgaccctgctccgtcggcgtactgctaatccagggttccagaccccgctgaataaatcctcgcactcgtcctcgtcctggctgtcaaactcgacggcttcatacattgatcttgatgtcccttctgtgggaaagtaccgattggtagattctgtaaaatttgcagcacaggctgggtcccaagcagaggtcttcgtaattttgctcgtctccaaaatgaactttccgactttatatttttgcgattgctcctccgcattgagatatttccagccaaggacgctcccacagaagacacattcaatatcgcttactgtatgggcacctgtgactaggtttctggacacaggactttgaagtaaagtattgggaagcgagtctcctggacaggatggtgtgttgactgtaggtttcgcagacacaagataagcctggccatgccggccagtgaatcctttgctgataatttggttggtcatacaaagctcagcagcacaggtcgagcatcgaatgcaagatatatggccttggaggtacttctttccggatgtgatgtcaatcggtacttcagatgggggattgagagaacctgatctccccgcatcccggtttttggtttgagaaatcggtgggggcagtagaaacttcgggaacatgaggaatcgtcgtcgctgtcaaggctctcatcaaaagctataaagcgggagtaataagtggtaccccaaaataaagactcggcttggtaccaggattgggtcttacgacctgccagaatacagtgagtaaaagaaaagtgaggagctccgaggtcaaccaggggtggatccatcaatatatctccccactatgtatcataacataagtctgtcagtgctggctaagccggccttacgggagaaagtcactcaaattcacctacaacaccaacagaggctgaattttagctttgattcaagcaatagccccgcaacatcatcttcgccagtgattcagaactctacttagtactactgacgtcacaaagtagcgataagggtgtgataagagacaggctccaccggtagatcagtcagacgctcaattactagtcctgaaatcctaatgcacaagtattatataaataaactaaaaagagaagggaaagaaaaaggtaatagaacaaaagaacagagaattatatgaaaccaagctcaagcttctgcgcttaaaaaaagccatctgttgctgagacagttcccgttcctagcaccaaactgttccagagtggtcaaactaaacccacaccatccgaggttccgtacggattccagttcgctaccgtctttcgaacgcggcacgcaagcaattatctgcgagcatccgaaagccgggacgctggccagttcgaacaaggcgatcaaactgcatgtagacgagatcagtaagacgaaacaacactcgttttcgcaagtgctgagatgtcgagaatgaaacataccctgatttcaggccgtggccaacggctgtttccattaagaacacaaacagtgtccgctcaccgtttgtatcagttacgaacccacggtatatggcgtcagtagtatagtccaatacttcgacccacatttgaatccgcgaatgttcgccgtccgcattatttatctgagttaaggacgcatctaccccaagcaactcctgcctggacaacctctcaccaaggaaaatcgcagaaagggcatcgcaaaagagcctctcacactcttccggaatagtatgcgccgcctcccctttttgctccagcgaatgattcactggataactgccccccattgtggaagcgagcgaagtatcgaggggaggacttgcattggcagtcttcgaccctgagggaacctcagggataccactgtactccttaatttgaaacataaaagtaagtaacgctatctcagagaaacaggcatgcgcgattcttaccggccccgttcgtagtgcagtagtggaagccattcagagtcgccaaatccatgctgacgctatagcagctggccaatacagtgctttggggatttttgtcaacaaatcgttgcatgaggttcgaggtactacagtgactatttataaacctagccatgatgttgcctcgagagatgtctgatgcaacaagcggtagactgtcgatgcgtctgaaagtgagattgcgtaaaatcaaagggaatgatatgccagggcgaaaggagtatgctgtaaggaataacaatatagatgaagttgtattagagttccgcgagtcttacgttcgactccgcttttctggcggtcatctgaccaggaccggaaatcaatttttgcctcaggcgcaaaggcagccgacctttccctggaggatcttagaagaaaccaaggttcaaaaaagcgactgaactgacttcgaagcggctgtggaggaaaataatattatttacagttgtaggattacacgtccatacacagagctctactacacaatgcgtcatgccacacagtatacaggaatcacagtcaatggatcacatgtacgaagctagg

SEQ ID NO: 1611 - DNA, 1788 bp, Emericella nidulans
acacccctactgaagaaattcgccaatcctttgataacgattttgcgtctcttctccgagacgtcgagcagcggaaccggcgtggtgcgaacggcgatgcgcagggccagcagtcgtttctcgaactgaacatcggtttcgtgtctggtgttatccctcgcgaccgaattggtgcttttgagcgtattctctggcggacgctccgtggtaacctctacatgaaccaagctgagatcccggaccccatcgtcgacccgaccaccaacgaggagacgcagaagatggttttcgtgatctttgcacatggaaagaacattattgcaaagatcaggaagatctcggagtcccttggtgcttcgctttacagcgtcgatgagaacagcgaactgcgtcgggaccagattcatgaggttaacacgaggttgagtgatgtcaacaatgtcctgcggaacacgaagaacactctcgacgcggagctttctcagatcgctcgctccctggccgcttggatgatcattgtcaagaaggagaaggccgtttacgacaccctcaacaagtgctcgtatgatcaagcgcgaaagactcttatcgcggaagcttggtgtcccacaaactctctgtcgttgattaagtcgactttgcaagatgtcaatgaccgtgctggtcttagtgttccttccatcgttaaccagattcgcacgaacaagacgccgccgacttatgtacggaccaacaaattcaccgaagcgttccagaccattgtcgatgcgtatggtatctccaagtactccgaggtcaaccccggcctgtacactgtcgtcacgttccccttcctcttcgccgtcatgtttggtgatttcggtcacggcttcctaatggctttggctgctgccgccatgatcttctgggaaaggcagctctcaaagacaaagctcgacgaactgacgtatatggctttctacggtcgctacatcatgttaatgatgggtatcttctcgatgtacactggtctcatttacaatgatatcttctccaagtccttcaccgtcttctcgagttcctggaaatggcctgacaatattgaacaaggccagtctgttgaagcgtcactcaagggcagctaccggttccccttcggtctagactggaactggcacgaggccgagaacagtctgctgttcaccaacagtttgaagatgaaaatgagtatcatccttggttgggcgcatatgacctatgctcttatcctgcaatacgtcaatgctcgccatttcaagtccaaagtcgacatcatcggcaacttcatccccggcatcatcttcttccaatccatctttggttaccttgttcttactatcatttacaaatggtccgttgattggccggctagaaaccagtcaccccctggtctcctcaacatgctcatctttatgtttctgtcccctggaaacgtcgaagaggagctctatcctggccaaggcggtgtccagctttgcctattgctccttgccgtcgcacaagtccccattatgctattcttcaagcccttctaccttcgccgcgagcacaatcgtgcccgcgccctcggctaccgtggcctcggcgaacaatcccgcgtcagcgccctggatgaagacggcgacctcgacggcccccgtcaaagcacggcaagtgacggcgaaggcgttgccatgattgcccaggacctcgaagaagagcacgaggagttcgacttctccgaaattatgattcaccaggtcatccacacgatcgagttcttgcctcact

SEQ ID NO: 1612 - DNA, 2891 bp, Emericella nidulans
aacgacggaatatgtctataaggtaacgacaggagtcttaaggcgagggcacaggcagggtagcatccgccctacaccccggctctcgaatcgtcctgaactacatcaggaaattgtggtcattgattgcctttatgtccagaatcaattcactttcatgccgaaaaacttctacaaggaggcaaattggctgggtatactttcgaggcgtcgaaaagacaagccattacagtaaggtctgagagagggtaaagcttctgtcttatagaacattagcataaccagcatgaatagtaagagcctataaaagacatctgaagtaataggccacagatatggccgctcaagaagagaggttgactctcacttacaatgatatcataaatgagcgagctgaaacctcccattcatacaactctatagacaaattccaatgctttaggttcccgagtcttttatgccgttaccccatacccatgacctggaatctaggattggaatctagggtctctagctcatccttacccataccttcgacaaggtgccatattgatctagaccaggtgggagagattaggcatgacgatcacaacactagccacaagttatgcggggcaaagaggaggaagatgcagccaagataggtatacaggctgtatatcccatttaacccagtcagccggcggtcccggtatccccgaggcggctaattataaggcgtcgccgcatttctccaagaataccacattggagcagttggagatcgactggatcaccaagatgccacccctcgcaggattctcagacaacccattgcgttcccgcgccgatctcatccacgcggccatcgctctcgtccagcctctgcacacacacttctctcccaggaacgccttcatccgcctccccgtcgcgacaggtacacatttcgacgagagagcggcgcagctagaaggctatgcgcggccattatgggtgatctccactttgctacgtgcagtgcgtgccgaacccgatcatccagacgcagaggcaatccgcagtgtatgtcggccctggattcaggggatccagaccgggacagatcccgcgcacccggagtactggggcgagatcggcgacggcgaccagcggatggtcgaagcagaggtcatcgccgtcgcggtcctgtttgcgccggaggacttttaccattcgcagcctgcccgtgtccgtgagaacatcgttgcctggctgcgcgggatcaacgggaaggagatgccggtgaataactggcggtggtttcatgttttcgccaacctcgccttaatcattgtgggaggagttccgtacgcagagctgaagggcgcgatggacgacgaccttgccgtccttgactcgttctaccgaggcgaaggctggtctggtgatgggccgtggttgaccggagaacaggaggccgagctggagcaggaatacaagaggacccgacggcgtgataagatcggaccaggccgccaggtggattattactccagcagctacgcaatccagttcagccagctgctgtatgccaagttcgcggcagagctcgacccggctcgctcagaaggataccggcagcaggcgagggagtttgggcgggcattctggaggtatttcgatagggatggtcggtggtcctcctggctgaatccgcacggttggccctgactgacaagtatacaggcgcagccatccccttcggcaggtctctcacgtatcactttgcgtgtgccggcttcttcgcagccctggctgttgccgaagtaccagatatgccggcgccgctggattcaccgggctcagtcaaaggctttctgctacggcatctgagatggtgggcagcgcattcagacgatatcttttatccagacgagacaatgaatatcgactatctttatccgtgcattgcccggctttcatcttagggctggctgggtgtcttgctgacagcataagcaggaacatgtacatggccgaagactacaactcgccccagtccgtctactggtcggtcaagtcgttcattccgcttgccctggtcgacggccactccttctggacctcgtctgaatcagcgtatccggtcttagccgactcggtcaagttgatcccgcaaccaacccagatcctctgcgaccacgcccacggcgcgcaccacttcctcctcagcgcgggccagttcgtcgcctggcccatgaaagcttcgcaggccaagtactgcaaattcgcatactccagctctttcggcttcagcgttccgacaggctcgctgatccagcagatcgtaccggataatgctctcttcttcagtcgcgatgggatcgagacctgggcggggaagtggaagtcttcagaggcgaggttcgggactgcaaatgcagttggggagactgtgcctgttgtgcatgtcaagtggcgaccttgggccgacgggcagcttgtcgtcacaatgagcctgatcccgccaacggcgaggtggccagattggcatacccgcgtccaccggatccaattgaagggagaggcccccttagaaagtcttcatctggttgagggcgggtttgctatcgagcgagttccggctgagaagaaagccttgccggtgctctcggatggtaatatcgagggcgcgagtatcgggaggagtgagggcatctacgtgtcacaatcaagtgctcttgtgctctcgcaggccggcgcaagcggcatcgtctctgcagcagtgcgccggcgacctggtaagtctagctggagctcgtccgaaactgccacgtccgtagagtatgaggccatgaagcccgattccaacacgaatctactctcccagcgcaccttggtaccggtcgcaaagttaggactacttgatg

SEQ ID NO: 1613 - DNA, 2758 bp, Emericella nidulans
ggctgtctgggtttgtttgaaatcctctccgccttaatggtggttgtaaaacccacaaggcaaacaatgtgcgtgtcccctgctggtgttgttccgtcaccgatagcgtagcagagcttgtgaaggggtacgagatacccgtccatgacctcatgtcgcggctcgcaatttctgcgtggactttaacgcattggttgacatggccggtatttgctgcggctgtgcgctgcgtaccaagtggcggagagatggtgactgtgtttagcacgttgagcggtatagtcgagataagacgggccccagcatagcgatggccttcacgagtcgtgaccaccactttggcgccctggtcgtcaatcgactgtatggggctgttgaaggcgtatgacaggtttcctgtcgagagcgcctctctaaagaatcgaagggcaaagctggactgaccccgcttgaacttataagaaatcaaggcgtccagacacccttggtatgagtagccgcacagagcccaccagtgcaggaactcgaagaaactcgttgtcgccaaagtgccgccgctacagagaagcacaaagctctctagagcggctcgctcacgaggtgacacgagaatcggcaatctgagtcatacgatcctttgccgacatttggtcgtattgccgagcctcagggacatggaatgaatcatgagggaaaggaacggcccggcggccaagatctccatcgacgtccacgaacttgtgtagtgctgcggccagcagttcatcctggggatctcgttagcgtcaagctgcccgtacgcgcaagcatactcacctcttccttgtggctcataatcgctggtccttggttggtccgcagttcaaaatggttgaccccgcgagaaaagtcgaatgaactctccaattcattccgcatctggtatcttgaaatctcgcgccaaacatgaggctgtccccagtggacccaggtgccgcccatttcgaatggatatcctccgatatcagacgaccatgaccggccaccaatacggtcacgcgcttcgagaagcagcaccttgaggcctaggatatattagccctctgctttcatttgtcttgaatccgcactcacctgcgagacacgtatcgcgggccgctgtgagccccgaataccctgctcctacgacaacgacgtcatactggcgggactcgggagagatattcgttggtggcgagatgacactgatcgaaggcacgccctggaccaggccagtctctgctgtccattgataaccgtcacgactagtcatggcgagggaatcatatacactcagatcgagatagatggttgtctaattccaccctgcgaagcgttggattccatagttatatatgtcatcccgaattctacaatgctgtaaagcgataatcctttacgcaccgccgcaaagactgcaagaggcggcgcggagggtatgaggggcccacttgctagaacaagcaaaaaaagagagaacttcctggtgataagcgatcaacggtattcccaattctgcgtgcccgaagacaaatatcgcgctgtggatcctcaagctggcatggaggtcgctgttatcttgttgcgtggggctcaaaattacccgattaggagaaaatggtgagaaaattccagacgcgacaatgcgagtctcgaacatgtttggctattctggttatggttatcttcgtcgaaacattaatagaataataataatattatgatcagattagaaacacaaagtgttttcttttaatgggtagcacgtctgggtggaagtagatttatttctggcgattctcaaaaaatatatcttgggcatattacattcacgattgctcctccacagatccgcgaatataaggcccatgatattgcttcttggcatatattatccagttaagacaagctacaattgccatcactcccagcaccgcagaagaatagtctgtaaaccagttagcatcacaccgcagtccgcactataggagtagtaactcactcatattgcttcccgtcacaggcatcacagtagggaaattataaaatatcaacaccaagattgcaaaacaaacagtagtgagattggcagcccatccaaccacagctggcagtcgaaacttgcgcgattccggcaaccagtcactcgcccgacgacgatagagaagcagcagagcaggaaacgcataggagatatgttgtagaatcaagcccgtgccaataaaggcattaaatgccgacgaggagccaaggtaaatgcacccaatgataaacacgacgctcgcattgaagacgagtgcccatacggggacgtcgagtctatcctgaatcttgccaatccatttactgccccagagcgcctcatctcgcgccagagaccatgtcaaacgtgaagcggtttcctgggctccgataagggcgaatgtcgctgcaaaacacaagagtaaaacaaatacagtcgctgcggtggatgaccgtgtggcctgataccagatttcgtatattgggacactgcagcgtatacgttagcgtctcgatggctggtagcattgatgagacggccgagtccttacccagtgctagtctccactacggcttgcaaatcatgagtgcagtatagcatagcaatcatgaaggcgaaggaagtcccaaagccaatagtaagcgtactcatcagagcccatgatactgctgttgccgcattacgacagtccaccgccagatgtaatgctccatcaat

SEQ ID NO: 1614 - DNA, 3459 bp, Emericella nidulans
ccgaatgagcagaccgatggggttctatagtccgagcaccggcagggatcgctcttccctacctacttcagattagcaggggcaacaaccttaaccaactttaggccaccgcggccgtacgtatgcggctcaggaccgtaatttgttacagttccgaacagattgaaagcgcgagaacctctacaatatttgggatattttaagattgtcgatcccagagtccgcgttgatccaaaacctctgcccttgctgattcgccccgatcggattactcattctagccaagcacttggcaccctgtctgaaaccctcggaggctaggcttggaccctgatcaacctcgccaggagatttctcaaatgttgctacctgcgtgaacatgcagttgttcgcgcacctgctgcgagtggcaaccgctctcctactaccaattggtgggtgacaagttcttccaacagccctcgccagcctcaatgctaaccttctcaggaaccgtcgcccaggaatgctcaagccgcgagaactatacggctcgcaaccagacagagatcgacacgattacccaaaactgcaccacaatcgtgggcgagcttggtcttgttgactggtctgggccgctaacactacccaatatcacacgcatcaggagtatccgagtctactctggcgacatcactgccattgagctccctgctttaacatacctgggtagtgatctgctcctcacgaacctgccttcgctgcgtagagtatctttgcctgaattacagcatatcgaaggactctacgtagacctcgtgggcaatgcaccggagctgcatattccaagattgactaatgcatcgtccatttatctacgaggcaatttttcagagtccgttggccactgcaagtgacgagccatgcactaacagggatgcagtcaatcgtttcattccttgcgcaatgttgaaaagaaactcgatatttgtaacgccgtcagctgcggatactattcccgtatgaacgcattcacctcaatgcgtctctcattcccgtcccttgagcgtgccggtagcctcatagttggcgggaacgtgtcaaggtacgctctgttctgcgattttggaaataccggctcattctagtatagcctgtcactgcctgaactcaccacccttacctgcaatgattgtgactgggtggcgctgcatctgaagctctacggctcctcacgattaccagtcaacctccccaagctcgctaatacaaacggatctctctatatccgaggggatatcgactcgtttgtcctccccacctgccactatcatccgttttactcgtgaaattgagtcccaaggctaacaggggtttatcccagaatatcccttccctccctgcgagaatacaaccgcgagctcattatgactccctacgagccgctagatataactctacccgtggagcgagcagaggattttttcgttcacgggtaatgtctcgaggtaaggctcgccaatcccggacaggcaaccaggaccggctaactaattgtgaattttttggctgctagcattaagctcccccagtttaacggattttacccgtatatatattaactcagatcttgatttcgactgcgacgcgctctggaaggatctcgaacagacaagcgggccgctgaatgagagtagcaaggaggagtactttcagtgttcggtgggcgtgtcctggcagccaggaggctcgcaggcggccacagctgttgctgcgcttggtcttggttttgttatgggactcttaatatgagtatgcgtttaaagggtaagtaagtattattatcatcatcttggttattgggtagatggaatatatacgggaatatctatgatagaattaaataaccaatgtatagctggttacatacaggcttctagatgtcgtgatgttctttttagtgatatcatggctggcgagcgctctagaaacatatgtctcgtttcacaaattggataaaatgtatggaatggtatgatactagattcatatacagccaaacctcgagagagagctaaatactatatcaatgatcgaaaccaagtattacccatcaagataaacccacacgccagccatgccatgcaaggacaaaacccaaacccgaacccaactccaatttctaataataatcattaacctcctacagccacaaatacagaagctcaaagaacacagctaggcgcatcaataagagttacgtctcatcccaaagcccgaatacgggtagatcctcagccatgtagagaagcccgttatcagataagatcatatcggagagcggcgtgtgaccatcgccgtcgccggtctcagcacctgccctccgggatgctgacgccgaggctccggcaccagccaagggcatacccatggagccgcccggggagaagtttacgggaattcccgttgtggtgagagtagagatagccgaatcgaatgggagtccggcggtggtagtaccacagagcgcgtcccagatgctgctgtcatgtggcgcgagggttgttaaatcaggatgttgcgacgggatgggattatctgcttggggtagcttgttcggggatagaggggacggggctgcgatttcgcctggccggcgggcagagggtatggtatctggtgtgggtgatagttcatctgcactagcgggcccgacttgaccgaagagctgttcgacctgtctgctgcggcgttccatccattgccgactacggcggcccacgtactcggatactgcagcccggagatacctgataatctgaaggaaacggcaagagtgcgggtcatgagggacaaacagttcaaggaatctctcggccttgttcatgccttctccgagcgggaggaggttgtcgtagtcggcgaagaaggcggcgcctagcacgactgctgagttgaagacggagttaattaggaaaggaagacggcgcgggagagcttcgtatcgggcgaggccctctacgatgtcgaggccgcgcagggcagagtagacgcaggcgtcggcgaataatgataggcgggatgtaccgtttctggattcgggggctccggcagagcctttcttgcttttcacatattgtgatacccagaagatgagaaatgggcgggtcaagagaatgatcgaccagtagtacgacccgaagacatgcgctgcagccaagctttcctctagcgttctggattccaatcggtctctttgtaactgtaggaatgtgggaagagtcctgacccaagctcgatgctgattagagatgttctcggcaaggttaatcgagaccacctgtcgcatgtacacttcggtgagaactcgctcgaaaatgcgacagagcgaaatcacagtggtagatacttggtcttggggaagatgtgattcttttcggctaacctcatcctcgcgcaagtcatagtcgaaatccgacg

SEQ ID NO: 1615 - DNA, 3022 bp, Emericella nidulans
atccgtcggatcttatactgatataatgcctgaatttatcagccttaacagccataggcccacatcacaacgcaactcgcaaagcaatgcggactgaaaagtcatctgtgtagctgacatcggccgccaccgccgtatcctccagggagctgaggcagacgtgctcgtagaccagttcgacatgactcgagccatcgacaccacccgcggcgaaacaggaggatgtctgcggtatgtccttgacatggttggacgtgaggctgcaacaatttacaggaagcgctgtgtagcaactctgacagtccgcaggcacatcttctgggttgacgggggagccgaagaaccgacactcgcgtattcactactatggtattctcatcaagttccttcatatctgtgagcctgttgcggagcaacttatgcgatcgctggagcgtttgcttgagagtgaggcgttaataccaccgggcttgatcgtgcgaaaggcacgcctggcgggggtggatgatgcgccgaagatgctaagggatgggtcggcttcgaataggagaattgtcattgattcagatagttccggcgccttgcagacatgaaatttgacaatcaagccccttactcttcctgaaaaggttcataatgttctcgtgctgcgagatcccaatcgtggccattgattgagctcttgcatgggcaatgagctcctcgaggtgatggggcaacgcagtttatgtatcaactctagaagatgagaacaagccaagcacaaagcacagatatagacatgaagtacaatgtttcatgccagttgacccagaaacacgtatgcctttttttgctttgttggtatacataatccagggtcgcggggttctgcagaatctccaggatcttcaggatattcggaatatggtattgggcgatatagaacgtaattatgtgacggagaacttctgtttaggaaaagataattcatgagaaatgaccgaatactgagaccgaagggtggtattgacgacaataaggtgagggactgacttgtttgctatacttctgaaatgcacaaaaaaggataacatgcccgaccaactcatgataaataagaacagacacaaggagatatgataatgagggtaactgataaaaaggaacaaatagaaaaggaaaagtggtatctggacaccgtatagtcgaatgtacggacggaaagaaacgaacacggaagcaaaaggtttaactaaacaagcacctcatcaccagtcaaacacctcacagatcaatcaagctgccgccctgctgcggctgctgctggtgggctccccaggggttattgggctgctgaagatagcccgtctgctgcgggacgaattgctgctgctgttggccgaagaacgggttgttcccggtgtgcgcggcccttaaacggtccagaccttggcctgcagagttgacaaaagtgccaggtgccgtgtgctgcgcagggatacgcagatcgccagtgttgccgaaagtgtcttgcccttcactggtggctaggagtgcgttcaggcgagcagtatgcgggtccatcggcttaggcggcgccagagattggttctgctgagatgactgaggtgcttggtagttggctataggatttgtagaagactggaactggttcgagaattgtttcgtcgctcgttcctctgacagtgtgttgagggatggtgctcccgatgtggcaggccttgaagcttggaactgcggctgaagctgtgtacgggcagcgaacgggttgttggaaccggtcggcataggtttcagactctccggctggttgttgccccatgggttattggagcccggtgtgagcatgctttcctgttgttgcggttgttgatgctgctgctgttgattaaacatatccgttccccatgggttgttggtgctaaacccggtttgctggggttgaagagtagcctgaggttgcaggaagttattctgagcatacgggttctgggtgtaacccgtaggctgtgcctggaaaccgttggtatatccgttcatgccggtggcctgtccctgaaatccggtcgggttcgcatattggttgttcaggtatcctgtcgtcagcggttgctgcgggttgatcggattgccaaaccagtcaactgcactctgctgctggtatccctggttgtagccggtcggttgcggctgggcagcgggtgtgctgtcatcaaacaaagactgggcattgctttcctccaattcacgccggcgcagttcttcctcttccttactgagcttaatcgctttggccaggtcctcgtcatcctcttccccattgctctgcgcctgtgctcgtcgtctgcgctcttcttccgcctcgtgcttgctcgcttcaattgccaagcgatactccgcatcctcatcgtcgcgtcgacggtctcgtcgctctctccgtgggggtggcaatccgtttgcgtggccgccatggtaatcatcaagtccattcacccgggatttccagagcttccggtctgatcgctcactgcgcagccggtcctcgtctaggatcagggcagtaagttctttcgcagcaacgcgaactaacagacaacatattagtcggcggctcgtacggaacaggtggacacatatctactcaccatcctgaccgacatccctgctatcttcgtcgatgtactggaactcgcgcaaggtcttgataatgtacacattcttccgggcccatgtgacgacaagctcagatccctcgtggagacaatagtcaaggaccttcaatgacttcagcacatggcgccaattcttgcccttgtcgttcagtcgcttgtctagcatgtccatgatttcgtagaagtctgtcgggctgtgacgtagtcagcaccaagtagtgttattgcgggtttcggaaaaaagcctacctgccaaacgttagagaggcgatttctgccatctcagttccggtaggacccctaatggtcattactcgtcgctacagaagtcgcaaagagtcagcaat

SEQ ID NO: 1616 - DNA, 4468 bp, Emericella nidulans
tcatcctaaaacgagggctacataccgatatccaggcgtcgaggaatgcaaagatcgtggtaccgcaaagatatagtcatactggtggaggactgccatagatggtgatggtctataggcacaggttagggttcagccagagaaagcccttgacaagcatgatgattgtcgagtcttcacgagaaacatgacaagatggagggatatccggcggagcagttcaatttgacttttaagagacatcattgtctgatgcaaaggcaataagaccgcccagggcagattgcccgataacattgattgccttcctgtcttgtctggacatggtatatccaccatcggcagcgccacgtgcgccaatctggccctagcactggcttgtctcggggctgggccccaagaactagacagagcacacgtgcagaaccaataccaagcactggtttcttgtcgttgactctcaggccaagcagtcaactcagcaaggcatatcatatagtacggcgtcatactattgagaatagaccgtgtcagtcccgcgctacccgccccccagctctcgtgaccaatatgccgagcgaacgctcgaccgcggcgacagtgaccaggacctccgtatatattggactgcagagtacgggatctccagtactaggcccaccgttcgaattaggctggccggctgttctttgctctctcgcgatgcgggagcgcacgggctgaaggattgggtcgactcgtgcgaatagtaatggggatttgatccatctcctgggagtagagtctatattccttagtcttcctatcaagtatttagaacagagagggtatagcggcttgtgttgctattcttggatgtgacttgtcctctgaggaggtttcgcgcagtgccactacggtgagacttgtataaacgatgaggacaagactacagcaagaacgtatggcagagtatatgcgccgatctcccagtatcaggaatcaatcagcaacgtctgcgatgacaggatctcgtttcaggtcatgagcgcacagcagctcctgcaccgtctactgtgcgggcgcgacctgggagttacggatacttactaggaccgtcaattgggtttgcagctaatctatccaataccaggaaatattgcagtaacttctgcacgacacgatcctgaacgggcatcggcgtgcattaagcacggatctactgcggaattagatgcaaagaaaggccactgcatgggttctcacccaagcgcgatgctggtaaccctaaatcgaccgacccgtctggtccatcatcattaattattgctcttgcagtatggagaccaacagctttggagactcgagttcgagttttgtaaaggagcgtaggtaagaaatgagaactatcaacacatacaaggtgaagcggtggcaactctaatagtatatgaacagcacgcttacgctctgacctcgctagtcgtaaacgtcgcctatactgtctgtttctctagcataccgaccgatctgaactcgtcttggacggcactgcgtgtattcgcggttgtatagatgtttgcaagactggtgagccagagccagtctgttgaatctgggcatttaatcactaaaatcgaaagcatgcctccagactggccaggtggacggctaagactagcgaattggaagcgcagtattagcctcctacgaaagacgcagtcaatcggtacccagccggtcctgtgcgaacgcagacgagaatgcaaatggagaagcctctcgatcctctacctagttcaggcttatcctgttgtttaggttatggtcttcggttattgtttaaaccataaatcatgtcgcacctccatcatatcccatctctaaccgctccccctcggcgggcttggttttccaccgcaaacagtcagctaccttgtgttcacgcccttaactgcggcagtccagggtctgcaagtgagactggcattgaacttgattgatcagattcaaacgtccttgatgtggtggaggcagacgctttgcgttccatggacaagatacgactcgacagatttgccagtaagcgagcactccaggctacaacgtggagttagctactcaaatgcagcccaaaagagacaattaaccggcacagccgacgacaaaaggacagcagtagagcaactagctgcgcgagagagaaactgtgaacgagactgagtggacccttgcgatccaaagacggcaatgtcgcatgcgccttctcatggacaaggagcaaaccctttccattgtgaacacagatagacactcagggaatgactgcctaaccattgacccacagtctgagacattccgaggtggttccgccggcaagcactggaagggatattgtgctgcctgccagccctacgcccggtgggtctcctgcttaatatctggtggtatattacttattaaatggtatctcctctgcctgaagagcgatgccgcagtttccgtgcattgtcatgaaactcacctcagttttctctctggctgccgctggcctgagcagcgcaactccactcttcatcgacatcaccccccgagccctcccaaatgcacccgacggatacgctccggtcaatgtcacctgtccggctgtgagaccgtcgatccggagtgcagcaagtctgtcgccaaacgagacgaaatggctagagcctcgtcgcaaggagatcatctcgccaatgaaaaatctcctcactcggttgaatatttctgatttcgatgcggcggcctatcttggccgggtatctgccgactcctccaatatccctaccgtcgggatcacggtctcagggggcggataccgggccatgctgtacggggctggagccctcaaggcctttgatagtcggacagcaaactcgacggccgagagccagctcggcgggcttctccagtcagcgacgtatctctcagctctcagtgcaggcggctggttggtcgggtctgtcttcatcaacaacttcaccactatcgatgcacttcaatccagcgatcggatctgggatctgcggaccaatgtcctcgaagggccgaatgtcaaacactttcagctcctgtctacggcagagtactggagcgacctggtagaagcagttcactcaaggaagcacgccggcttcaacacttccatcaccgactactggggacgggcgctctcgtaccagttcattaacgcgtcagacggcgggcccagctacacttggtcgtccattgcgttgatggataactttaagaacggccaggtcccgctgccccttctcgtagccgacggccggaatccaggggaattggtggtcgggtcgaactcgacagtgtatgagtttagcccgtgggagtttggcacttttgacccggccatctatgcctttgcgccactcgaatatctcggctccgactttacggcgaatggatcctgtgtgaggggattcgataatgccgggttcgttatgggcacctcgtctagcctcttcaatcaggggctactccgcctgaatagcacgtctatccccgagacctttaagaaggcgctcgcgtcgatccttgaagcagttgggcaggcaaacgaagatatcgccagctacccgaatcccttcaagggctatcagggcagcaccgcggccatttcagccatcagcgagctcaacatcgttgacggcggcgaagacggccaaaacatcccctttcacccactcattcagccggccagacaggtagacgtcatcttcgcgatcgactcgacggccaacattcacaactggccgaatgggaagagcctggttcggacgtacgagcgcagcctgaactcgaccggcgttggcaatgggacggtcttcccaacgatcccagacaccaacaccttcataaatctgggcttgaatcagcggccgactttcttcggatgcgatgcgaagaatctgaccggccctgcaccgttgatcgtctaccttcccaatgcaccgtacacgcacatgtcgaatacctccacatttgacctgagctacagctatgccgaccgcgacgccatgatcctaaacgggtacaatgtcgccacacgcggaaacggaacagtggataggcagtggcctgcgtgcgtggggtgcgcgattcttagccggtctgcgaataggacggggacctcgctgcccgatgcttgcacgcagtgctttcagaactactgctggaatggcacaattgatagtcgccagccacaagattatgcgcctgcactcatgatcaagacgagtgcagcggggacgatcaggccttgggggttttcagtgctgctattggctctgttgacttggacgtggtagtgggggagaagatggtcactggcgtgagaaacactctggcagggacaggggaactattggatacaatcaatagatctatatagaaagcggttggtcagctattacgccagaccgtatgc

SEQ ID NO: 1617 - DNA, 2946 bp, Emericella nidulans
  unsure (1)..(2946): unsure at all n locations
agaaatggtaacttcgtctgctgagaatgaagcggagagtcgacgagaaagtacgccaccctcaagcaagccatatttagataatgtgcaagtctcaacgccgtggactgatgaggatggatgggtgtacacaggtcaggtcaacaagtatgaagaagagtatgttattattccgccgaaattcgagtggtatcgccccaacaacacctacggagatgaccgactccccctccctcctgtgcgtctgagatctctggttcaggcagaaaaggaccgcgcaatggggtatcctcccctcataggagaccgcaatatcccaatcactcaagagtatttcctgtatgaaaatgtgcccgaggagaaggccaagctcaagatcaaggaggctgcccgtgaaagggggatttatgtctccaggttcatgaccactgaggagattcagaccatgatcgacaactatgacagtggtaaaccacctgtgccgcttgacccgcctgtcccgcctgttgttggagagccggtaaaagcgaaagaacctacacgcaagcgccgacgtgctgagacatcgacgcctagcaagcagtccgaggtgggttcgcctaggccaaagagacggcgtcaagacacagacgatacaactccctcggaccctagcgcaggagattatcaagaaaagctttcactcagagtcaaattggtatttgagaacaagcagctgctgcgaaagcatgtagccgccaccgaagccaaaaacgctgagcagtcaaagaaacgcccccattccgagatcgaagatattcctacagacacccaatcgccaacagtccagaaacagaaggcatccacacctgtatcagcgcccactacccccgccagaggcacagggcagctcaactctgcccaggtcacacctgagtcaacggagcaaactccagccgaaacgacgcctggcggtcgaccgcgacgtcgtgccgccgatgccttgatggctaactttcagcgtcacgccgaagcccgggccctgcgctctgaacgggccaaaatgggccatgcaaagcgcaagggaaccccactgaaaaccgtaacgggagttcatggggacacagttgagtcgccgatccggccggcggctaatcccattaaggccgatccagtccagcactaggtcagactcaattgcttcctcttttgtcttttcatgtgttagatagccctctagttctagtgggagttatggtggctaccagttcaagcatagcgatgtctgtggtcttactacatatcttagtattatatctatgggaaatttagtctttgtcgagtgcatgttactcggttctgaccaccttcctctcggactcagtcactttagcctattttctcattgtgttttaagtctcattcacgcagacggaatggccagtctcaatactgctccgaattgactgtgcttaccagtcagccttcctcttagagatatcaacgacatttaccggcacttacttacactgatgtttatcggaccacggtttacggctaaaatttaggaagacaatgaatgcacatttcgcagaatagagcaaccgttcgccgtcaagttatgctcgcaccttctcttctgagcgcacattgaattgaccctgacctcaccgcacctccctccagggcggtatatgtatcaaaagtcaggaagtgtaagctttcaagcagttcataagaatggacctatggccatcaaaccttactgttgcacctacctcaggacttggaactatacataccttgcaaggttgctagaaccagagtgctcaaagactgacttacacttgaaactcttagcctttattcaggaggctatacattttcgttagcaagccacgaggacaatggatggatatgtatgcagtccagctagttaaccacaatggatatcacgtgactgcgccgtccccagtgaccacatcggatgtggatcttttccatgttattccattaacttaaccattattccacaccagctatcggggcgaacgtgaacaagcctaaaccaaatcaagccattaccagtccataagtcgtctctttgtatctggaagattgtcgtggaaaacaaaatgttttcaaggacccgaccccaactgagtcaaagacctcgcgtcgtcgtagacccccatctgcacccggagcctcggcgacgaacgccccccattacagatatccggcagacaaatgagtacaaggccgcagcgaggcggtatgtttaatctcttctttcaattcttcacttctgtgtccagttccactgggcttgtgttgggagctgtgctaagagaatgaatgcagctggatctccacgatcgtggcgttgcctatattaatgtacacttcatgggttctatatgagaggagtgagtgtggccctttttctatgtttatatgtggtcagtatttggctaaatgttggtttatagcatatgggaataagcagccgaagaggctacgagaccacgtccagcaggagtgatagtgggagcgagcataggatgctttgtgagcctgatcttgaacttggctgtgtactattgctatcttacggacaaagttaagcatgagcgtggcgttgctgtaggtggagttattgtacatatttcttcatttgttttctaatgtacaatcatggcgaaattggtctcatgctagacctgtaatcaagtccacaacctaggttcacatgacgtctctctttataagaaccagagattcaagaatgaagtcgggtagacggccaacaaggcaagatcctcgcgagcaaatcagccaacaaccctagccgattttncctcacaaagcccatattgactcagagaggacgtgctattgacgctgatatcattcttctctttctctatgtgctgctaaattcgttggcgcacactgtagttcatg

SEQ ID NO: 1618 - DNA, 1054 bp, Emericella nidulans
  unsure (1)..(1054): unsure at all n locations
gaactcgcagttttatgctctgcggatgttgcagttatcattttcggtcataacaaaaagctctatgagttctcttcttgtgatatgcaggatgctctctaccgacataaatttgtttgtcactgcctccatgttttgcttatagacatgatctaacctgtactctgcccagctctgtcctccgcatgaacacaaaggaccagaagactttaacggcaaacgcgacgacgatgacgatgacgaagaagaggccacgcctgcccccgatgagtttcatgcgcccagccagaaccctcctcagatgatggctgtgcctcatcctggcttccaacacgtgaatcacgcaccctctgcctctcctccgatccacaacggcatgccctttgatccgcggcatggtacaccacagccacaaggagcttctaggccgtcatcgaggaatcacctacgtcgcgtgagctcgaatcttgggggtcctccccatcatggaacctcgcctccgccctcgccttcaaacaacttttcctacatgccgaatccctttgtctacaatccaaacgcacctcataacatgagtcagcagccgtcacgtcctcctcaatatgcgcattatgggcaccatccacaggggcctcagcataaaccacctgaccctcagcattatcaaatgccgccacattttgtgcctcccagtcatgacccctaagccatgccattaccccaagccatcacacagattacccagataccacagataccacagatcccgaggcttgaaccccatatatggagtcagccttacacctctaagggtacctatgaaacaatctttccgccaaatcttttgcattaacatagcgataaaggggacatcttttaaaccttagaaaaggttatcctccgcctcggtggtgtcctcttttgggtggtcaacaccttcccttattaaatctaaaaaactgaaattttgtgtgtaatattttcttctaaatctccatatccatacagctctagttagtnnttctttactgcatctccctaaaaaacttttttt

SEQ ID NO: 1619 - DNA, 4115 bp, Emericella nidulans
tctcacaatcctctcgacctccactgctgccaggtattcgatttcgcttgtggagatatatatcaatcgccagcagatgaaggctcgcattgaggagcggcgccaggagattagagctgctcgcgagcaggccctggcggagcacgcagcgacagaagatcaaaccgcaaaccttgatttacccgatgaaaacgacatcaatgagttggagctcgatatcccaggttgggaagaaaagggccgctgggtcttctatctagatctactcaccgacttccttaagctcaccgtttatctgactttcttcgctattctatttacgttttacggtttacccattcatattctccgggatgttgtggttacgattcgctcattcggacggcgaattatggactttgctcgataccgaaacgccacacgtgatatgaacgacagatatcctgacgcgagtgctgaggaggtcgcgagagaagaggtctgtatcatttgccgggaggagatgacccattggcaacccggagacagaccagtttctcgagtttcggaaaggttacgccccaagaaactcccgtgcggccacattttacatttctcttgccttcgaagctggcttgaaagacagcagaattgtcccacatgtagacgaccggtcattgcgcctccacgtaaccaaggacctgctggggtcaatatgggacaaggaaacggtggtgctggtcagcagcagaatatgcctcccggaaatcagccagtcaaccaaaaccccccagcagatggccttcctagggctcgaatttaccaattcggtccatttaggatcggatttggcgcgggaagaggggatctcttcaacaatctgcatcaacagattcatcagggcaacggtccttggcagccaggtatgaatcctaaccctgctggcgccagacaaattggctttgggttcggcttcggacggcctccgctgcaacaagcgcctgcaccggctgcaccagctgcaacccagccggtcccgacgcccacttcgaacctgcccaacctgcaaaaccaactcctgcagatggagcaacaaattgcgaacgagatcaatggcctgcgcatcgctgcggatcagctgaacctcgttagattactgcagacagagctccaacgccttcgtactttgcaatcgcaaccattaaacaaccagactaacattccgcaaaatccctctccatcaataccttcaatatcccctacaactacacgccctcgaattgtctctaacccggaaacggcgcctatgggagctggtgaccctcgtctaccagatggactgacacttccccaaggctggaccctggttcccctccactctgtacaaccaggactgagcgcatcctcgaatgttgccgcaaatgcttcttcatcggaggctgaacatagtgctccaccatctgaagggatgctcaactcccaggtacccactgacactgagagtcagagaccgagtgataggagcgatgccgccacctccgggagttcaggtttaccaaactggcagtcaagccccttctcgcactcagctgcagacagcaccggagctatttcccaacagtcagagaacctcagttcggaggctggactgagggcgcctctggctccctcgaagactgagcaagttgagactccactttccgagcacggcgcagagactaggattgaaacccagacttcggattcaagatccaaagggaaggagcgggtagccacggtagaagacgcagcggacgatgagacatgacaattgactattaatttgcatatttcctaccttttgcttcctgttactcgttctatccccagatccgagacctatcttcggacgcttgactgtacatagaggtgatcctgatataccacggcatagcgcgactaccagggaagaattcttgcttaataataccaaaattgatggagcagatcgttctttcactgcggagtaatagtaatctgtgcggcatggccgggcgtggtacaaagaatgtggccgcatgtcttacgtagaccctgctcaagcccctgttcaagccttcttcagtgcaaccctcgtcatttatcaatccaatcagttggcggatccgattagaccgtccgagtatcagggggaagcatctgccatgaaccttggaatccaatcatcttgcgatcgctgcatgacgatcgtcttcggcttggagactgagtcaagactcgatggcctgattccgcgtccagtgttcagtgaatcaagatcaaattggccgtgctgttaaccgtgtaatgctacagtttatcggtaacaacctttacactgtcatcgagctcgggacattttgttctcttctattttggtgcaagcttgcaggctgaagcatcgcctccccgcttccttcgttgccgaccgtttcagagtaattgcgtaaccacctaaattgagagtggacactcttactaggtacagcaggctgaacactgacaattgttagtaacgttgctgttctctcccatggagattttgtctcctcctttaaccactctgcctaaagacagctacagcttcatatgcttctgtctgttcgcaggggttaacaatgcgattctaatgcatgcctctcgctccgtttaacttgctggtacgtagtcggcccccggccccatcgcaaaacttcccctaccacacaatcgttctgtcagcgcgcattggtttccataatggtcttactctgcgccttagatgaccgtcaaaggtcatcagctccctatataatggactgctaacggtgctcatctgctgacatttcgcttgcagtacatttttatctttgaattgttcagcattcagtctactctatggcgacaacgcgccgcttcgttcctcttctcggctgcggcttcttctttttctgcttatgggggctatttagtctgtccagatcatggacgcagatgaaagtgtcgcaagccgtcggcttaggcgaactcgtttctacgccgtcaccaactccgtccgggtactggaatgtcactgaaggaccaaagcaaccgttcgcgccgcgtccccaatatgtcgctgggattgccagaccagatggacatgagtacacgaagacgttagtgatacctcggacaacctacgaagatacctcgtggacggagtttgaaatccccggctgggaaaccgctgtatacgtcgttgacgacccatccgcgcctctgcatccgccgaagaataaagggcatgaggtcatggtctatttgagttacatcattgagcactacgatgaacttccagaaataattgctttcatgcactcgcatcaatttggatggcacaacgacgaccttcttgacgggaacgcggcaaccattttacaacgtttgcgaccagagcgggtcatcagggaaggctatatgaacttgcgctgtggctggggtcctggctgtcccgattggctgcaccccggtactctggaggaggatgaatccaagcaggaagaaatactacttgccagatcctggggcgagatctttcccgatgaccctatcccggacgtgctggcgcagccgtgctgtgctcagttcgccgtctcgcgcgaacgagtgcacgctattccccgggcgcgctttgtcttctatcgagattgggttcttcgcacagaactgagcgattacatctctggtcgtatttgggaatatctttggcatgttatttttacaggtcagaatgtggtctgcccgaaagagcatgtgtgcttttgcgatggatatggaatctgttttggtggcgaggacgaatataacgcctaccgaaacatggactccgaacgcgaagcttgggaagatgagcttaaacgttggcgcagtcgagcggctgtgatcgagtctgctcggcgtcgcggtactcttggagagaaaagtcacctatctgttccggaaccggggcgagacattgaactcgaggaactcatcgcgcgacatggtgagctgaaagaggagctgttgctcaacgctaccatacgcggacaggatgccaaggcgcgagcccttgaggtggggatttggtgaatgcttttggctgcgtattttaatat

SEQ ID NO: 1620 - DNA, 3493 bp, Emericella nidulans
ttggtagaccgccactggccgggtttggcttgctaagcatgcagtgacaggtcatttttttgctgtcaagattgtctcaaagaaatgcgctgctatatcgcaaagcgatagcattgctgccatggacagaaatgcagggacttttattggagcaggaggtagacagatgccttcggggatcgaaagggaggttgtgataatgaagctcatcgaacatccaaatgttatcagtttgtatgacgtgtgggagaaccgaggcgagttgtaggtgtttgtgggcccgttgccatcaaatacagctgacgataaatagatatcttgtcttggaatacgtcgaagggggggagttattcgactacgtctccaatcatggaccactcccagaagaagaggcagttcggctctttcgacagatcatagccggcctagggtactgtcatcgctttaacatttgccatcgggacctgaaaccggaaaatatcttgctagatggtgagcacaacattaagcttgctgatttcggcatggctgctcttcaacctgcaggccattggctcaatacttcctgtggaagcccgcattatgcggctccggaaatcatctacggccgcaagtatcggggcgacaaggcagacctctggagctgtgggattatcctattcgcattgctcactggtttccttccatttgacggagaggatctacacgccactctacaacttgttcgaaaaggtgactatatgattccaccccatgtcagcgctgaggcagcagacctcattcagcgtatattacaaaagaaaccggacgatcgtatcagcatgaaggacatctggaaacacccgcttctcaaaaagtacgaaaaatttcaccaggctatatgcaaccattatttgggccctccacctcctctgtcaccccaggattgtggtccgcctgtggtaagacaggatatagatgtcgacctgctgaggaatctccaaacactttggcatgatgtaaaacccgaacgtctcattgaaaagctaataagtctggagtaagtgtccgtcctaatgtttttcgaatgcttttctgacaaacttcagaccaacgcaagagcggctgttctaccatgctttagtcaagttcaggaacgagcaactcgagaactacgaaggccagcctctcaggtattcaacgagtgactaccaccatatctcaagaggtcaggctcggctatctaagcacttgcggagccgatcacaaaacggatcacaaaggcgttctcgagccccgtcagtcaaagaaacgggcaaacgtaggccctctacgagagaactaaagccatcagctagcgttgaaacttacgatccttatcggtctccattcaatcgagtaccagataaatcaccacagtacgcccacgttaccattcaccgagaggctccagaaacgagccctaagccggccgaggtggaagtagactcgtcaaatccttttctcgacgatgagcaagaaatagaatgccaacaaagcccaccctttaccttggtgcggaagagaaagcagaattttaactcggttaagtcattccagtcaaaaacgtcgcttatcagttcacgtagagcattgaattctgcatccacgcctcggtctgtcagctacaaacggaatgtgaccttccatcataacagaaaccgctcacaaagctctgcatctgccaaggcaaaaagagcccactgcaatcgacagccaagcgaagccagcctcatatcaggctttgatgacgacccattctcagattcacgaagcagttctttgctaccggctcaaccagcggtcgtacgtggcgctgggattgctgtcaagaacagtgtgcagcggagggtgcagcactctgacttcgtatggcgagatgaagcacgcaaagtctctcacgaactcagccaaatttgtgaggaagctttcaacggtagctccctatccactgggtgtacagataccacttgcgtgagtccagagactccagcgacatctgtctcattggctagtcctggagtctcgaatcaccaaatggatagtagcagttcaacggtgtgcctggcagctaccccgccagcggactcgccaaagacctcccatgttcgcagagagcttgaagaaactcgccgcaggcttatcgagcactcaatgaaggatggttccaaggaaattcctcaatgccttgctccggtaatagatcaccttgaccggttgattgaacaagaaaagacgcgacggcctgggaaagttagtactaaggaagactacagctcgatgagtgacctattctgcggatctccggtggaacccacccagctgtcagtgttatccgaggagctaaacactgggcgcaggtctgatgatacgccatcctccaagaaagacagacaggtttcaggctcgactgctgcaagcagccaaatcagtcgtggaaaacgctccattcggatggtgcctcatagctcctaccagtcaatcagcaacactgagccgcgagcagtccacagaccagcggccgctcttattgacaggcctgaaaacgataggggcaacgcattagcctcgcgagttggctccaaccatagacacaaccgaaccccttgcgagttagatccaattgacgagcatccagcgtcacctcgacgcagtgccgttcgatctacagatcacaagaagtggtcctggtttagaaaatcccagaacatcgaagaggattttgtgaaggcccccacagtagttaagcctttacacccgagctcggcaacagtcatcgtccatgaagtacatcctgcgcgaaataccgcagaaaaccaaccaaagctcgggaagccgccatcagactcgcaaaaggtctccttttggagcttcataaagaggaaaaaaggcaagaatgcgggtacgtaacaacatccaccgttagcctacatcatttgtctaaactaatcgtaaccctattaccagacccagaatcaacagccacaaaccctgtgcttgaaagtcgccgagatgacgaacgacagcgggcgcatccagggccaaagctgtcagaaaataaaactgctacaaagcctcgtcggtccatacgttccagcggcataagcaataactggttcgcgcgtgtgtttcaattcaagcctgcaacccgggttgttgccctcaacgcttctaaaataaaaggccgcaaggaaatctacaagatgctccgtgactggaagcagtatggtatggaggatatctaccttgataagcccaacagcatcatatacggccgggttggagagtcaaactgtacgtctaattttcttcccctttattctcctccgtcattggagcgaatcaactttactccccaggcataacaccagaccaagcccataatctgtccaactaacaatcacctcgtcttgtagttctccacctacgccctgtcgatttctccgcagacttctacaccgtcattgaagacggc

SEQ ID NO: 1621 - DNA, 8966 bp, Emericella nidulans
  unsure (1)..(8966): unsure at all n locations
tgactgcatccgtggggacagcaagaagcatctgataagattacctcgagtactggtagacaagactcttgataagcccttgcgcggggcgggaggaattttcttatgttcaacgaacttggtccagggctccaataattacaatagcccaccatcttcatacctatcctcgaattattcccgaagatcaaagatgaagctacttacagccaatttcttgacgtgtgcggtcaaagcctgcaagggatcacctgcggcattccccctccatttccgtgacgtcgaactcgagctccaagaagttgatttccaaccagaatttattcgcaatatcataccccgcgtcgattgggaggcgctgcatagaatgggcactgaagtatgcagcaccattgtcactattgtactctatcttcaagtgttgccagagagctgactcttgtaccccgatcagctcaatttcccaaatattccagaaaccaagcctgaaggtgcagcgcttgaaaacgaacagcttcttagagaccttcatcggctgctgctggagacacaggttgccgagggcaagcttatatgtggtaattgtggccatgagtacatggtcaaagagggaatcgccaatttcctgcttcccagtcatctaggttcgagagtttgttcttttttcttaagccggcgctcactgatgtctcctctctttgaatttagtatgattgctcctccgtcttgccagcctgcccagtatttgaacagccacctctatgcaacgatttacgagttacagagaattgagtcagaaactttacacacgtggctggataattagcctcactacgtctggtaaaccatgcaaggtctatccgaatccttgattatctctggtggaaaatgaagcgggagatctcatatgatacagcacttgcaagttatacataatccgtgtcacaccattgtctcagggtggaagataaggagaaccaattgcaaccaacaattgcagactcatccggaacgcctcaatgtaacatgcacaacgctgccccgggcctatacctttgccgtgaaacaagcctataaaaaggccccatgtcgttagaataaaaatcaatgataaacgttcgaacgaaaggagtgtgctcgctgtttcttgagtcaagaaatctaattcagaaagcctttacatccggccgagccgcaaaggcatggtattctgtcatcgctgtcccattccctctcgaatttgtagtcgtaagttaattcttcatctgcagtagggtcagcatgttaccatccaaatcagcaaatctcatttaaaggactgacccctttcgatatccctcaatgcataaataactattcgtttgcttccatcaaccttgatgatcttcgctgtgcagtttggtgtgcagctgtggttgataaatctagcaataccgcctctctttgtggcatcaatgactgtgttctcatcaattcgaaagagatagctactgccaatgccgctctttaggtatcgtcgctccctcatatcggcaacctgctgccgtaccttctcccccacatattcgatgatcatttcgtttgcagatatattgacttcagcatagagcccccaattatgaatagctgatcgtgcaaaacgcacaggctttttccgttttttcaattggttaaatcgaagaacatcgctatcgccaccctgcgatggtagagcttgcttttgagcattgatgtcagcaatcagtctgcggttattcacccttgtcgaacgagatgttgactttgatattgtctttgctgctgcgattcgagccgcctcggcagctgcattctgtggatcgctcttggccttcgcctcgcgttcctcgcgagccttctggaccttaatgcgatggggtagatattttgatttttccgattcgagaatcctctttctgccttcggttcgagcagctcctgtaatattaggaacataataaccttcgatgcttgcagcctggcgcgttggccctacatcgccggggcgattgagagccttgatttccttctgtctccatgcccaagctgataggtttccaatcacagacatcggctgcttttccaggatattgcgaaggaactgtaaatcttcctcgtccttcacgacgtcttgccatccgtcaagatccatgacaacagaatcatcatcgtccacaatcggccgtggctcatcatttgatactctccattcaacctcgtgccgggccgcctcgccatattcggccccctcgaccatattttccgctgattgtctaacttgaacatgatggngttttgatgccacggctcttctgggnncgtggttttttatgtcttcaactagttcttcaagcaataccttgtttgtggtcaaggcgtgatgactcgtcagccgagtcagataatccctgagaaacggtgcccttgtgaactccatccaaaacctgaggaatgtcatccgtccgagttccctcgcccacagcagagaaatcatcagattccttttgtttcttgcggaggctgggactttcactggttcttttcctcttccgcgacggagagtagtcttgtactgcagcctccaagtcgcctatctcggaatgtcggtcttcattatcgagcctttctgttgaattatccaatgcttcggctgcatcttcatccgcatcctcagattcggtttctgagccaattcgactgggaggacgactgtcctgatcatcggtgtctcgggaaagtggagtatgctgctcttcatcagagtcttctgcatcatgtagctgctgtaatcgatggtaaagtggtcggacatttcttctccgtagcggttgcttgcgcctctcgtctaagaaagcgacgtccgtacggtcgaggcgatgagctttcctaatccttggaagggcagagagtatattcagaccagatacgcctgaagggtgccgtttattcaagaattttgcatgtgggtcgggtgtactatcacggctgtcaaaatcaaggcggaacataggacgtttaatgccttcaggatcaggtatccccagttgtttcctccttgatgcatgccgttctgggtcgagataatcatacagagcgggggcagcaatgcgtgacttaacgtcttcgagcagtttgtcccttagatcctttattacgatcgccaaaacttcagtgcagggatccaaatccagggctcgctgtttcttttcttcttcaatgtccaactctgcctctttcttcaatcgttcagtttccgctttttgccgttgttcttgcttcatgcgctcgggactggggctgcgctcgtaatgcggattgccgtacggttggctttccatattcatgatatacgtgaataaaagtttcatatggcagaacttgtaacagcgttcagtttcctcttcaccgcgccgagagttctcaaatatgatatagtatccggttctgtcgcatcgaatatctttccagttgaacgcctttaatcgcttttttaagtgcggcagagtcgagcttagaacaggtacataacaatgtgcgatgaagatatagggatcacgctttatctggtttagtatgggagtttcttcaatcaatgatggtattgccggtttctgaaagcttgccctaggtccttcagggatgacagccgaaggcggcatgaaggatcttccagagggcccttttggagctgtcgggggtggttcatttttggtcacctgtgcctctgatttaggctcacccaccacgggcatatcaatcttcgaatcaattctttgagctgcaatagccctcgaagctagtttttccgaagtctgcccatcgcgatcatactcaaccttgatgcgattgttgccaatacgctgcccctttttgcattcatgaaatgcattcttcgctgccaacgacgcggaaacaggaccgctaccgtgaaacgatgcgctgtccttatatttgacggagcatatgcccaggaatctgcccgtgtcgggatccgttcggttattgatctctgctatctcgccaaaactcgaaaagagcgtacttatcggtgcgagaggcgtcaatgggtcgaaaccggtaacaacaatttgcacgggaggccccggtcctaccgtgctggcagggtcgtagggccagtgccttaggacgtacggagcgggtcggtacttcgtcttctgtcggcatccagcaccgcgagtataattttgtatgctcaatcgagggtcggacaaacgtccttcttgttcatcactaacaatatccacgtagcaaggcctctttcgtttatccttggacggggctctatcagggtcatgtaccaacttgctgcccttgacgattgcaacacgctgactcagtgaatgcgttgttggtgttggcggcgtatgaagcggtgtcatggtgctgtttgagacatttgctcttgcttgtctaaacccatcaggttcatctccgttcggcgccttcgcttgagacgggctcggattgttctgcggggatgactccgtgtttgtgagcggcgtaagagtatccaggcgggtatcattcgatgaacctgttccgggtcccgatgtgttgttcgccggagtgttcgcctctccatggctcgcggaaccgtcttccgcgacttccttgcgcgacttgttcaggtctgaccggagttcttgtccaagattctgagggctattgccgttgacagtttccccagaggtccgggatccggtgacaatctgttcctcgtcggcatgctccctgctgagatgaggtctcgaccgctgtcgttctcgagtggcttgatatcgtttctgctggatgaccgatggggcggtgggaaagaagtctgcgaagcctgcggaagagcgcgacataatgagatatggctacaagccagaaccggtattactgccaccagttggcagcatccttgatagccccgtcaggtaatgcgtggatatcaaccaagaacgccctcttgatgcagagcagcagaatacgacgggttgggtttgagatgtaaccacggacgaagatagcgtgggttcagtatagtttggctactgagagtatggcgcgctctgaacggtacaagagcagatattgagaagtgggattgaggcgaatttgggagcgacagctcgcatccgttccggaccctaagaacacgaccgagacgcgatgaggctgttcacgaaatgagaagcggcgggggaggggagtctgtatgattaccgtgtagctgactgaaattcacctgaaaaaagtgtagcatatgatatcatgagatatctcactccaaagggttggttttcatgacaaggagaaattaagcagtttgaaaatgggagggaaaggaaaagctaggcggtcgacggggacgacttgttcatttccgcttccttggtgccctcatccaacaccggatttacgcaggacagatcctcctttgagaacgatcaagattttgaacaaaatcactcgcccggtttgcgttttgttccagtcatatcctacgacttcgttccaagaaaataccataaagatccccgcgatatcttacctcttacgccctgccctgtcttgctcatggctatccagatgccaacccattcttcacacgcgcttacaaaatgtttccctgcacttaatttcggtatcctctcgcgacaatctcacattattgatgactagtactatgggcatttctgttagacttgggtgcctcgatcgaccaactagctgcgacggctggcttttgatgggctggccgcgtgagcgagctcaatgtctcgagaatcgtatgcaggtgttcccatatgagtaccaatgcgctcgcagctcgcatgatatttctcctaacccaatcaatatgctgtcgttttaaagtgatagatcggctggcatgtcggtctccagactaggttaaaggattcatgtgcggcttgtagagaaactttggttatgcgatgatctggctaggacaaggtgggtgagtagagacattccgaccttttggaaacaatgcctcccgctcaacctgactatggcaaaaccccattcaaccgcaaattagttactcttccccgccagctcttccagtaactatgatctagtagcctctagcagccacatcccctgggcagttataggttctgaaaactgggagactaaacttggtgcagggaatgatatacaagcgtagaaggaaagatcaactccgcctgctcgatagtgtaagaattagaccttgccgtcgtggtcctaaatgaacaaggttctcgtctagttggatcgaatatgtgcgaaaatgaaagtatgcaaacaaaattggttgggagacaagtcctgatagctatcacatatcgaaactgaggtgaaaggtgccttcgagagtggtactaatataatcatatcataatatgctagtagtctcagcactaggattgcacatcattgcagaggctgattctgtatctgtattcagtagcgttagctcttgcctaatcatgaaaatagctaattgtagtgaggagattggaaattgttactttggacatgaattagactttcgctacacagcccagagccgagtgacaagagcacctttcacgtaattgtacctgaggctgtgtcctgtgacagtgaagataatacagcacctgtgcctttcgcccataaggctcctaaaagagccctattttttttttcggattgatcttatagcatctttccagaaaactcaatctacttgcaaggtatcatagagcaaaattagtagtctaagaattatactctatggtcattcagggcgtatcattatgatcataccgctgcttgtgcatcagcgtatcgctatcagctatattagtggagtagtctagacttcattgagttagtatgatattctgcaggtggttactaatatcatccatagtttggcccataattaaaaatagtaccttaaaggagcaaggagcatctccgactcgacatccagtaaagtttagcctcaagcatcgtgatagtaacagaactaggtctgtatttgcctccctcatagccaggggcgcagggtatgctgctaaccccgtcacgtctcagctacagggataccagcattccgtgcctcggtgggtagccgctctttctgcacctgacagacaaaccatttatgctgtatctatcttggttatcttatagagcctgagtctgaacgagcttgatcactgcctttaaggccggagggattccttaccctggaaattgtcttaaatagcgaattcagtaagaggaagcggcgttttcctgaaatctcagctaagataagggcagtttcctatccccacgcagtctgggccgaacaagcgactcgtaaagtcctccaggctcaatgcgagttcagtgccgtaaattaattaacgggtgacttgaagtatatcttcgtattcttttgtcggcaagaatgtgtgcataatgcatgtaccactggcggaaccatccgtaacttttcttgaaaaaaggggccaggaatgatcgagaaagcgaactagaaacgggtggggagttaataggtttttgggcgtgttattcttagaaactgtagccgttccagcgacagctagctaccagagctgaagtacatagagcgccgagacaaatcctcgagggccgagaatatctaccgagtgtccccattttcagctcagtgaccagtcgttactttacaacaagtcagcgacaacccactttacgggttcttatagtactacatactaggtattgtataacacccacgagcaaaagccagaatccgccttgctgtttgtggctaaaccaagccctgggcaacaaagtgagacattgccgtcgggttgtttgaggcgcagaggtttattggccactagtagggagtaaaagacggtgtcccatagcagtttccctggattggaagccaaggtgggccgatctcacaacataaaaccttcataacaacagcttccccctccttcctcagccctctggtattcttaattcattatcgctcttactccgtgcctcataactccttcctttccctcgaaaatccgccatatctttcgttaattgattcaccctgcttctaccagtatggcaccactgcaatcattcctcgatgtttcccctcactaacatttggccgttccttggttacagctcagtggcctacgtttcctgatatttgcggtccgaaacacatagaacgcagccctcccatattacttgtttctctcttttcaccttctattggattccgcagccatgtggtcagtcggccaggtatcatgttgattgctggtccaatgtccgactaatatcatctagtggtatcttcggctacatcaactacctcgtcgagagagaccgtaaatatattctcgacactttgctcaatggtatgaacttttttctatagaattcccggccaaattctcaatttcggactacgtgtctttggaccgtcggtccttattgccatacgctatttccttatcccgtggtattgccattactcacatctatttcttccaggcctctcacgtctcgaatatcgaggatatgactctgcaggtctcgcagttgatggtgacaagaagaatgaagtctgtgcctttaaagaagttgggaaggttgccaagttgaaacaactcatcgaggaatccaaacctgatcttaccaagacatttgagtcccatgctggtatctctcacacacgttgggctacgcacggaacgccctcccgtcttaactgccacccacacaggtatggcattggttccgatccatacagcgccctgctacacgttgatttgtttatcacagtacgccagcatggaaatggctaacgagaattgatttcacagatccgaccccaactgggagttctctgtagttcacaatggaattattacaaa

SEQ ID NO: 1622 - DNA, 6271 bp, Emericella nidulans
ccgcgagccgtatgaatggacgcgagaagatgctagcatgcaaagaatggaaaagcaggaggtgagtaatttctaggagcgaacgtacaaaactcgaacaaacaatcctcacatttgaggacaaactgacatgtttaatagtggaccgtctaccattttttaggccagggtcaggcagggcatgccgtggcatgcgttcgcctgagcgttcacctgcacttcccgatctccatttcgatctccatccccatccgcccccttgggtcctttagggaatcaggatccccgcctggcatcatccatcacagtctgaaacacaagcgatatgtcgatcaggcactgggattctccagaattccccaacgccaaactcgaactatattcgcgcactccacgggctccactgtttctcgaaaccgttcggcggggggactgtgggttctcgcttcaggaacggtgatgggtcggtgatgggtcggttggaaattgggctcagcagctgctttagtgagtggtggtttcagccctgatgatgtcagggatcgacacactattgattatgtttatctgtcaaacaaggagagccgaggataaaggactgaaaatcagatcagatgcaaacgagccttgcataagctgtcaaacgaggtttggataattccaaatagcaaagccttgtttgtgctagaaagaaagcgggaagagcagtcaacaaaggactcccagtcacgagacctttcctttttccactcaagaacattgcgcacaattggatagctcgcttaactatcaaggtacccaaaacaaacccatttcaactgaaaacgacagcgttgaaaagcatctgatccacaattagtggcagcagcaaaatcactcgacgactagtacactttgcagtcttgcacaacccgtgctggcccccagctctgtggcctcttagcaaagcagcttcccaacaaaagatcgagcagcacattactgtattcgccttgttgagaccgtcgtgccgtcattcctacaggatagggcgttccctttttttgatgacatagcatcacgtatcatggatgtcggcacgggcaatcgacgcgtggttcgggaaacatgccgctttactctcatcgaccgtgatcatcttccacgagagtgccgatctttcttgaattcggacctgaaccgagcaactcctggattgggactctgatacagcaattctccgttattacgctagaggtcaaccagattgagtgacggaagaacaacatgaaggcctgatgatgaagtttggcttagagtatgcgtctttgtttatggcccttgagtggtcgtatctggagtaaagaaactccgcagacatcactgcgtatgccgtgatagagcacagaccagactaggcatgtcggactgcacactccattgagcattaacgggaggcggagtaaggtgcagcttgcgtgcgcagtatcaacaatgtggcgttaatgaagttggattatacggtgtttgattggcttagctattgctccattcaaacagccgttgcaaggttacttggacggagcaccgtggcatgacaacatcctgaagactcgcaaatagttgcagacaaagcagttctactctgtatctcccatgcacatctctacgtccagggacctgaacagcttaaaggctggcgcggttgctatacagactggatgcctttgacagagcatcgaccgcctcccgctcgatggtacgggcgagctcttcgcatgtcgggatagacttaatcagcccggcagcaagaccgacggaccaaacacccgcgttgatgtcacccgtctcgtatactcctcttccccgagcaccagacataagatgcgccacttcttgaaattgagggtctagcttgctgttctcaattttatgtacctccagcgtgacctcgttctatcgactcgtcagcatatgaacttgatttcgaattgcttgttaagtctcacccgggccaaacgcgtggtgttgcggaactttcgcagaacgaggattgtgccattctcgtccatcttgacaattgcttctttgacattctgatgaattggggcctcgactgtgcacatccagcgagtgcccatgttgatcctgttcatgttagcacagatcatcctttagcgagtacgatcttacccttgcgctccaaggacaagtgccgtagccagtcccttgccgtcgcagaaaccaccggatgcgatgaatgggatcttcagctcttgagcgcaccttccaaggaggatcatagatgtaatatcatctactcggtcagttgggtttagtttgcaaaatctacgatcgagctggaatgcacctacattcgcctccgtgaccagcgctgcaataatcctctgatattagtcgctgttccgaacactccagttggaagagaactgtaccattcaatactatacgcactgttagcttcgactcacctattcaggctgaaattgagaagctcacccgtcaatggaaatgcaatctaccccctttgcctgcgccttcaaagcatgcccaagcgatacgcatttgtggatgacgatacaaccgttgctcttgaggtacttgagaataggctcagggtttccggcggtctcgatgatcttgatgccctcttggacggcagccttagcataggccaggtagtcgggggcgttaatggcgggaagcatggtgatgttgacgccgaactagggaccccgggtcagcctgcaataggtaaatatcctcgagtggcttaacgataccggtttatcagtcatgcttcgacagcgacggatttctgctcggagggcgtctggcgaaggttgggtgagggctgtctgtccgtctcgtcagaggatgttcgtcgtcaagggactggctacccagcatactaagaacccgagacctccagcatttgcaacggctgatgtcatttctttgggcgtcaggtagcggagattaggacattgagttggcactcaccggcgcgaccaacccacatcatccctgggggattagtatggtctttcgaacgattacggtaaggagcttacctccttgcacgatggggaccttgatccccagggtttctgttaaccacgtcttgaacggcattgtgaaaagcttcgctgatatcgaaaatagccagagactaggcgtgccagctggaggccggccgggtatttaagccttagcaggagccgacaagccgcggctcagacagcgatcgcgtcttgtcattgtagattgagcaagtcagaaatattctaaccgacaactactcattagggaggctatcaaattgcactgccttatatatgtttgattcactaactcgccatcatacggctctatctcgttatctatggaatggatttaccccaatctctgcctaccccacacttcacctgtcactttactaatggaacttcctctccaactctctcacttcctcttcctcccttcaactctcacagcaatactgagctgtcaagaccggcagtatgcggtctccatttacccctctagcaatcggctttggcttcctatccaacgctggggccttgacaatcccttcttttccgcagcagctccttggggcttcggctgcagaagagatttgccctcttcctgcaaaggtcactttcgacgacagcaatctcttcccatctgttcaatacttccaaaatgaaaccatcctccagcgtcaagttgatcgtctttccagagctgttcaaatcccgactcagatcactgattacatgactgatcccaatgacgacgcatttgcgccctttgttgacttccacaagcttcttgctgggctctttcctcttgtgtgagctcacctacccttttcctccttacttcaatgaccctcgcgtcacccgcgtatccttcccagctcaggatctctcttcccaaaactaacctgagacagctactccaaagccaagatcgagcacgtcaaccgcttcaatcttataataacacttgaacctccctcggaaactgtagaaaagagaaagccccttctctttacggctcatcaagatgtggtccctattaacgatgcctcagactggacgcatcctcccttctcagggtattttgatggcgagtttctctggggacgaggaagcagcgactgcaaaaacggccttatcggtcttctctctgtagccgaggatctcctatctcagaactggacgccatctcgaccgattgtcctggcgtttggattcgacgaggaggcacaagggtatattggtgctgcgcgaatcgctccggttctggaggaaagatatgggaaagatggagtagaattcatccttgacgaaggaggtggcggtatcaccacccttcgctcatcgttatcttccgctggagaggaatttgaggacgagagtgtgatttacgcgctcccggatgttggcgagaaaggcgccgtcacgatcgtccttaccctcgctgtccctggtggccatagttccgttccgcccagacataccggggtcggcataatgtcggaaattatttacaagctagagaatactgagcttgacattttcacgcccattttagggtctaatcacccttctcgccgagtgtttgagtgccaggtccgccattctcctgaatatgtggaggactggcttgcttctgcgcttgactcggatgatcaggcagcaacggccgaagcaattgctaggtctcgtggagaaagcgttcgattcactctccagtcgtcccaggcagcggatatattcaatggaggcataaagagcaacgcgcttccggaaaagatcaccgctgtcgtgaattatcgcatcgcattgcaccaaaccccgaagatgctccaagaccgagcggagaagatcatagagcccattgtagagaagttcaatttgacctggtccagattcttggataccaacaaggacgagatcagcagtgaagtggcaagcagtggtcatctcacgctctcgaccctaaattctcctctcgagccagcccccgttagccctactgatatcgatacaagtcccgtttgggcacggtttgccggtgtcgcccgctcggtcttcgagtctgttccaagtctgaaaggcaaaactgtcgttgttggtggggacatcaccaccggcaacacggataccaggctttactggaacctatcgccaaacatttaccgctggagtcccgcgcgcgagggccgtgcgttgaatatccacactgtggatgaaagagttggcattgatgctcacctcgaggcgatgatgctgtattatggtaggtcttcttcatcgttgcacgagctgggtagctaagtatcacagatctgatccgggcctttgatgcatgggacgctgcggaacaacaaacctcagacctttgaggtacaaggttagtactagacaactgacgcgataatctgatgacggtataaattcggtttaacggaagaaatgcagaagcaaaagactgcattggttctcgtcgtcttgcctatgtaacactatgaatatgttgactagtatcaatgcaagctctacagatctgcattcatagtacatcactttcagctacccagagggattgaaaaaggctataactgatgctatatactaccacacaatattacacaacttaaacacgaccatatatatcacatctaacacaaatactgggaatggaccgcctagccgctcttttgtcctgataaagcatgtatgtacctggaaagaatttcagtcgagaagcaacaaagtgaatgccgcgcccatgacaggtcgagcgatgaaaactaccggtgggtagctgagtgaatcagcaaagcgtctcctaggtttaggtaggtacacttactctccggttacagtgtcatagagatccgtaagtggacggttcgttggcgtctcgtttatccactgggcaagtagtttgatgaacatgtctcgtgtgcttactgatgcgactgccgccgtgaagagctcccaatcacctgagaccgtcaattatacagccgcgacgagtagatggccacatacctttcgtgtattgatggcgggtatccagtggcactccgtattgacccttgattgtcgggtagaagttgctctgcatgtcatacacagattgcgggaccaggttcaagcctagctcgcgatctgcgtaaaggttgtacaggagtccttggaacaatcagtattggccaagcatcacagtgaggagtacacaaaccatgaga

SEQ ID NO: 1623 - DNA, 1871 bp, Emericella nidulans
ctcagcatatagaaatagagcacattactgtacatagactaatatataatgctatatggaccaaagtgtgtactaggaaggtgtgtagaacaatcagatagtggataccccgtgatatgacctcgggtccgcgtgtacctgcctgatacagattgaaccgaagctttatcgtttatcactaataaagatctccaaccagacctcttctctgcttgatacacgcacaatctatcacaatcattcttctcgagacagaccgacctctgaccatatcctttctctacagctcgaagtggaactatcaaccaatactttgtatattctgctttgtatctactcctgccatccacttccacgaaccagcccttcagagtactatacataaggtactgcatttccgccgtcgtatccctccacgagaccatatactgacgcttgacagtctaaaacgaagaaactcagagaaatatgccaatcgaggtgcacccactcacgacagccgagatccccggcgcaatcgaggtgatccagcaggcttttgcagatgatccctattttcagtgggtatttgataagcagaatgtatgtatcttatggtcacctcccctcttgtcttttctctacataggcctggcttgttgctctcgttatacgccagtgtatatattgaatggtgcatgcttatatcatcagttccttgtatataacctggaaacgcgaattgtgagaaggagggggaaagctaacatagaaaacagttcaacaaagttcgcaactacggctcattagaagcacggtgtctctggggaatcaataacgccattttccatgttgccgtggacacaggtgcagaactagattccgctgcaggagacaagagaatcgtaggcgtgtcatgctggcttgcaccccatcccctatcaaaaccagaatcatggtacagctggtcccaatcctggctcctctggttccggcaggggctaaataatctccgacacggtggacggggcgggctcaatatccgtcgatactacctctggaaagagcggcaagctgaatgccagaaagctatatgggacgatgaacgggggtactatttctgcaatattgttgccgtcaggcccgatgcgcaggggaggggcgtgggaagaaagctcttcgaggaagttactaaaattgcggatagagaagggatgaagtgttatctagaaagctcaagactcgagccaaatgtgggaatttatcagcgacttgggtttcagttgagaatggagatggagtgtcgggatggtgatggagagggagaggcctgtaaagtaagtgctcctcttctctatacgagtgcaatggctgactgttgcagctttattgtatggtgcgtgagccgagcaattcatcatcgtgagcagacacgtgccatgctgttaagccctgttaataggatcaaacctcagcaccagcttgcgtcccttcggcagggagataaagtctgcgaggtcctgctcaataccctcatcatccacaacagccgtcgtgtagttggtatagactgctgccgttaccaacttgatttctgtatcctatcagcacacaactaccaagacaaagaagacaagaaacagtattaactgaaagaaaatattggggaagtaccctgcagcgcaaaattgctccctagacacatcctacctccactcccaaacggccaccagagccgccgcatatcatgtttctttccagacccaggatcgagccatcgctgtggtagccactccgttggctgcggatatacctcctcaatccgatggagggtatatgcagatgagctgacagtgatgccgcctggaataccatcgaagccatctattgac

SEQ ID NO: 1624 - DNA, 3158 bp, Emericella nidulans
gatttggaaatataaacgatagaataattaattaaatataaagattatttaataaagggggaaaaaaaaaaaaccattaacccacaagatttataaaaccataggagaaatgtagtgaaaaactaaaacgctaggcaggggcccggccctaggccctatctggccccaccagttcgcaccgccaagaaaaacttgtgctttagccgcggagatttctctcctaaaatttttaagcaacttctctggcagccctgtttgcgttcaacaggatcttccatggcaaaacccaatggcgccggcattcaagacttcgccaggttaaccgtgaaaaggcaatgtcgacaatatgtacatcctgagggtgcgcccaacaccgatctcagggcttccgcaatcacgatctcggttcaatggcaccacgcatatccgcatcacggtgtgccggtcgacagatggcgggaagagctggcggttcctctcgcaggcggcggaaaagaaaccgccacatggtatctgggagccgttcatgcgtatgggaaggcaaggagaggttatgttgacgtattctgaggagttcgcgcacaacaaccagtgcacgatgctggtgcggtcgacggacggaggagccacctggagtccgccgcagtgccttgagggaaagaacgatccgtatcgagatgggatgaacgggatcgcaaaaacatttgataatgggcgcgaggcgctacttatggtgtttgagacgacgacgtttggcaccttcaaccttgaggcgctgatctcgtatgacgatggttacacatggggtcatcggcatcgggtctacgtgccaccacgcggccacaatgcgggatctccgcaggtcgcttcgtttggggatggctcgttggcggtgatcttcatgacggatgaagatcattcccaggtgaaatggacaaggaacgcatccatcaaggttgtttacgggacccctccaaataacggtcacattcaatggtcgcctccggcggttatctgtccccatctgagccattggccgggtatcatggcgttggatgaccgcacgctgctggcgacgtatgaatgtggcgggcccaaggtcaagtcgatcacgctgcagtgaccgatgactgtaagactagatatatacgtcatctactgggtgaatttgctctatatagtcaaatatatacatgaattgaattgagatttagaatcatttcaaacccgcaactagctcatccacgctcttcatctctcgcgcattgttctctcccacgtgcaaggcaaccagtacccggctcacacagttgtagcacgcaatccccgtagtcaactccacaatctcgcgatccgagaacccctccttctgcaactgcgcaaacgtctcgtcttgcactttgaccgtctgggtcatttcgtccgcgtacctcacaatcgccctctgctgcggcgtcaacgcactctgcccgagagcctttacggccgcgtccacatctccggttgctgtagagggcagcgttcgcacggcgtgcaattcctccggtttgattccccccttcaaagctagcggggcatgcgcattccactcgtatacggcttgcgtgatcacggccactctcgagacagcgagttcaaggaggccctggtcgactacagtctgcgtacgaatggcaccaaggaagctgttccagccgtctgcgacgggcggggagtgcagcagggagagatcgagggggatgaggggtcgagggcgccggcgggcggcgatgcgggcgtagatctcggctgtttcggggtccgcagtcggcggctcagagggggcgtagggaaggcgcatcttggaggaacgggtggtgctgaggcgtctaaattggagaagaggtcgggcttcgattcggaacaaggacttgaggttcattgagcacagaaagaagactggggatgttgctattcattatgtatgccgatcaggtggccggcgggtaaatgtttaggtatcgtcggggatcaagtcggaccatgtactcaatatacttcaaagctgcggcatatagtatagtatagtggattaactggtatccaataagactcacagaccagatttatagtaagaccttgctaagctgatatatcgtctgggggtgagttccagctcatataatcccacctcgccttactaccagaccccgttatatcgagaacaatatcgactatctgaaagctcgtcctaagttactaaacacctttttctgattaatcatatattccgccaaaagactttgacgttcagctgaagcttctttgtacgattacctttatagctagtcttgccgtttataacaggactgtatatcatggctccaagctcgttatgatcaccgtctaagctagtctactgcttctgatattctcattgcacaacatcgttccattgatattgaatcaaatctttctcagcaactcgcgaaggcatcggccagtggcaagacctcgaagctatcacatttcaatggcattgtacatacatttgattgcatcgggacatacatcagtggcgatatctctgtgagtaaagcacgcccaacgctgaagttctccgatttaatattgtgaccagcctgcacctgcctttagtggtggttagctacatcgattttaagagcgctataatatcaagcagcgtgcataccacagtaaggctggcttagtccacaagaggctgatgagaagatgaaggcaatccgtgcgattgcgggtcagtatgatgaggatgacatctataatatgggtgagtccgggactattctggcgtattcctccatcacagagcctatcttccattaaaaggcctggtgtcagaaaagataagacttgggtatttatgatatgctgtgtcatgcctccggatttgatcggctgccgatatgggcaattgggaacacatgcaagccacgagccctttgcaatgtcattgtctcagcaattggaattcggtggcagtggaacaagaatgcctgcatgaaccagattatcatgcgcgaatagctcctggatttctatcaacatattggccaacgatcaattgttcttgcaatagacaacctccctgcgcatcttctgcctacagctagcacaaccaccaccaccaccaccac

SEQ ID NO: 1625 - DNA, 480 bp, Emericella nidulans
aatggatgtcgacgaattctataacctgctttttgaccgttgggaagctcagatattgagccctgaagacaggaagagatttaggtcgttctatggcggtcaacttgttcaacaaatcaaatcaaaggagtgcgaccatatctcagagcggcttgagccattttctgccattcaatgcgatatcaaagggaaagcgaacctcgaggagagcctgcaggcttacgtcgaaggagagattatgcaaggaggttagtacgaaattgccggaaatgcttgatggtggcggtttgctaagcttgcagataacaaatattcttgcacctgttgtggacgtcacgttgatgccgttaagcggtgcgttgactcactactgaaacttcctcttggtactgacttgcatgcagagctttgctcaaagatgttccagacaatttgatattcatctcaaacgatttgacttcgacatggtaactatgatgc

SEQ ID NO: 1626 - DNA, 645 bp, Emericella nidulans
tggcgcattgtgagaaatccattgaccacgcagctcaacgatgttctgcaaaacgcccaggtagtagtcaacgatgggcacacccttgataggaaggcggtttggcacgtaattgagacagttcagcaaaccgaacccaggtcagaagcagaattcctgggcctaagcttactaaagcagaagtctagccttcttcttttcggcgatcttcttttcatggatcccacagctaggaatgatgaggttatcgacacgacagagaaagcactcatcgtcggagacttggatccacgcatagccatgatacttattcctcttttacgtactgagactctgcaaagccctcaaggagtatgggttcatgcagggctggcggaaacggcggaggcttacttgcgaaaaaccgacgaagcgggaatgtcgatcacagggttcttcgatgctaggattctggacatgatgaaacgattcctgctctcatggcagcagacgcgcggttatggcagtatatcagacgaaacctactagtgagacactgtggaagcatggctactacgtcttactattgactatgggagagtaccagaaacgaccatgctcgctactgggtgctccgggctgaacttaacaagcttgtcagtcact

SEQ ID NO: 1627 - DNA, 1227 bp, Emericella nidulans
tcgtttcggttcatccctgaatcgactgtttcagcattgacgggattacactcgttacgtactctgattggccgcttttggagcctgcccctcctgattggcggtagatcgtgtattcccgttacatcgtcgacagcaacaactggatcgccaggcctaaagaacaatccgttcgcctggccatctcccatttcttctttccttttctcacttcaagcgccggcccgtcttctgtttagttcatcctgcattcgttcttttgttatatattcattcattctttggacccctgtcgttcactgcttatcgactccggccattgtctgtccctataggcttgctgggctgtatcaacacagagtctggggaccttcaaactcctgacagtgtctcgtgagccctcttctttcctttgcacatcatcgccttttatatcatctgtcatttgacagcaaccgattcatattattatttactcgctgctggtcagtgaagagctcgccatcttgacgcagctccaaaccatacttagcaatcatgcgttttaccaacattcttctgctcttagccgggtccgcctgggttggagcgagtcctgttgcttctggtgagaccgagatcgttgcgagacagtcgtcgtcggagtactgggtgggcactatagagaaccgtggggcggtgccatttggggacgacgccgactaccaagtacaccgcaatgtgaaggatttcggtgctgttggtgagtctttccaggctcatgtacttgtatgagtgacttgagtgactaatagagtaggtgacggtacaacggacgataccgatgccatcaataaggccatctcttctggcaaccgctgcggtcagggctgcgactcgtccaccacgaagcccgccgtggtttacttccctgccggcacatacctcgtctccaaacccattgttcagtactactacacccaaatggttggtgatgccaacaaccttcctgttctcaaagcgtctgccgacttctctggtatggccgtcgtcgacgcagacccatacaccgatgacggttccaactggtacactaaccagaacaatttcttccgttcgatccgtaacttcgtcgttgacctgactgccatgccccaatcctctggagctggtattcattggcaggtcggccaggctactagcctgcagaacattcgctttaaagatcaaagcgagactcatagaaca

SEQ ID NO: 1628 - DNA, 976 bp, Emericella nidulans
tataaaaccatccaatgtccttgtgaactctcgaggcaacatcaagctgtgcgactttggagtcgcaactgaaacagtcaactctattgcggacacgtttgttggcacttcaacttacatggcccccgaacgtattcaaggcggtgcctatactgttcgctcggatgtttggagtgtaggtttgacagtcatggaattggctgtcggcaggtttcctttcgatacgacagattccgctgctggagaccgagccagcgcgggacccatgggtattctggatcttctccagcagattgtccacgaacccgctcccaaactgccaaggagtgacgccttcccgccggttctgcatgagtttgtcgcaaaatgtctactcaaaaaatctgaggaacgaccgacgccccttgagctatatgtgcgtatcccattaccttgctgactgttgcgtactaaaccatgatataggagaaggacgcattccttgctgccgccaaacggaccccagtcgacctccaagagtgggctatcagcatgatggagcgacataaccggaagtcttacttagcacccccagcgccgaaatcactcaaggagacaagagagtctccatcgcctgcccaagccccatcgcccgtccaaaaacacggtaccagcaggccatcccgcggcacaaccggggaaattcctctcaatgtagctcgcgacagctcctcgcatcaacggcaacatgcaccccagagccaatcgcacttttcttcgaatccgtcgcattattcttcgaactcatctcattactcttcgcgttcgtcccgctcctcaccaccaatctcattggagcacctctctcttgagtccaaacaagatgagcaccgacctactcgtcgtccctcccgaacccccctaggcgactcgagctctagcttagatcagtccctacgaccttctataggctctcgttcagctagctcgcataaca

SEQ ID NO: 1629 - DNA, 3542 bp, Emericella nidulans
caaaagtgggtgagcgtgtcattccctcctttgccgccgaggacgatggcggcgatgcactcatccatcctcggactgccaactacgcagattccaaggttcgactcctcaatccttccgaccattcacccggcgcatacatctacggcgatgaatcgaagcaagcatccaatactagtcgggattttgacggacgctctgacgccggttactcggcgtttaattcgggcgatatgtttcacaacttggagaccagggaacagatgctggaaaagggtaatgaaaaacagatggaagaggtcgacgaagtgccagtatccggcagtcgaaagcgctggatggccatcgtttggctgctcacattctacatcccaacccctgccattcgatacatcggtcggatgaagcgcaaagacatccaaattgcatggcgtgaaaagttcgcaatcaatttgcttatctggttggcctgtgctattgccgtattcatcattgtgggatttccctcgctcatttgtccgacacaacacgtctattcccctgcagaattgtcgtcacacgatggcaaagatggccacagctcctacacttcgatccgcgggcttgtcttggatcttggagagtttatggactctcattatccaggaatcgtgccagactcagcattgaagaaatacgctggtgttgattccaccgcccttttccccgttcaagtttcagcgctgtgtcttggtaaggacggcaatgtggacccaaaggtattgctcgactacaagccgacgaacttttctggctccgttacctcaaccagttccggtgaccccaactcggtgtaccacgatttcagatacttccgcgatgactatcgcccggactggtatgccgagcagatgatctacctcagggcgaactactataagggctggatcggatatagttcggaatacctgcacaccctggccagcaaatctcaaaacgttgcaagcattaacgggaaaatatacgacttgacaagctatattgctggaggtcgccgaatccaaggacgggagggtgacgacacaactggcattgatactgactttatggatagcttggtggttgatcttttccagcagaaggctggcgaggatatcacgaagtattgggaagatctgccgcttacccctaaattgcgtgtggacatgatggattgtctgaacaatctgttcattgtcggccatgtggacactcgaaattcgacgcagtgccagtttgcgcgatacttcatccttgcaatctccgtcctcatctgttcggtcatcgtcttcaagttctttgcagcactgcaatttggaaagaagaatgtacctgagaatcttgacaaattcatcatctgtcaggttccagcctatactgaggatgaagagtctctgcgccgtgccatcgactcgatggcccgcatgcagtacgacgataaacgcaagcttctcgttgtcatttgcgacggcatgatcattggtcaaggcaacgatcgccctacacctcggattgttcttgatatcttgggtgttcccgagtcagttgatccggagccgctcagttttgagagtttgggtgaaggtatgaaacagcacaacatgggtaaggtctattccggtttgtatgaggtgcagggtcatattgttcccttcctcgttgtcgttaaggtcggaaagccgtcggaagtctctcgacctggtaaccgcggtaagcgtgattcacagatggtcctaatgcgatttttgaaccgcgtccactataatcttcctatgagtcccatggagcttgagatgcaccaccatattcgaaacattattggagttaacccaaccttctatgagttcatacttcaagtcgacgccgatactgttgttgcgccggatgctgcaacccggatggtctcttcttgtctcaatgatacccggattattggtgtctgtggagagacatcgctaactaacgccaaaacttctgctgtcactatgattcaagtgtacgagtactatatctcccacaaccttacgaaagcgtttgagagtcttttcggttcaattacttgtctgcctggttgtttcactatgtaccgtatccggtccgccgagagtggaaagccgcttttcgtgagcaaggaaatcgtggaggcgtactcggagatccgtgttgacacactgcatatgaagaatttgttgcatttgggagaggatcgttatctgacgacattgctgctgaaacatcatcctaagttcaagaccaagtacaacttccgagcgcaggcctatactattgccccagaaagctggactgtgttcctttctcaacgtcgtcgctggatcaactctactgtgcacaacttggtggaattgatccctcttcagcaactgtgcggtttttgctgcttcagtatgagatttgtggtcttcatcgatctcatcagtaccataatcatgcctgtcactgttgcatacattgtgtacctgattgtctggttggtgcgagacacatcaactatcccctggacttcattcctcctccttgctgcgatttacgggttacaagcaattatctttattgtccgccggaaatgggaaatgattggatggatgataatctacatccttgctattcccgtgtactccctggctctgcctctctactcattctggcacatggacgacttctcctggggtaacacgcgtatcattactggagaaaagggccgcaagatcgtcatctccgacgaaggaaaattcgaccccgcgtccatcccgaagaagaggtgggaggagtaccaggccgagctatgggaggcccagacctcgcgagacgaccggtcagagatctctggtatctcatacggcaccaagtaccaccccgccacccaatccgaatacggattccccgggtcacggcctatgtcacagcttgagctgcctcggcatatgtctcggatgtctctcgccccgtcagagatgatgagccgccacatggacatggagctggaagacgtcaacctaccgagcgacgacgcgatcctatcagagatccgtgacattctacgcacggccgacctcatgaccgttacgaagaagaatatcaagcaggagctggagaggcggtttggcgttaacctagacgcgaagcggccgtatatcaattctggtaagcatagacccatttagttaatgccttttatgagaaccctgatgctaactaatcattgcagccacggaagccgtgttatcgggcaacctgtgatttttttccccccccccgtttctgcattttccgttagacgagcattagcgccttgtgttcttggttgggtcgaaatgagtgtataaaagggttaccctatctaatatttatattctaagatgtgtatttggcgagttgtttagccggcgttctatttaatttgatgttcgcattattacttacatcttgtaccaattggtggtgactactcttgtacatgacaatcttgacaagcatacacgggcgtgatcaagttttcagatacc

SEQ ID NO: 1630 - DNA, 573 bp, Emericella nidulans
acgagaaattcaatctccgcgaacgtctcgctatcttccgccacccaacaacatacggcttcctcgctatcgagatctgcctcggcgttccgctccagggcgtcgccctcttcatgccgcaaattatccagcgactgggctactcaaccgtcaaaactaatctctacaccgtcgctcccaacgtcacaggtgccgtcatgctgcttattctcgcattcagctctgatgctgtcaagctccgctccccatttatcgtcctcgggttcctattcaccttcaccggcttcatgatctacgcttccatctcagacgtccaggcccagatcaagctggcctacttcgccaccttcatgatgacctggggcacatcagcgccgtccgtcctactcagcacctggtataacaacaatattgcgcacgagggccgtcgcgtcctgctaacatctatcggcgtgccgcttgccaatctgatgggactagtcgccagtaacgtcttaagagagcaggataaaccgaagtatatgcctgcgctaatcacagtgggatcggtggatcacaagactttctcgagcc

SEQ ID NO: 1631 - DNA, 1541 bp, Emericella nidulans
tcttcaacagccctcaacttcggcgtgctctcgaaccaaaacaagcaagtcatctaccaatcagtcagcccgttggcgcccatcaaatacccgaagtatccttacctgagcagcaaaatccggtaggcttcctttcccattgttaatcgagggaggaatctggagatatgaaggcttcgaagtctctttctcttttggccgttcgtccctctctcgaggggcttgtttgctcgattgttgagctggttgcgacggctgagtttgccgggtcattcgattgagcaagtcggcgctcatccgggggtaggcaggaccttcgccgtaaacggggccagtgtacgggtccggcttccctccatagtgatggatgttgctgtaggcgactccattcatatcgtttggtggggtgggtagaccgtcccggaaaggagcggtcctagaaaggtcaggcaagtccaatgggttctggtgatgctgcttgttgaaggccgaagcgtctgtctgagagtcgtgaagaagcgtcggggtgattggaggggcagcaaggtacgacagcgttggctgcgccgtgggatacatatggcaagaaagtaaggcccgcgaaaacatttagcgagagcgaatgaaggggaaggaaggagtctgtggaagctcgactgtcatggaaatctcatttgaaagcggctgttgttgaacggatcaatgttgttattgacactcaactagtatagtagcagtaggtcgtaaccaggccaggcggatccagtaacaacattcagcgtcggctgtcaaaggaatgaaggcacgttgaaggggtaagtcgtacggtccgccagcccagagcagagatgatcggttgcatagcaatgaagacctcaggcggtcatgtcatacatatagaaacagacactgaagaataatataaggaaagcgagtttcggatggagttaggtatggaccgcgaccatccagagttgtagccagcagcgagctaaaccaaaaaggcaagtgagagggaaaatggaaaataaaataattttaataattcaatattgggaacagcaaatgggaggcggaattttaaagaaacggtttagtatagaaaacaagatccatagacctggagacaggaccggatttaaaatcgaaagcaaaaaaggaataatcgatggaacaggaaagaatggaatactaataataatggatgcgcctaagaaaaaaaaaaaaaaaagaaaaaagaaacggaaattttaagtgaaagaaaacaccagtgcgtatacgataagaggatcatagtctcgtagatgaagtcaagacatcacctttgagccagcagcaaataatggcacgggacatcgtgaaaagctccgctctggccagggtgtgaggtgtggcccttgtgagcctgtgagggactgacggtgccggtcgaccgtcgaacgaggttagccccgcccggaagtgtccaagacggacagagtttgagccggacgcaggtccaaagggctgatcctaagcttgggtctccctatagagtgagt

SEQ ID NO: 1632 - DNA, 1777 bp, Emericella nidulans
ctttctagatccggaaacctgggagaaaattaaggataagacggagtgggcgcgtgattgtatctaatggatgggttgatctgtgatgagtatgatgtgatgctcttatgattcccgtagatgggttgcatactgcactgcaaaattggtgaatcaaatgtctctgttacgatggcatcctgccacttcgtacaggatcgacgtcccagagcttctcacttagaaggacgtgagcagaacaggtagattaacgcatagactgaatcgcacgctattgactaagatatgatacaaagtcatcgtcatcatcattgcagtcatcatgcgtagatttcatagtattgcagcgcggttttttccctacttattcatcacatcgtgattcatttcatatcgtcaaaacccccaatcaatgcctgagtaagactcaaaaaaaaaaaaaaaaaaaaatccaaaatcatcaatcattgtataggtgtatcatattgcgtcgtgtgttgaatctaaaggtcatgtctcgtgatggtcatgttcatgttcatttcattgtatggctttttctgacttgtgtgctcgagtccatcaagacagcctcgccaatactctgcttgagcttctcgcgccggacttcgcgccttccctcgactcgttgttgtattgagcgtcgaaggcgccaacggagagaccgcgcaatgccagaccggaatcgtagtcgccacctcggcacggctgggaatcggcgctggtggagcgaggtttgggagtacaaggcctccggtgaaaagatgccgcttccaatgagcattgttctgttggctcggtgaccgtcggttcgccgtactgcgcctgggcgggcagccgagacaggtgggccatcgaatacaacccgcttctgcggcattcctaatgagttgctaatgatctcgtctggctgtttgaggttccgcggtctggagttgccttcttcaggtgacagggagtccggagagtcatcccagaatcggcgcggacgccagaagggctgcgatcgcccgtcaatgtcttcgccagctttagggttcctggctgaattgagtgaaagtgtccgcacgaacgagttgaaggactcagaccgaggtcgggcaatccacggccgtctcttggagcttggacgacgatcaataccattggttgggtcttttccattagtcacttctccgggtagctggtcaaaatcgacgaagttatcagcagctgcagagactggcggttttggcggtggccgagggttccgcaatggagaatccacatcagtagtctgttgggtgttatcgggggtctggggctgttcagcttgttgtagctgtgctcgaaggttgctttgtccatgtggattgacaagtaatagagactcattgttatgcgggaagatggccactctcctcacttcgctaatctcgaacggaccaggtgatgacgatgggactgaatgaggcgtgaaaggcactgacggtggccgcaaatagctcatatcttctacgccaattacgatggactgagtcttgaggatatctgacgcatcatgctgatcgaggctaggagagtccactggtatagatggaggctgtactttctcaggttggtgctgtttcttgacttgttccaatgcgagattatggctccgtaaactctccgaggtcagagaagttgctcgagaattgttttgacttgtaggcgcggatagtgaagagctgcggggcggaacatgtggtcgactcaggccgcggacaagatcgtc

SEQ ID NO: 1633 - DNA, 1190 bp, Emericella nidulans
gtctccctctggatgagtcagccgcagtcgaatttgtagaagtactgagaacacatgatggctgttttgcgttgactttctgataggtgatgctgtgaagtcttgatgatagaatagaagtgcgcgataatactggtcgcagcggggaggcttgcttttgttcactctttgctttgttctggaagctgctgagctggattgctgatgaactttgaggatttgacgggtggtgagggtcttaaatagttcagacggagttggtgcagtcccaaggcatagagctggactcactcgttgactgcgccgcaacaacgccttcgatagacacaacaaaaagcaacagaagtgggtatgacagttagttgtaaagattgagttggaagtggaaggaaaatattataacataaaaaaaataatctgttgggaagagccggggacaagaccgtggacgaggagttgaggtagatgaaagtaactactgatgcaaggtcttccgtctctgctctgctgcgcctttattccccaagcgacctgaatgtctaatatgcagaagcagttggtgattcaaaagttcatcacacctgatgggatcatctcatcgaattgttctatccgcaaattgaagctcgcccagactactccatatggctcactaacaggaagattggccggatatgcggatcatttgtgcaggtcaaggccgttctgaggtctgtgcaatccggtattcgtgcctggaagtaaatgggggcaaggccactggtctggtagcggcatgattcccgggcccatgcccataagcttcattaaacccaggctgcatcgtaagaggcttgacatcatgaagacactacgatgacaggcgaggcagtcactcatgcaaccagtgaagaaagaacctgcaaaacaagaagagaccaacactcccgttctcgaatcagtttccgtgccgggccaacagttctatcgttcgaggtcatgccgcatttcggttgctgccccaaattgcgcatctgacgaacatcacgcagcgccaggcaacgggccacccttcttattgtgacctacagcccgttatgacagccttcgttgtcataagatcttggcatccggcgaggtgggtgatggtgcaagggatacaagcaacccccctgatacggtcatatcaaattccggggcaccaccgccag

SEQ ID NO: 1634 - DNA, 3035 bp, Emericella nidulans
agcttactcttgacaacgatcgagatctcgctagtccttcaagtacaagttgtctgttcaaatctcagacgtatctaccgacgagctcttctttgtgtatcagctgttgttgcaacggcaaccatcgccattcgatactcgctgttggccgtgaacatacgggccattctcgaattcagcgacccgacgacctacaactggctggaaagcttagccaccgtggccctcactataagcatctgctatttctgcgtaatcttcgtgaccaagctcggatttgccattcgactgcgccgcaaactcggtttgagcgagctcggcccgatgaaagttgtcttcattatgggctgccagaccctggtcattccaggtatgtcctgctatgctacctttctactcagactgcaggaaaacgaacactcagctcattaattccaccagtcattgtctcgatcacccactacgttagcgatgtcccagagctccaaactaacgtcttgaccatcgttgccctctccctcccgctttcctctatctgggctggcacaactatcgacaaacccgtaacccactcaaacgttcgcaatctgtggcagattctctctttctcaggatacaggcctaagcagtcgacctacattgccacgacaaccacggccacaaccaacgcgaagcaatgcacccactgctattccgagtcgcggctgttgacggagaaggaaagcgggagaaacaatgacacatcttcaaagtcttcgtcgcagtatgggattgccgttgaacatgacatctcggttcgcagtgcgagaagggaatcttttgacgtctgatatgctaggcctctttttttcgttctcatttctttcggttctctttttcttcaaagatacatacatatcaaattacagcccatcgtcatgaacatatttattcctggatcaaccgttagtgacctaccacaccgggcgattgcctacatagtataggtgaacactgggcaggtagtcatggatgcattatgcatagcgagaccattggcctttgaactgcttcatcttctgtttttttttccgtcactcccttcattctctaactgtttcagattccccgacctctttgctcgaggttattatctttctgttatctagtccttcttaggcaggtggttcccaacttgcaatggttgttctcattcgtccctaggcggtactagcccagacagatacatcatatatgaagtcaatgccttctttacgctacatcattccaaagaaaaaaaaaggttggctctaaactaatgtgacaagcagaagggtaaagtttagcccatccttttcataaggctagcctatctaggtattaattaacagaggtttaggaagaacaaagagttattaacgatttttagtagggagaaagaaaagaacaacttaagagctaaccttccctccctaatttcgctaacgactcggtcaagaattcattggcgttcatcaagtcagtactaccgtagacaacccgccgtctcggaccaccaagaggttcatgcccagtgcggccgttacctgccccctcatggccctgctgcccgctcgtgcgttgcacccagtcctgcaaattgccgtactcgtccatgctgccaccgccaacagtgaagacaatcgcttcattaaaggcctggcggcgctgcccaaagctagcctgtatacctgagccgcttgatgatgcgccttgctgagtgttgcgggcagcagatgcaggagggatggttccgcgtgcatttgtgctcctgggatcgaagtagaggtagttctctgttttggcaattgcagagctagacgcggaggcggggtccatgattgattcggtaattttagtgagggtgaggtctttgttggcgggaaggaagttcttgactccagagatgagggagtcgaagtttgcgcctagggcgcggaagtgatgcggtctgtgaggcgattggagagggaggagaagccgcggaagaggtccgaggattgctgctgtggagctgcagtggccgtcgtcatcatggtcatgcgggtgagctcgcggacttgcttgacgtaagcgatggggctgatgtcctggactcccgtgcgggtaagagcttcttcgaattggctgatgtctgcacgggagagttcagtttctgtgctcaggaaccagatgaggaatatccggagtttgtctgtggggttagtgcccttggtagggtcactaattaactcgagaatctgtgctttagattgtttggtgatattctcttcaagctcgaagaagttatctagttggcggtctttgatacccttaagcagagcggtggcgatgttcatgtgcatgtcgagaatcgatttccgctctcgtagctcgggtagaagagtaatggcggctttgaggtgctgcgcagaggcactcgtatctgcttgaaggtcctcgatcgaggaggctccggtcttcctagtgatttcggtcgcatcctctttatatcgtgttaactcggcgtcgatatcctctgccacgtgcgggaacggggcaccggcgttacgcttccagaagaagtcattactgccgagatcataggccttctttgttgtgccagcggcaggatttgactcatccacaggtgtttctaccgtgatacggttgagtcgcatctgcagcacatcttgcacaagcgattgataggtccacgagtgtgagagcatgggaaccaaatcaacgttgcggtcaacgatgatgagaaccggccgtgatgaaggaacaccgggggtggactttttgttagctgagaataagttgtctttggaattgagaatgtgatcgcgtaatttacgatctagctttgtcgcgataagctcagctgcacctccttttggacagcgtatgatcggtatggcacctggtccaatcagtaagaatgtcacccagccattcagtaattacgcacccattgtacacgtgacgctgaataaaccactgacaatcttatcgacaatttcatctagatcggc

SEQ ID NO: 1635 - DNA, 1516 bp, Emericella nidulans
gttcgaggtagggggaacctctgccggtggatccagcatgctatatctgcaatagattttcgttcatcctaatccccggtctcggtaaccagattcgcgatctcgatcatagatcctaattatagattattcgcaccgcttctccgaagcccatgttgatgcatgtcgagcgtgggatccaatagcaggggtatctagagtgcatgggcccatttctccggcgtacaggaggtggtacgagcattgcacaggcacgaagcaaggtaatattgcccgactatcaatatcgtcccatcggcccagcactgctagaatggaaagctctgggccagattctcgactcggcctcaacttaccgtcagttggtattggccaacacaggatgtggatcagccaggggcagcctgtcgcttactcgaactgtgccagccttgtttgcttctgttacgcggcacctatcacgaactttcgcctgcaataccaggtcttgaaagcaacacgaggggtagagtgccatgtcagtggatctgtcagctgggattgaaatactgcgctttatcttggggcatttcccgcgacatatcgcaaaggaaatcacgaccgtttgcgcaaccactgcatacctaagaataaatatactcagtacgctctgcctcaccccgcatactcgtatatcttttcagtcaaaatggtcgccacacctgatgatccaagagcgcagaccatcgttgatctcttcaatggacagggcagcgccccggctccctttgacgtgctgacctcagccttgtcttttcccaccagagaccaggagcaatggtggcgcaagaccggcccaatgtttggtcagatgctcgcctcgtctggctataccctcgatcagcagtatcggcacctcaccttctactacaaccaactcgttccccgcctcggccctcacccagcaacattccattccagtctgactgtcagcgggttacccatggagttcagcatcaactaccagcaaaagggtgcgcatccaatggtccgcattggcgcggaacctatcgactccttttcggggacggaacgggacccatttaatcagatcccgccggccgagatggtaaacacttctccagagcgggagttaaaggattcgatccggagctttatgcgtacttcgagccaaagcattctctaactcgtgagcagcaagccagactaccgaaagaagtacctggtggtgacaagttaaagacgcaatatgctttcgggttcgattttaagggtgatgaggtttcactgaaggggtatagctatcccgggctgaaagccacaatggcaggccaggaagttgcgaagctcgtcggagacggggtcaaggacctgaaaaaccaaggcaaactggactgcaccgaggcctgggcagctgtggaagcctacatgactgaactcaacaactggggctaccacaacctctgggcatgggattacgtcacgcctgcgaaatcacgtctcaagttgtattccc

SEQ ID NO: 1636 - DNA, 1066 bp, Emericella nidulans
gatctcgggactcgagaggtatcttttcggcgataccgatggcgttttccacgatcatgcgggctccattgtctatccctggaggagggggactctggagataactgacaagggttgcgacgaggttatccactagacaattaatgagtccagaccggtattcgtctgctgcggggccttgaagggagtcgcctagaccgtcgagcgttgtgcggcgccagttggagattcgggcgatggagttctctttatcttcgtctgttgcaatatttgtatgttgtctgcgcaaggtcatttcaatagatttcagttgctgactgaagcttggctcaagggccggatgaaagtaacgctcaaagatctcgtctaccagccagcggctcattacagagcggccaatggccgtcatttcctttgtgcccgtggctggagcatcctcgttgacaaacccggaaagccaagtgggaagtgttttccagtctttgcggatggaaaatgcaaggtccttgatggcgccgtccagacggccaaaccggttggcgtactcgttgtcgtcgagaacggttcgggaaacggccatacgctggtgagcaacggtgttttgtagctgctggacctgggcatcccgttcaaaatagtaccgttttaccttggagtacttggcctctgcaaaattgtcagatcaatcaaccaggcgtttcttgacaagaagacttacgcagttcgtcgtacttctggagtatcgtacggacgtcagcctcacttagatcatcgcgattccgatctttggatgttggagtagcgcgccccgttacacgtgaagcctgctggtggaccgcgttattttggctcgaaccctgctgctgggctgggttttgtgaattgctgccggaaggtcggtctgacattgccgggagctgtgtgaccaatgacgtttcgctccagggaaatggtacggtgatggggctagagagactggcgagaggcgggcggaggtcctaatgttcggtcccgagtcaatttggccgttcctgattgtcacagatgactgctatagattcgacgc

SEQ ID NO: 1637 - DNA, 1100 bp, Emericella nidulans
caggccatactaaatctccttgcgaagtcacactggcggtagctgaagctgttcactcaactccatttcttgctctgtaggagaataaagcgcacggcggggcttatttacaaacaagatcaaggctgcaaaaggagacggaaggatggttcgttggtatgcgaggaaaagccgaccagctacatatcgctttattggaacagtgctttttaccgcgtctactgtgatccccacaggccgctttcatctgaaccgagaagtccctgctctttgtctccgctggagcacctaatttcgctactgaggactttactgaccataccctccgggaacagaggctgactgccttgattttccagtccacctcaagggaagctgataatcttggtcgcttcttgaacgaggttcttcgtgatcttggccgttggcatgccgacaagactgtctatgagaaggaagcgtttggaactaagagggacctccctggtttcgctatgaatgttgatcccgaaggcaagcccactaccttccttgattatgaagacttccgtcgccttctctacaagtggcaccggcttctatcctcagcattgaaaatctgcctcaatgggggcgagtacatgcacattcgaaatgccatcagtgtcctgaaggccattgtccaaaacttcccagctgttaactggatcggtcgagacatgcatacaagcgtaacaacctcagtcagaacgatgaacgagacgatgtgaaaattcctgcagcctccttaattggcgatcttaaccgtcgtgagaagaagtggatgcttcctcaggcttttatgattaccaaccagccagttcctagcaaaggcagccaagctactgggagagcaacgccttctcgccccaactcgactaccccgactcctttcaatgcggctgctcctgaattcaagccctccagtgcgacagagtaagttgacagtggttcctttacatgcatcaagcgctaatcttgcatcagattaaaagggcccggaaagactgagggaaccacgaggcaggaagttgaggatggagagattgaagacgccaggacagcagatgtgccaaaagata

SEQ ID NO: 1638 - DNA, 2492 bp, Emericella nidulans
ccattaccggataacgagtccgcactagatgtgtctcatattagatacgaccaacaacagtatcaaccacagccggagcaacagcagcccctagaaagtagtaaaggatcgttgctaaccattccacggaggcagagtgggtggcgccggcaagattcggcaagcagcgggtagagcaagggtggtcagggctgggcgtttgtatagacaaccccctgtctcactgtgatgttacgcgatatgataatgtatgtatgtttatatggttttatgtatataatgatatgacatgagggtatcatagatatcgagcctgaatgagtatgccacccaaaacacaagccagcaactctagccctaaccaatccaagccaaggcatgtgcacgaccaatcattcacatataccccagcacactcctctgattacccaaattaaccgcaaacctcgtctcggtaagtcgtttaccagctttgatactctccagtaccctatcaacagagcacccattagcccccacgcccaacagaatacaatggagaattttacgcagtaacataccactcaactcccactatccttatccccctccatccgcccctcgccaactcctcttggatcttcccagccgccagcccgcctcccgcgccgccgcgccccgggccagcattcggcttcccgattatgatatgtgttacgcggcgggagattgagagggctagtgttgcgccgtgcgcaacgagaagggatttgagcttgtggtctgagatgagtggcgctgttcgcccgtttatgtagattgtagcgccgcgaaagatggttgattccgggggagtgctcgtggctgcgtttgattggcattgggattgaggatgtttctggagaggggctgtagctacgttagatgtggtagttccgctgaatgcgccgggtgcgaggtccatggggtcggggatgggttcgtgagactgtgttggcaattgcgtagagggttggctagacatagaagtaggtatagccttcatattcatcttctctcccagcaccaacccggacccagaggaagaacccccctttccaatgcccaacatgctcctgatatctctctgcttcgaatccgggctaaccgctgtccttcccctcccagtgcttttacctccccgcctatccccgcctcgtccccctctcgcatcacccccccaatcccactcccactcacccttctcatacaccctgttcacgccgtcatacacaaacgagctgatcgtgcagtcgccggagcggaactgttgggcgagttttgcttcgcgggtgcgtcgccatgctgtaccgggattcacttcggagtgctggtggccggatgaggccgagttccaggggtcgaagaggcggtgatttgattgtgctgctgtcttagttggcggcggcattgtgaggacagccacgtaccccttaaatcctcttgtgagaatatgtaaggtgaggttagattaaaacttggttcgtgaggtcccaaagtatggataggcttatcgataagaaaattggtcgtttgctgttgccgggtcgatagacaatagggaaggaggcatcaggtatgcacaattcctcaggtaaagcgaaaacacttctatctttattagtatcactatattgcaagaatcagcagtatctctggacagggtatctgaatgagctatcgagcactccaacagatgcttcacgtctatcatttggtcccatcaatgtattcttttccaggtctggctcgcgcgtgttggccgttagctgagtggtatgatcctacagattgcgctgttgtttgtgggaatatgaagtacacatcgtagcatggtttggtgcagggctggtgtgctcaatccaggtgctgttggaacagaagtgagcttgccacagccagggttcaggccaataatgcgaaggggaaaacggttgaaagtgcatttttcttcgctctgttgggatagaaaggatgaactatgaccttgaatttgtacctggagaaaaaagctcaccagtcctgtatccgggtaacctaatgtgcggcaattctaataaagttggctgaatgatcgggttctaggtcggacaacccttggatccgtacgtacacatgtatgagcaggatgccctgtagatatcgtcgatgttagtatgtacagactatgatacataccccggaacgccaatcctgcttgctatagtacatttatataatggtttgagaagggtggtagtaactcctcgaagaggactagatgactacgagagtgtatatcaagtggaagtggcttgatctctcggtgcaggttcagagcacgtcaataccccattgctgcctggattcgataacctaggttcaccgccgatagccttttgggggggtatcagttgcctgcaatgggcttaagcacaccattgtcatcatatcgcgcttctactttgtgtcagcaaaaccacttggcgaaacga

SEQ ID NO: 1639 - DNA, 3993 bp, Emericella nidulans
caagaatctattaggtttaggtcgctgatatttatagaaggctcacagctcttgagtatgtaagaagctttgttgtagaaaaggagctttttgagcatgatattgctggttgacacttttttgccctactcctgcttaccaagtttatcctctctgaccatggatctgtaataggatattctaacatggacgctgtacctctcctccttcccacagatcctgtgctgctgacaagcaatctacaagcagcattttctctgaaataccctatacacacagtagctgagcacctaacagatataaagcatatattagaaaccaacacaggccaagagattgacatccttctagacatgtctaatgccgcccagaccatggttactgtagatcaactacctgagcttgatagcagctcttctccttctaaaggttatattaactcccctcccaaagatgagccactcacattccataataccggtattctacccagttacatagcctcaccggggccagctagtaggtacctgagccaacaataaacagcgctgatcacaaataatttcagtatagtagtattcctattcttacagaaccctattttcagcaaaaaaggacagctgcttgataataagcagatccaagatatccttaaggtgcattgcagcttctgtacctatgatcttgttggaagtctatactcattttagatcactggctggctaatctagggaaccaccttcctaggcttggacttcctttagtatggagaggtatacaaggagcagtgaactacctttgagcccttaatgccaacaacttcacccatcctctcgcagcatgatttgccctcatcctctttagcctcaattactacgaaccttgtaggcatccgggtaaattccgtactcaccctagtggtaggacgcacgcgagttctgttcttgattgcattcttgatgaatatacagataatcctcgcatatcagacaacccctgaagccgtcagaataaaatcaccaccattttcaccagggaagggcattggtggtgggaggttggagcaatactaagtagtaggtagctggtttgttaaagataatctaataaaagctatgtatattccatgataggcttactggagccagctaattcagatctccaggcatagcaagttattcataaatagtcagataaatactctcgccacattgtcacagaatactcagccaggcactgtctatatgttccactcgctgcagtttatagcaaaagccatcatgcttgggcagatcactgataaactttcacaagcctggtccaatgctgtccttagcagcccagataagctagccctagcatgcaaaaaggatcaagaagccttggcgcacctgcaggctgggagttcctggccaatagaggatgcaaaatgctctgcaaagcagaagatagaggagttccttgcttttctaaataaactttaaaacaggggacttgatagactttgccagattaaggtttttatctgcattgcatactatagcatagagatattcttcttgatataaaatacctacttgtttctacaacagtgccctagacagtaacagctggtcttatttccatctatctaacagaggcatgtataagtaaaaggtacatacagaaatcagggtgaaccatgcaagactaattagatccccaggggcctaatatatctctatcaagagctgctgctacaggacacgtgagtttcagactaaagtaggaagaagcactaaccttttttaggtcctccacagagctgacagacgtcgtcgcggagagaaattcaatcgcggccgagctagtccaccagtgatcgaagttgtcaagaccaaccaccccatcatccttgacatacttctgcatcagttccatcattatctgcctgacaggggccaagttgcttgcttgaactttgcccagcagttgggtagagcagcaatcaatccaggctaggaaaaaatctgtcagaggctatctagataagattcaaatagtagtataccaatctggacttccctgtcaaggtttattaggatactagaacagttcagggacaagtactcaagattctggctaataagatataatagtctatcaagaatctagagatgattagcaaccttatatatctgcctgaaactgaagccaaacctaagacataatcacagccagctgctgttaatctgggaatactttgtatataacaacatagtccaaggtaagagggtagtacttgctgaaagtatatagggaattagaggtctggaaatattccataactgagactatatttttatagtaagttaaatagaggatctccaggattctgtctatatacttgctaggatactagtacactgcctagacagcacagcaaccagagcacctgacatacatactaactataccagccagattatactcaaagatcttctcaaatatatcccatagagactccttctgtttaataagatcagaacccgcggtattctccccctcgctgatctttggaagagctaaggatcatggttggccacaaatgatcttgcgactaggctccgcgggcgacggcaaagtgtttctcttggccaggcgtgtagtaggatggggcccctctgtgagctcggacataggctcagttggagttgataccacttcctaagtatcagtcgagggcttgttaagcaaaggaagcccttccactacaatctaagtgaccggccgcttggaagtggatggattcatatttaactgaactgtgatctcgactgaaatacaatccatgcaaataagaggtgtttaaatctgtccaagctaagctgctgcagttgtctgagggtcgctgcaggggcttggatacaggagatagagtgatgcggcgcgaccgcacgtggagtaggcacatccaacgcctatatcctttgtcaggaagctgacttcgcccaagttcttgttctgcagccatcaacagttgtttcaaactccatttctgcaatgcggcgagccctactcactgagcaagaagtctggctggcaacagagcagcgcctaaagtacctaggaacagccaaggtcaacattaatcagattcaatttgaacccccgttgccccgggatctggatagcaagaacgtagctcggctttgtgaaattttccgtaagaaccaatgtcgctgcctggacatcaataatcatgtccccgcaattatctctcagcaagaccttgctgttgcgctgcagaacacaaatatattgcaatagtcactgctgtgactaataaaccgccccagtttcctgaactaagattcgcggctgggcagctttgagtacttcacggacaacaccatgtacaggcaggagccaaggtgcttcctccagcagaccgctggtagataatcaatctttacctggacagtaggtcttctgggagatatctttggtactatatggctaactgtctacatagatattggtgaagaactgatggcctccctactagaggaatatgccaaccagaagaagccaaccaacagagaaatttatcacaagatccggcagtataagggtgagggtaatgaagctttttaggagtggtagtttgtctggctgttacccagcaatcaggactacctagatcagctagataatagacaaaactattgcctccagcaggccttcaatcagctactgtcaattcctggcctttggccaaatgggatgcaaatcagcatgcttcattggttgatcaccactggctgtattgaagtaggttgataacttagcttctctcccatcctgttgatcactttgctcaccacaacaaggaaatccttacctaccttgaccatattaaagacttctagtcatccttagttgcctcagattgtgatttgatgaagaagatagatctagatacagttgatactctgcagctgctggcaccag

SEQ ID NO: 1640 - DNA, 777 bp, Emericella nidulans
tttatacgctgctccaggccgtacaaaccggctctgctggcgtgattgaatcttcggggtttctttagtttgaaccctggactaacccggggtgggctgacccaacacattccatgctgtcaaaggaccatttctctaacattcttaacgagcctgctggccttgtcgcgtccgccattctcaagtacgttactccccgcgtactgcacgcctgggagaacatcaacatatcagaacagcatgttctccacgatgccctagaggtggtgcaccaccctgcgctccggaacatgcgtaatgaggcccatcgcactatgttcgaggccgttcaattctgggggcacgcaatgccagaccgaggcgcccaactcaatgatatcctcagcttccagggtgtcaagacccggaagaacaacggcggacaggtcggtcatggctcccattcccacgcgcaaggcggtttccccgccctaggtggtgctgctgctgcacatggtcatagctacggtagtcacagctatggccaaacttccagccatagttacacaccccacacccaatcccagcaacagcagcaaagctccagttcagggtcagggcttccctgggaaaaactctccgaccaactaagcggcctgcccatccctgggatttcgaatatcaataagctcagcaataagctctccagctttggcttgggaggttcatcccgagacgaaaaggataatacacccccaccgcaacagcaccactatgagccttcatataaccaacagt

SEQ ID NO: 1641 - DNA, 3181 bp, Emericella nidulans
aatgaatgagctgaagtaggaccccagtattggtcgacgacctctgctgtggcccgctgctctgacggctgcggcgcatatggtggcgtcgattcactctctgtctcaagcacagtttgctgaggagttgggtttggggaatcgtgtcttggccgcgagctagatgggggaggggtcacagcgacaccgcgttgataggtggtgttgtaggtgcaggccaatttccgtcgaacacagggtgcgcaggggatcgtcccagtgcacgctttcttcttcgacttgcaggcatcgcaggctcgcgtcacctttcgcaatttccgctgccgtccgcctgaggtgaagcatggacgtggagagggaggggagtctctaacgagtactccctccgaagttctggagagtctccggccagcttccatagatctgacttatctgtttcctttggttatatcgcggcctattctcgcagcatattcattgatcaatgcactttttggggccacgttcttttccgacgagcaggggcggatatgtcaagacccagtaacacctcagctatcgagcagtccaacccaatgagagaaacgcaagtatggcctgaaccgggacttctatgagattatatgaacatataaaaactcgattcgtccgtccctgcaacatcttgttgacggtgttgatgccagaccacagccggcggaggaagctgaattgggtttagcgcaaattcacccgcagggaatgtcagtacacgtgacatgctttgatttttgaatcaaggtacaggcacagcatggcattacctacagtccttagcgaaggtgatatgtgactgttaggtcgggttatatcgggaagttccgtatgaactgattccccttaactactcagatataatggaaggtttttctccggaaacattttatggaaaatctgccgtatcgtcctttttgccactaaagaagaatggagatattggcattcagtattagaggcaactagaatgctacaaagccgctaggtggttgagtatttgggagtcaacatatttaacactcatgttctttttttcagttgttctcacatagatagcataagcatatcagggatccgtacattatatattccagcccacaccgtggaaaactaaaaccgcgttcaaccgagaacccaaaagtttgcaagcaatggtttcaatattggagagaccactacgtcctaggtgcattttcaaggatcttcatataaggcaaccacttgggcaagaaagaatccgctgatatcactgcgttttatgtcaaattgggactaaagacttgaaaataaatcagatgaacctgacctggatcagaagacatatccagccagaacatcgtcattcaaaccgaaccagtgaagctgctgaagggcaagacttcgacccggctgcactacttaactgcatctacagtcataaggcctgaaagatttgcttgacaactctataccaagacaaccaggggcgtaagtgttacggtctctggcacaatgtctccataaggtccacgtttggcttgcggtgagtatcatgggatgttgcgcagtatgacggaggccgaccatgaacaaagtctgtccgcagacgagtttctcgccacattgggcagacttgtgctctggtttgcccatcgaatcatcctaacatgcagacgagaactgccgatcaagagggaagattaccgtactatgcaggatttcgcaaaaatcttgaagtcatgtacgccttggcagagaaagtggaatagatgggagccgaccagcaagttaaagtgttcccaagagagatcgtggagaaatacctgtatttgttgagaacgtgatcatagatacatgctcacgcaggaaaaaggaggaatttagcacggcttgtcagtatgttttcgcctgtgcaaggcacagaaaataggttggatcacacattgatacttgtttcagaagtgccatcagatgactgcattgtcaccaataatggccatggtacttggtgatttggcaaagcatttgaggactcttgccaccctagtgccctaatgctcatatgtctcgctgactgttttgcttgaagcgccagatacgggacgcgcaattagtcggacaaggcgtgagacagtgtcatgcttattcaataagcaacttccaaagtcaaacttgagatggcaggccgcgcaggcggacacctgcatgaggagtcaacgtttgcttgctcatgtcgtaacagctaagtacgcggacagagtattttccaatgaatggagattagagttttatctctgccctataagtcgggagtgcatcaatcaagttcgctcggaaagtcgtttaccaacggtcaggtgtcgttgcattcttggtaaaggccagtggaaaccgacgccaggtcaccggtgcgccttacagactcgccttgcacctaccgagtatgtcctagatgcaggtggttgctattatgtaagaatcctctgccaatagggtatttcgcggaagaagacgagagatgtggctgtggctgacgggagggcaacgctccggctagcatccgtgcccagcgtgtttcgatgttcttggcaagatttcagttttgcccgactgctgcttggtcgcaatcaaaataagccaactcgaggacaagccgtaacggaaggcgcctcaaatactgataacgcaatggctgggctggcttagagaagcttgaccagtctgcgttaacgaagcaagtcccccagatatgccaacgcgatagctacgagagaccagcggatcggctattaagcaaaaatctgtttgtcccatgaccacagcggtacgcaatgtaccgttttgggaacggtaggcatggaggcccgttggccgccttctaggccagagactttgtttattggtttgatagattgttggagtcaccggctcttaagagattgtagcctaaatcagtccgttagatgcgagggaacgcggaaccggccaagtcgataccccggactctgggatcagtggaggtgggctgatggtgatggatcgcgggggaagatcggccgagagtggggtcatgtgggcatcaggatcggacactaagtgggcgagcgcagcgaacttacgcgagtttatccttctagttgatgtcagggaagtttggaagaaaatc

SEQ ID NO: 1642 - DNA, 1060 bp, Emericella nidulans
cagggttcaaactgatgctttcccgaagattcaatcacgcctttgttccggtttgtagggacttggaggcaggggtagtaatatgtgcggatgaaaggagcaagcaaagacataatgaagactgtcaacgtttcggtgattttctcgacgagggcctccaacccgggaatcttctctatgattgacgagacctttcggacgaccttgtcacggaattcgaggatagggtagattttcgcaatggtttccgctgggttaaaatctggcattccaggtaagccggtgggcttgttagctcctgacggtgcatctgccctgctctgctcgtgcacgccacggctttgctccgagtcatcgttgaacgagcgagtgaactggccagccgcgtagccaaggtcagcgccactgcggctgtttgaagactgctgggcttctgaacggcgtttgagtgcctctgcctcagcgaccagatcaccacatcccggaaccttccctaaaagccctgtaagggagttcaaagaattggcggacgagctcgattgtgcatctccaagcgcaatatccatctcattaatctccgactgagtaaaatgatccgacgcctctccaaggaccgaatgaaagaagtcaaccatgccgaaagttcccgtgaccaacggatagacatgatggccgcggatattcatctgggtctgggtgccggtgtgcgggaacacattgtggaagcccatctcccggagggcaagctcacagtagtttgtgtgcgctgcgaaatcctcaagggtatgcaaaccctggccgagacatcgaagtgcttcgaaaagatcctcctcgttgcccttgcggtgtccaccgctggtatacaatctcccataatgaatgctgcgagctaagctgtacttgatatacgccgcacttgtagcccagtctcctttctcattggcaatatagttcttcatcccagtctccgggtcgatttcgagttcgatttgtaaaaaaggcccgcgcaggcgctggtcgtattggcgagcatccaggttatgggggtaatctccaagaa

SEQ ID NO: 1643 - DNA, 225 bp, Emericella nidulans
ctacagtgagccaggattgtgccactgtactccagcctggccagacagagtgaggctctgtctcaaaaaaaaaaaaaacaaaattgggccgggtgcagtggctcatgcctgtaatcccagcactttgggaggccgaggcaggcagatcacaaggtcaggagatcaagaccatcctggctaacacggggaaaccccgtctctactaaaaaatacaacaaattagcc

SEQ ID NO: 1644 - DNA, 3344 bp, Emericella nidulans
tatggtttgttaaacataaagcgctgagatattacagggtaggctgacacctcattgtttatgggactattgatgaggctgcgtcgcttacttataacatgaaagaaagtcaacatgttcgaacataccctgaaggactagcgcccagcatgtcttattagtcgggccatccttagtcgggcatttaatcattccaagctgcgggttgcaatattaggtgaaatagttcagggggcatatgatagaaagaacggctaaaaacaacatgatattgcaccatatattcagtacgtccacattgccctataggtacgactatgatacttgctcgcaaccagcattcacacacttttagaatacaaacataacctatgctgttggttttctgctttaaatcggaccttgagggttcatctgtcatcatgcgaccacaaatgtctgccccgttcagtttatcacggttctggaatatatatcagagatagctattgatatctattgctaagtccttatttcctgatgttcatagatcaaatgaggctctgacggataacttgtaagggaaaaggctctatataccccagaacaaaccgaagctaactacccccctggagcagtcagatgggcactggatgagtttattatgagctgtatggtgtcttgacagcgattctagttagtaatcattggaaatacatgtccgtcgtggaaagcatatttatataggacatagctcaagaggacggccgtcagccttatagccaggttcctaagttgactgcacaatgttagcgacaaatacatatatacattctagaggaagggagaacttgccatgaacagccttgacttgcgtatacgctgccagagcgtattcacccaactcccgaccaatcccactctgcttgtacccgccaaaggggatagcaaaatgcgagtcttgagaactgttgatctacttaacttagcatccactctgatcggcatatcctaagaatagacaaggaccagacacttacccacaccatgcctgcctggattgcggccgcaacgcgatgagcccgcgtgatattttccgtgaacaccgccgccccaagcccatactcagtgtcattcgccttgttaatcgcatcctgctgcgtactgaaggactgaatgacgacaaagggaccaaatatctcctctcggacggcactcatctcccgcgtagtattcttgaagatcgtgggtgggacaaagtagcccttttcagagacaggctcgtcaccgagtaccagctgagcgccttcggatttggccgactgcacgtagctcaggatgcggtcgcgctgcgccttggagatctgagggccgtgagtaacggaggggtcgaattgcgacccgaccttgctgttctcgatcgtgtactgcttgaatttctcgacaaaggtatcatagatcgtctcttggacgtatatcctggaagtggccgtgcagatttggcccatgttgcctatatatctcccaatcagcttctatttcggtcctgttagtggctagattccaaggcactcactcatgataccaacatgggaccatttgacagcctggtctatatttgcgtcatcaaatacgagaagcggactcttgccgcctgtctctagagtgatcgctttcaaattgcccgcagcggccttcataatgacgcgcccggtgtttgtgctcccagtgaaagcgatcttgtcgacaccaggatggccggcgatggcggcgccggcgctggccccttcgccattcagcagattaacgacgcctgccgggaagccagcttcctttatcagagtcgcaaggtacagcaccgagagaggcgtctgctcggcggccttgaggacaacggtgttcccgcacgcgagcgcaggacctaatttccacgcggccatctacacaatcagcactggaaatcaagcggttcatgtttcagaaaggagaaatctcgaagaggagaaataccataacaggataattccacgggatgatttgcccgcacaccccgaggggttcatgtcgcgtatacgcgaacttcgcatcgcccgtatcgatcgtcgaaccgtggatcttgtcggcccacccgccatagtaccggaagacggcaatgacctcggctatgtcctcgcccagtgcctgctcgtacggcttcccgttatcccatgcgtcgatagtggcgaggatctccttgtcgcggtcacacaggtccgcaaggcggaggagcaggagcccgcgttcagagggggtgaggccgcgccattctgaggcaaacgcctggcgagcggccgcgacggcacggtcaacgtctttcgggccggcagaggaaactgttgcgattatagactcgtcatagggattcacggtggtcagggtcttgccggacgcggcggggacgaattcgttgttgatgaagaggcctggcaagcaggcgtaacgatgaagaaaccttagttggcgattggcatacctgttggctggctgtaactgactccgttaggagcagtcaattggactggttgtgccatggtgattgatagagatgggatctggatatggacacataacgcggactgtggcagaaactgctctatttatgtgcaccaagtccataaaatcgcagtccgcaaccctccgaaccacattctgcatacgggaagtatagtctcctgatccccgcagttgcttgaccagtatatcacgatagatacggatagagagtggtccagtccagtggcctcaaaagttgcctaatcggggaaagagctgatctccaccggcccacgctctgtcggctttatcttgccgcggcctggtattagtcgccactattattggccgtaggctttctgtccagtcaatcgcgccccggtttggccccagttgaaacggtgcaggtgacactgatccatatctggagcgacagtaggcggacagcttggggcccgcctccactttcagctaccaggtcgccgaaccagcgccctgggatatttctgttctatctatctatccttgtgacttacgaggctcgatttaattatgagtcggtattacggcaaataggaaaaccggcatcaaaagtaggatataccagcgtcgtttcatttccaatgcactatatacaattgcaatcacccttccacaaaaaaaaacctccaatcagaacggataatgagcctcgacttcaatctcaatctccattccctcgatccccagcttcccaatctccacgcacgtccacacaggccggtggttcggcagcacgcgcttgaagttcgccgtcaccacgtcaaagtcttcgacacatcgatatggtagct

SEQ ID NO: 1645 - DNA, 2448 bp, Emericella nidulans
agcaatggactttgtaaaccgtctccgcccgcctcaccttcgctccttcatggcccgccgcatccagaacccactttgccctcatcggctcgttcggcatcctcctacgtgtaacagcgccgaccaaagaagaagccgagttctaccgccttcggctctgcgagtaccgctggaccctgagcgttagcaaaaaggacgccgaattcctcgagtttgcgctcgagtctctagacaacgcaacggatctagatcatcatgtccctgctaaaccaggaatcgatgagctgatgaccagctcgtcaaaaccatacattgcttctacttcggccagatcggggacgacgcaggaagaggcgattctggatttggacccgcgctctgggaccggaggcacctcctctgttatctcggggctggcttcaccggctacctcggttagtgaggaaagtatgcacgatgcggctgttgctccgatgtaaccttgccaccaacgcccatcacccttacttactcctacccttacttactcttaccctacattcatgcctaatgacctcccgcttcgacccgacgcaagctttttacgaacattctcccaaagctaagccttacattgatacctcatgttacgatctggatgatcgtttgtccgcttatgaatgacttccctggatggaacgcaccacgcacggatggatgaattgaatacttcaacttggattttgacccatgtatatatttcttcatgacgggatgtttatagatcggaaggatggcttgattgaatggattttggatagatttataccatatcgtgtatacacttcattcatgatcgataatttatttgctcctgtagctcagcagtgtatcagtaaagaggagacaaaatgtaaccgtcccagaaacgccagacaatcacaaattcgggggatatattataatatatggaaagtagttgaatgacaggtgctgtaagaaacgaagcccgcaacgaagtccggctctccaagacggcacgaatcaggccgaaaatccattagactctgcttgggaatgatcaaagatacagcagtcaatgttctgaagccactctgaggaaagaatctcagtcgcgataggtcgcttcccaggatcagtgcttaacatggcgtatatcactttgcggccccgttcctgtggacagctattagtgatccggtgtccagacgcaagtaagatgggaaaggtgaggcatacatggcacgaatcctggataacagtattcgtcttctcggccttacgctcttcgacatacgccctgaagccctcgtccttctccgttgccgctttccacaggttccttcctgtcctcatagcgacgtatataacagccgcggcccagatatcgagggctctggggtcggatctggacatgtacctgtcgccctcgtcaaggtatcgctccggggcaagatacggtgtcggttctaagctgcggcgttcagtttccgccaggtcattggcatgctgagaatcatcaccatcgaaacggacgcgctcggcattcgcaaagtctgagatcttgaggcaagccctgtgtgtcaggaggaggttctccggcttcaggtcgcggtgggcgatgcctgatttgtgaaggtaggagatgccacgaagaagctgcttgaaaagacagtctgcctcttccgagggtaatctgtgcgagggaccagccgtgatcagggagtgaagatccccacccgcacagtactccatgcaagcggctagatttcctccgccgatggggaggagttcgaaggtcgagacgacgtgctggtggtgcagattggcgacgacggcgaactccgcattgacttgttttgtgtactcgtccgtgctctgaccgggactgcggcgaaagaccttgatggcatagtagcgatccagcggcgggcagtactggactttatgcgactggaggatcacagcgtggtcgctcaggcctgtgatctggcggatctcgccgtatttgcgagtgattagtgccattttgtccttctcgacgggctggtcttgctttgtgaggttcttctctgcccagtgctcccagtcctcgcgctgggatattgagcttgtcgaaatggagcttgaccggctcgtttttcctaagctgacgtactcgctcaggctttcccacgcccagcttcctcgtcttgagttgggcggatggaaatgctgatgcggcggattatgggcaccatcttttgcagcagatccgatactgatgtttcctgttgagtacttgcgtccggactcgatgcttgacccataaccatttctggggaggtcggcttcgtctgtatcgacaagtttgtttgttataggggggtggctagtctcctggacggagtgccgcaggaaccgctgcaagaacggctgaaagtctttaggcatgctgaaggcaaaaga

SEQ ID NO: 1646 - DNA, 6338 bp, Emericella nidulans
ggtacgaagacagatagggagtctttggcgtgtctaggtttttgggatcgggtatcaagtgccgtttatgagtgaaatcagaattggggatcagcccaacttgcttaaaattggggatcctgattgatcagcaacagctttgcatcagccctatattgtaaaggcacttgttacgcttgaagccgtctatcgcaaatacatctgcctcggtagcgataacggtcccatgcgttctctaatcttaatgctgagcattttagtcgttatttccaagttcatactctgtagctatactgctgcttgaaactatagggggcaatgaagaaaaaaaatcttgataagaaaattggggaatccccacttttcatcacttccccaaattggagacgatgactcaacatttagtttatgttatcggggagaccgggatatactccgaagtctatactggtttacaaatcagaaacgcatcgagaaccacagtttgatagacaatctaggaggatccaggagaccaacagaacgatgtgcgagacgtcacacacaaagctcagaaccggttcagtagtatcatagcagtcgcggtcactctcagcaggagagccctatccctatgatctcttcattgggagatggttcagtgtaataagcaccttacggcccgcgattcgcagttaccttggaacagataggatagggaacttgggaaccttgggcaacaaggactatttcttggcttcttggtcattggcctgggatacgattaggtttgatatgatgtgctttattgaaacagcctcgtcaagagcatgaaggcatctgggtgctctcccacttggtctctggggtatatattccactgcacctagcgaaggatagccgcaaccccagcctagcaactgcagaaggagcgggaatagcagaacgagaacgaactgcacaaagctactcgaccgctgacgaatggagcagtagccgtcgggattcgaggcaatgtagtgagacgcgccgtgaatgcagaaccactattggctgcttgtgcttgatcacgaatatatatatatatatatatgtttaatagtgtacttcttacagattctcgctctcgacggcggtctatgtttctagatcgtccaaacatcttaggcaagtcactaaatgatccgaagttatatgattctatagattggcaggtatctgtggcactgcccaaatactaataatggtgagcgaacgagcgaggataacctcagcattcgctactacccagcgccaacaacgacgcaaatccaccagtatctgccgcagatagtcaaacagtgaagaaggctgagcaaagtccaggctattttatgcattgttcgcgtatgagcagcgggttctctgcctggcctcagacaaacaccgtatgcagtgttgagccggcagctcatccagtcgaaatctggttgaataaatgtgggtactataacggacgctttttcgccaatgtagacccagtcacagggaaagacgctccgaagaacttggcttggggcgatgcgtcctggtatgctataatgctgcccttttgggttgtggtccggctgcaggtaccgagtgaactggccgccagtctacgctgacattcggagagtcgagtctcgaaccttgcgtttatggatgtagatagtgcagagtggattccggaaggcagttcagctacagggccaggaatgcaggcctgggctgtcgggactataaccttggaagttggttggcaggaatgctaggctaggaacaggtacaggcacgactctccactgtacctggagcatattctggcgcaggatccctaaatgactgtcaagctcgtttcaaatcatcatcaagcattcttccgtataatttcttctcgtgagtttcttgtttttcacactattactgtctacatggaatgctagaggcatacctctggatcaacttgatgtgctcatgtgattgttaggcattcgaaggagtttctttgctggtggattgatcagtgtcctgattgtttgatctataaattctgggcttgttcctggtctatcaacttcgcatcgacaacgacgacaacaatatccgacaccagctcgacaacccagctcgacaacaaagcttctttccagatctttttcttttctggatattattactattattacctactttactgttctatatcacttcctgtgtcgatattctatctgttctaagatctgcacatacatacgtacgtgtcgtgtccttcccgctgaatccagccaagtcagatactaaactatcccagagtctgttcaaaatgcaactcaccaagaccctcagcctgcttgccgcatcgctctctgtcctcctcgcgcctgtcaccgcggcgcccgctcccggcaccagctgccacgttggcgccagctggcccgaccaccacgactgccacaagttcttcgagtgcgctgcgggcggccatcccgtgcgcaagacctgcggccccggcaccgcgtatagtcccgagatcggcgtttgcgattatgagtggaaggtccgttcttgccgggctcattcctggacccacggtgccgaggaaggtgcttctggttcacattctgggtgggacaagtcgaagaacgagaagggccatgagggtcattggtctggcgctgggcgtcactgagcatctactttatacctttattcgagtgggaattatcctgtctaccttagtggtcgggcgagtggtgtcttgttttacgcttaccctctacaaactaattttaatattcacattgtagagttagggtgctacaatacttattttaacattatgtttaatgatgtctcctgactccagcctaagaagaatggggcttcagtggatagaatgactaccgaatcatagatggcctacgcagatactcgaactatctgccttgcttccccaggcagaattccgttcaccgtttatacaggtctgataatcctagcttaacatgcacatgctgtggacaaggcaccgggacggctctagtgtgcttgtcggcaatcctgacatgcctctagcactaacttcggtagtactcctggctcgcttttggaagccttggaagctgcagctaccgcagttaacgctcctctccagacaaagctagtggtgagctggaccaggcttggatttccctagagcagatagagcccgactctgggggattgaaatgcacttggcaggtgctggccgcttcacctccccggtatctcgtggttctgctttctgggcaactaggttgtaagcacgcatgctgcggattcttcaatttttcaggaatggagtaggctcaggcgagaaagatagatatctacgcatcaagcaactggagaacactgggccacaaggcagggacactcggtgcatctaagtgatcaggtttaaaagcagaaacacggagagaggcgattgaatggatttcaagcttcctttagtttattgctgatactgatgtcctcacaacgtctcttcaactttccgactcctcttgggccgaccttcatgcagacttaaggagaatacccccgtggaaaagaacattgcagaccagcccagtgatcgtgattgatcattacggcttcaattttgtcagcggagatcaaaagccctcaccctttgtgccttttctctgacggttctgccatcatatgtacgaagtaaatgcacgcccatcccccgcgccagtcccaaccctaaatacccaggtttagtgagaccactacattcaccctccccccactacgaggcaagcaagcggcaatagggcaattggtgtgaaaataccaggcttaaactctgacgagttatggttgcgttaggtcctttccttccgagtccatgataattattgcatgattggttaatatgcttatgtacattgaatccctttccaaccagcaatatgacgaatatataaaatagctatatatgcgaacgccatcaagccgccaaagtgataagggccgcatttaccatgcgcaaggcgaggccgtctgttcttagtgagtatatgccgtctaaaacatatgagcctaaataactaaacccgctcctcagcaacatttaccgtagagtcaacatcgaacgtctgcatcacctccgtcccgcgatagatctccatccgcgattctggttctggcccagctccaagcgctagctctttactcgacgcagctgacgtgccgcgagcacggccatgatcaagcgtcagctgctcctggctgttatttgcatcgtgcgccgtcgccgagtgcgaatgctgggtctgaacttgtgtgaccatgatcggaagcttatctggacgaagtgtgttccggcccgtctcgtcaaatgtggataaagggaaggacatgtcgtggacgccacgcggacgccggaaatagcgcgtcggcttgggagtactggtcgaggcggaattgccgcggctcgttacgatgccgaaccagatgcgaaagagagggccgagcgtggcaaggttgccggctatgattccgaggctgagctcaatgtaagcccagatgagcatgtcgacggcggcatctgaggtatccggtgttagggggttgataggacgggaaggccagggggataacgcacagagggcatcagaagcagcgtatccgtccatatatgggatgcggacgacgatggcaacagtagcactagctagtcagcggaatcgcagtagatatttcgtattgtgaggtataccagacagttagacacaagatgctcaacaccgcgagcttggactgtttcggcatctgaagcttccaaacgatcagggccggtaggatcacaccaagacagatatcgatgatcagtaagctacctgttgccacatacgcgatgatcttgctttgctttgaagttatgcaggtccccttgaaccgcgggtccagggtcatttgattccaattatacgagatgggccagcaccggactatatcggcgagaataacataggcgccgtgaatcgcagtatatatgagcaagatccacagaagtcgagtatggaatggcttgactgtaagtcgcatcagaaacaggcagaccgatatcttgcaaaggtctgtcgctaagccgtagccgagctgagcgatccacatgtactatctccagtcagcacccaccgaaagacagaatggagaagatcttgggattcagctctccaggcaagcggtatctccaaaccttcaccgcgactgctatccgctggaaatctgtatccagtccgagtttgcgccgaggccgtaaaagctgcctccaatgacacacgatacatgcatgatgtagcagagctgcagttatttccccattgtcagctgcattccctgaagcaaggcctggtaagaagttgcataccagcgctatgaccatgaccccgtcatcccagccgactgctctgatgactttggcgcgcatgtagcaacgcagtaccatggttatgcagaccaacggaatgaaagtaatcgcaatcgctctgagctgccctgatcgatcatcgtggtcggccatattggctgtggaaaaatccccggctctgatgtttccaaggggtgccacagctgatatacggctatggtacggcgcaccatgaggccattcttgcagtgccagaagtactgacaagactcgtttatcttgacagttatgacgaaacggtaactggtaagagagcaatgctcaagcaaagctagcttgagccaacccagcgaaatagggagtgtgatagagcaatggcggggataggacgagatatgtcaaatgcggtaccgagtcagcatcaaattagttcgatagtccaaggccattatcattccctcctgccatcggttcttggtcaatacaatcacatagtgtggtgcaagagcaagcagcatggcccaccgcgagccgtcataactgacaccttgcataaaatccttggaagcagctgccatttattgaaggggcgtctatatcactcgaggcaaatgaataggtcatatctcagtctgcggcagggcacccgctaacggcgccgaggctggaaaatctgactcgtcttctgcagtgatcagagttgacaacttgcgaccagattaacaacaaacctgctgtcaggtacaaatgccattggcgggtcttcagtagccatttacgcatagttgacctgtcgtcttcaaacaaagacgaattggaatcactgacccatggcgccagtggatcaagagttggggttagtgcgaggatctgtcacttttcagtggtgcgttaccgggactgagaaggaaccaat

SEQ ID NO: 1647 - DNA, 2509 bp, Emericella nidulans
gcgactccagcacatactgagactagttcagtctgtcttgatcgtctcgccaagtagtttcgacgacggtattccccaaaatgtccggtatctcttcagtttgtgagtttaagaccgacaagcagcatggatagttgacctagggactcagtttcatgctttgtataccggtcactgatcaagaccgtctcctaccagcggcgactcctacactaccacaagcttcaatgcctcctccatccagccttcaccagagaaccctatggggaatccacctcttggtacggtacatgatcctgtccgttcagtggaaagacatgacagattaacccgacaggttccggcacggccgcagactcaatcaactgggttggctacctggcaacagtgtacaacgataccacagtgctgagctacaatcatgcagtgtacggtgcgacagtcaataacacccttgttccaggcgtgccccgcgatctagcctaccaggtgtctcgcgtcttcgaacctcactactgtcttcctgccgggtcagagattgaggccgaggcaggggaaagctggacgccagaagcggccctgttcactgtctggatcggaatcaacgagtgagtgcgctgctgcagctccagacctgaaagtgatgactggaagtatcgtacttatattttgttccttggttgaacagcatttactccctgtcgcagcgcaccgccccgttcaaagacattcccagtatcttgcaaagctacttcgatctcatcgaccggttgcatgactgcggtgccagagatttcctcatattcaacgttccaccctgcgaccgcacccgaagatcctggccctcgagccgtcagatatccggcgttacggcgctgtgaccgaagagtttaatcgccagctcttgaatgccgtagagcaatggcgattggctaatgtggacgtgggttcaagcgatttcccttttttccccttcgttctagcaatccgctcccccgaacttggcaggggcttgacaatgactgtctctattctagtccacaatggctacttatgacacctggtcattctttacccaaatccttgacagcccgcagggatatggattcgtggacagcaagtgcataggggccaagaaaagatgtgtctggtgggatgatttccacccagtctcggccttgcatcggcttctcgctgctgatattgggaagattttgggatggccggatgaatgattgtctgagactgccatttcatgctttacatgtttttattggctatagctgcgttagacagcatctgtatatgtcagggtgaatctagatccccttccactgcccttcgtccaccccttccgggcatgtcttccattgttgcactcgaaagggaacgacgatacacctcattcagtcatagataattcaaccatggtagacttgtgacatgcttgagggcctatctaaacttcgcgcacgaggcatgatcgatcagaacaattcagaagccgccaacgagtacctctgttgacacaagaagagactcaggacgtaaagcatacctgatcgtatatctggatagagattcgcccgggggctcctgtaattttagagagctgaaagtctgtacgacattcagctctgtgagtccgaacccccaaaattgtagtttgcagctagttatgttcttattcgttgccttcggcacatgcttcatcagactggtcggctctggacatccaaggttccggccatcgccggcttgggtgatgctcatcagtggtcttactctcgaccgcagctggttggtgtaacggtaggtatcaggatcccaggcacctgctgcatgtatttgatcataatcattagcgaagccaacccgtgatggccacagcactttgcaagaacaatatatacgcgataatgtatagcaattgctgtatgagaacagcaggtacataagactgactggccgagcagagagtccaagaaagcgagcgtgcggccagctcatattgctaccctcattaggcgcagacgcccaattgaagtcgccagtctgctttattcgattcaggtagacgtgagggcaattcatgtcatccgggtcggtccagacaatatcgcacgctccatcaccatcccaatcaaccaggtgcaagtcccgccgatcgacatcgcgaccaatcgcggggatagcggcggggtcgaaaatcacatagttgggccctcaatagctttcatcctcgttggggaaacgagctgaggcccaggtgatggaggcgcccggggggggagggggattcgaagtggtacatcgctcgaggattgacgaggaaggagacacgtatggacgaggagtaattggctgggccgtatatggtatcggcaaaggcgccatacagctgtaggcagaacagaaagaggccgcaccagggcaccgaccgtgagattatcttgaggacccttgcttcagattctggatgactgaggtagcttgaagtagggcatga

SEQ ID NO: 1648 - DNA, 1760 bp, Emericella nidulans
ttattaataatgtcaagatagattttattgaataatagtattttagatattatatttaaaaattatatttaattgaatatataataaattatttatattatattgataagtatatataatgcaataatacaatattagtctatatgttatacaattttatttataatatataaatataatatgttgattaattatatattatatatcaattaaaaatatttataatttataattataaattataatataattattataattgtatttaattgacaaaaagggtattaataaattaagatatttatactagaaataatatattttatttaaatatatatttttaaattaattaattatatatatactttttttatattaggtatattaaaataagttttataataatattagattagatattattatattaaaaattatttatatatatttaatattattataattattattttactatagtattataaattataaaatttatttataaattaatatatttattaaatattttgtttatattcttaataaaaaatattattattaaaaagataaaatttaaatattatgttattatatatattttatataataataaattaataatattaaattatagttaaattattgtaattatatatccacattttgttgttctagtattgacaaatattcaaaatccgggccgttcccgttcggctgggagtgggacgcggtggagtggtttctggagtggatcgcggactgggacaagatagtagtggaagtatgcatacctgcttcaccagagtctccaaagtgagattgcagctcggtagatttaggcctccggagcggcctggattcaaccgagcgaggtcgagagactgagatatatggcgccgcaggggcgggagccaggagtcgcatgaaaggagttgagaaaaaattgacaagagaagtccccaaggccagcatgagaaggaaccggccggtgtcgccgtggaacagaacagccgacattgtcgaccagaagaaggcgctcagaccgaacgcggcaaggggaaacgctgtcgccgtcccacggtgctcggggaaattagtggcagcttatcgttattagctgtgttttctgggttcaggccactgtagtggacgcaccggtcttgatcgaggctccaaaggcagagcagctcccaaaacctgtcaggaaagagaaaaatgacatgaagaaaacccccatagaaccttgaccaccattataagctgtgacatgttagcgactgcccttcgctccgagtgaagtgaaagtattggcgccataccaagatgcagcggaaagtatcccagccccagagctacagccccaattagggttgtaagtcgaggcccgcggttgtccgttaagaggcccatcggaacaccacacgcatacattcccagattaccggctgcgccctacatcatgttaggcgatatgcgaccttcctcgggcaggatattcccttactataaggttgctttgggtggatgagagcttcatcttctgcgcaaattggggcgcccatgccgagtacgcatactgtctacattttagcatctctcgcctcgatcagctcaaggctaaacccatacgtttgtgccacaagcaagagccaccagtgtcgccgccacaacggagataatccgtttcattttctgggccgtgtcggtcatcgcgtcgttttggggataattaacacccgatgagtgtctatcgccta

SEQ ID NO: 1649 - DNA, 1438 bp, Emericella nidulans
gcggcgctgcccctctcgatccctcctctgtgaaaatgttcgagaacgaccccgtctccgccaggttcctgaaagagcaggaatctctctggaagaatacactgaagctggaggaggtgcgcccccgcgcggagaagggagagttcgatgccattttctatgtcggagggcatgggcgtatgattccccactagccttcaagaatcaggggttgaaatgctaacgactgtcggtgaacagcaatgttcgatctcgtgactgacaaaacctccattgcgctaatccagtcctttgctaaggccaagaagccagtcagcgctgtctgccacggtccctgcgttttcgtgaatgtcactacaccctccggcaaaccgctcgtcgcagatgcggaagtcaccgggttctcgaatgtggaggaggaccaggtcgatctgtccaaggtgatgccgtttatgctggaggatgagctgaacaagaaatcgggcggcaagtatgtcaaggctgatcagccatggggagagaggtttgtggtcagtcaggtgaaggagtgggggcggtccgctcatcacgggacagaatccggcatgtgcgacgggagatggtaaggcacttctggaagctctgggcgcgtgaggggcctatgacaacggatgatgcgctgagtaatatgggggaggctgaccgactgccaccgacctatgcagatgtcacccactaaccatttctatatggaacataaagataacatactagattgataacataataacagagagaggtctttgtcggcgggagccaagctcgattagaacctagtgcacaggcctaactggacgactgtcttttctatgaaaatccactggtctctgagtaacccctataaaatcttgttcagggattaggtggcactacctcccacgcctcattaacgcttcctcgaactttgccctgatttttgggcatttaccaacttgtgcaatgaccgcataagtctttgtcaatttaaaaaacaaccgtgttcgcccaattaaaccccagatttccttgtgccttgccggttcaaccggcccagaaacacaccatttccaattctcaacaacccctttcatctttggtttttttccacacattttaaaggtaaatctatgatcggttccattaaaaatcccctctgccaattcctaacttattcgaagttcaaaaccttgtttcgaacccccacccaaccatttggtgctagatggaatgcatttggtaaaactgctaaaactccctttgtcttccatttataccgtctaccccatgtgtttccatatcttcggtgttttttaagctaatggccctcccctccttaggatttcctatatgtgtgagctcttttattaaagttccctctctctgactttctttattctttctctctttacacttgttcatc

SEQ ID NO: 1650 - DNA, 2033 bp, Emericella nidulans
cccgtcatgcgcgtaaccgatgcgccgtccttatttcgtagcgcggcgagtctggggccaacccccgcaagcccgtccactctcgtcgtgcaggcctgcatggtgcggccacaccaagctccttggagcgttttgagaacagaattgcacgggctgcagcaaggttcatcgaccgtgaacaccagggtgtgccatataagaaggagatctccccgtgtgtcaccctgtccggcggcccatccctcacgccaacgactatccacatctgaccacgagcacgaccatcgttccaatgggtgagatcaacgaagagaagcatgatatctcggtcaccgagggggctaaggtggccacgatgcatggcatgactgcggagaagccgggggccaccaccaagtctgtcttcaatgtgagcacagcgacaggttctatagctggcgacggctgacctttccaggccgagctgttcgctgccatcaatgagaccaagatcgagagatggagcaagaccagtatccacctatattgtacgtgtcccagagctcgacctcggctgaacaccactgacaggcgcagtctgtatattcgtctccttctgctgtgcctgcgccaatggctatgacggtaagcttctgccattagtacggactgcatgggcactgacaatataggctcgctcatgggcgccgtcttcgccatggaccactaccaggccaccttcaactacgacatgaccggccagaaggtctctgtcgtcacctcgctctacacagtgtacgctcccgtcagaaggccatgtcttttcaaatccagaccagctaacgaattagtggctcaatggttgcaactcccttttcagctgttatttccgacaatttcggccgtcgcaagtgcatgttcgtaggcggatgggtgattatcattggatctatcgtcatcgcaacggcaagcaccctcgctcatttcatcgtcggtcgtttcattctcggtttcggcatccagattatggtcgtgtccgccccggcctacgcggcagagatttcgccccctcactggcgcggtcgtgcagtcggtaagtcgcaaaactttggttacaaggatcccatactcatctgtcctattcaggcttgtataactgcggctggttcggtggctctatccccgccgcgtgcgtgacctacggatgcaactacattgacagcaactggtcatggcgcgtgcctttcttgttgcagtgcttcgcctcagttatcgtcatcatctccgtctggttcatccctgagtccccccgttggctcatcgcccacggcaaggaggaagaggcgatcgccatcctggccaaataccacggcaatggcgaccccaacgctcgactagtgcgtctagaggctgatgagatgcgtgaaggtattcgccaggacggtatcgacaagagatggtgggattgtacgtactttggccctatcttctcgattcctagctgaccgagcaagaccgtcccttcctcctttcccacaacggccgctggcgatttgcccaggtcatcatgatctccatcttcggtcaatggtccggtaacggtctcggatacttcaacccggccatctacgaggccctcggctacacctccagctccatgcagctcttgctcaacctcgtcaactcgatcgtgggtgcaatcggtgctttgacagctgtgtactattgcgacaggatgcccagacgaactgtgcttgtatggggaacactcggtgcgcactccctagcttgactctgtccatagccatcgaaagctaaccaaaggtatctccaggctgcgcagtttgcatggccgtcaacgctggcgtttcccagcctctgatcccgcagcgtaacgcaggcgaaaccctcgacccgaccttcggccgaaccgcgctcgccttctactacctcttccaggttgtcttctccttcacctacactcctctccagggtgttgtccctgccgaagccctggagactacacgcgcgccaagggtctcgctctgtcggga

SEQ ID NO: 1651 - DNA, 3286 bp, Emericella nidulans
tacttttacactagcactcctacctaactattgcagcaaacatgtctcaaccctaaagcaccatttatagcaatatccttgaactgggatctagagcggccagaccaggcggaaaccccgccgccaatcctaaaccccagagacgtattacaggttgcgttcctcgttgagcaagaagaaggccagcatgaaggactagaggccctgcagaaggacctgcggtgtgacggccgcgctgtgctgggccaattatcaatagagtggaggagctctatgggcgataagggatttttgacgactggtaacttgctaacgcggaaacgagcgtgatgcggttcttataacatagcacagcgaggcgcactgtgcaaatatcacttttacccttaccaagttgccagaaatggacggtttttagacccctgctcgtatggctgcaggaaggtaattccgcggtcatcttttgcgaattgccgcatacaaagaaactgatcaagatctcacgggcagtggaggcttgtagtcttgacccgggctttctgccggctggcgttacgcggcgctggtgtttgctcggtggcggagccgcctgccgacaagtgggattggggctctcaactgggctttggctgcggctctgttgtaatttgacgaccagtcaatttttgtgcgaggagtgctagaacataatcattggttcggagttttgcttctaaccgtgctctctactgcagcacagtgtatctcatagcattccacaatttcaaatcatacttagcaaatcgaatcaatctagccaagcctcataaaataatatctttggctgccctttatgtcatgcaatagtttccacgagccagcgtatggctcccgttccagattatcaatgcttagacgccgatgatcctataatgtgcttccaacctaaatcgctatcttcgtcatagcttaatccacttcgctggtccgagttcccttcattccttcatccccagcagaaccgccagacgagaatagaattgacatgaaagtaagacacaaatagacaaaatgtcaatttatggtccacactgaatgctaaatgtgaccgggaacgtggtaggcactgagaaattcgggtgcatgcttatcgtcctgttcattcttttcttactgtcggacccggttttagtccgatgtcgaagacgagcttctacggaaataggtactgaaaggttctgttgtagtaattgagaaggcctttagccagtgttttgcgggaagggatctgaattcactgaaaggttggccgagaactctggagtatatagctagatcatacgactttgactgtatgatctggacaatcggcattcaaatatatatcagcctagcagcttacgctttccaagcctcaagacttctatctctttctcgtcccatgcattgatacatgccaacccttgtactcaagtgaagcaaagaactcacccctaagctcttcatcaatactacgtctccaatccatgctctgggcgagcaagaggaggcctgcatcttgcagaatcccaacattaccaacttctgcacaaagctcaagcccaaagacatcatagttgtcagttccatacatctgcggtccactgctatcaccccgccagcccacttgcaaccagagtcgtttcgcagggttgatgggggatactcgtcgctttcgatcttgaccttgagcactcagggtcaccttcaaactgtcaagggaacctagcctatcttcgctgccttaccatgtagccagaggtggagaaggcgttggtagatctttgctcgtatatttggtatcttgtcgctgcggaccgttatatcatgctagaatgcgaacggggatggtgtaagtcgtgagggaagtggaagaagctggggcgaagacgggttcaagtagagaagagcgtttcaagtggcacgccctatatattctgttgagatggacagcatcaatttaagtgtaactgctcaatatcaaccgctaaaaatctagaataaccgagagcctgattatagatacggcggccattaaggtaccccatatacctacttcaatcctaatggggctattcgcatcttctgggattttgagtctgtgatatctgtactaagactgaatttgtgtcgagatggctttagcatccctagcaaagccagaaatgctccagcggttgtgagcttcttccatcgtatacaaacagaagttcatagcttggtatgctgcctgcaactctctaaagtattattccccttggatattgccattaatgcagtctctcaaacaagttaaatcagacaaagacgcgagtcctagcaagtttgagtactctgtaatacttctactaaacaagcgtctttgaagagactaggttagatgcggtcttgcatcgaaaccgtctgctgggttggcgtttcggaacatagttgatgcatgagtagaagaaactaggcagatgagcaacctatacgtgatccactttaaagtctatctagcttgattcttggttgagccctgagtcttggcaatagactccgccttatggagagcgctatcggaattcgggcctaactgtggctccctagtcactgacaggtaggtaatccctcgcatatgattggtatgcagctgacaagtcaggctttttcggcttcccattacggcactgctctccgggttcgccggctgccttccatatggtgatatctatagcagcctattgaggctgagccacggcggcaactggggcgcaacgcgccgtgccgtgccgcacagccccaccattatcgcagtaaatgattggctgtaatgcccccgtgggcatattgcccagctgtaggctgaccgcacgcattctatggtttggacgatatcgttgcaatggcccaatagagactcatgcagcctaaagggttggcatgtgcccagacataaatactccgatactacccgtcaagccgcagacactcttcggccttaaggtgcagatacagcacgagatatctcagctcctacatctacaggctcaaaaagaagggttacagtcacaattgcagtcaaaatatggactcgaaaggccctaccaacatcccacatttctgccacgcttgtcagcgaacctttgtcgacgcaaacgcgttacgcatgcatcgtcgctcctccaaagcacatactaccgaacgtccagtttcaccaacaaaaccaatcccaggaaccaggcttatgccggtatagtttatattaacatcaacattaagtactgtc

SEQ ID NO: 1652 - DNA, 2823 bp, Emericella nidulans
tgcagctagagaccgttccgcgcaacggagtaatttcaatcctgccctaagcccgctgcagccgtgagttatagtattagggcgcgcaatcgagaagaccctaaaccgagtatgccagcgctaagtaattggagacagcgcagaagcgtacctcccaaatcttactagtgcactttctaaccgcttcaggttttactaacttgatctcgattccacttcttggtcctctcagcgccaaccacttcactcaacaaccgccctccatcagtctaataagtacaggagcgggaccaattctacaaatctagatacttgagggcctctagtgagatttcgagtaacatggtttcgcaccttgagctccatacgccaagcaaaccacgtaaacaggcctgtctggcatgtcgtcggcgaaagaagcgttgcgatgtgagtctcatctgtctaccaacccatatagccgtacttgcattgactaataagggctatcgtcccgcgtgttcggcgtgcattggatggggcgttggatgcgtctatgcgtcggatcatcagccctcaatggactacggatttcccacccccgacagcaccctggggatggacttggccgcatttgtccagaatatgcccggcgctgcatcgtttgattttaccccggatctcgcgctgacctcctcggaggcaaatcatggggtgccgggtctagagagcaacagtccaatgccgatggtggaccagctgccactggctggacagaccgtccagctgatagacgaattctttgtgcgttgtcatccacagttgccctgtattcataaggagacgtttctggctcgtacacaagggccagtaccaatgccgctagaatgggccatcctagccaccgcagcaagagcacatcgcggcgcgacggccccatatcgagcagacatgtttttgcaggcggccgtaaattcgcttgcacaaagtcctcttcttcgagtaagcggttttctggttgtgtcttttacttgttcagtatcagtagcgcaagcttacaaagacaggaaaacgtcttgagagacctgcaagcagcagtatggtgcgtgtattcgctctactattcaggagagatcacgagagctgttatgctattggcgcaacgtactcgctagcctgtctgaacggactggacagactggatgagcccggtccgaacgtcccggcaaccatgcacctctcccccatagagaaggaagaatgccgaggaacgctttgggcactcttcgttctcgaccgacagataaactacctcatgggccgccactttgtcattgacgatgtgcgatggtgtgtaaactacccactagatgatgcgtcgcttcagagtcaacctggattgcgccctgacttagaaccggaacgatgctacagtagcgacttggcagcgctggcgtgggagaaacccaacatcgctattgggactgctttacctcgtctagtctgtaaggccagcgtcatgatcggccgcatcgcaacatacaagagcatcaaccccatgcctagcgccacccacagcgcccagaagcggcaggccgacttccacgagcttcagtctgccctcgcctgcctctgggtgtctctacctgcttgtgtccacaacgtctccgaggttccaccggggtgcgtaaaccagagcgtgtggctgctgatcacactgcacacctgctccacgcttctattctatatcacagatgcggagcgcaggagtcccggcagtgatcaatattccaccgagcgcgagaacttcacctgtacttacaaatccgtgaacaaagtcgtaactgcactgcgcgcactgtcgggccttgcaactgatgcgattctaaatccgatgctggccccctcttacttctcgtgctgtcgattcattctactacagtggcgccgctcgcagcagcaggagtttcggttggatctggggcttgtgctgagactgctggagcagatggctaataagcaggcggggatggcaagaatctataaggagatcattgagcaggagctggggagagacttggatgtgcagggtggaggtgaccttggtcaggccctggtgaaaacagaatactgcttcatgatctaaagcaaacacaaacggccagcttcgccggcactttcgaggagccggctccaacttcaccaggaggcttctatccggcttcaaatcacgttcggcctgaatgttcttggcggtatatggtccattctgagtgcgccaacaccttaactcaacttggttgccggataaagtgcagcccaggagcgttggaagtcatgtatcccaatccgtcaggtaaagcaccacctcgtcacgcgtatcaagttgcaatagaattcgtcaacacgtctggtttgggtttaacctctatcaccggtgtgttttgatcgaagttactacaaccataactagcaaacgccggttctttcggcaatcaacagttcaagcagttatgacctagtcggtcttccacgccaaggactataccgatacagctcgcggaaagctcactgagtgcagctccggtaggggatttctttctagacggacgaggaatctttgatccctgagagggatctggtccgctttgattcgtggtcttgaacctttcaactccatgcaatattggcgcaccatcccagttcctggccaacaagcgcgaagaattgttacagatatcacttctctctggaaagacagtggcatgctctcgcacgagatggtccatggtgttactatcgtaaggttgaagagaacagatatagaaatggttggtatattga

SEQ ID NO: 1653 - DNA, 1459 bp, Emericella nidulans
aaaaagaagaagaagaaacataagaaaaagaagaagccgaacttcaagatccctgatcagccgtctagaaccgacctccctggtcctgcgtattcaaaccagccacttacatggcttagatacgcccagtattatgccaaccttaccgacatctacgagacggcagccgctcccgaaacccaggaagagggctctcctgccgtcaaagccaagaacaaaccaatcaacatcgacatataccaaatcgaatatgatactagagacgatggcatatacagcatgaaagacctaaccgtgcgcagttacttccaacttgccaagcggattgcgagcaagaatccacgcgcggacaacttcaccagcgattctgatgccgacgacgatgacgaaaataaatcaccagatactacaaatataaattatacgaaaccgaagaataagacgaagaaaccgcgcataaaccgcttgtggaggacattcctggacagagcatttgttagctttttgggtgatgacgaacttgacgacattcagatctagatacggcattgcattatgattttgtaacagtgtatttcctggctttggcgtggccttgatctagttagcgggttctattagatcttgattatgcattgcctttcccttgggttgatagtatgttcagacctatgtttcaccagatcgatcgtaggtagtcttcacctcaccgctatctcacgagtcgcaactgggaggagattggaggcgacagaggtcgattctagtggccgtcgcctcgcgagttttcgtgccaactcttgaagagaggataccgagggcgcccgctccagttaggctcgacggctggggcttgtgcttggcctgggatacgagtcctcagtagagcatcagttcgtaacgggacggctcggcgagaatggtctggtcggcgctgtttcctcgacgctccatcctcaattcctatccagccagagacattcgcagacctctcatcggatccaagaattctatttttatttttatttttatttttggggggcaagaccgtatattcgctttgaagggcactggaggcaggtcccatcagtgtgttgagctcgaagctgctaatatcgaattccctcgcgaagaaacggttatatgccaaacccacttcgcctcttagttactaaaattaaaactaatacagtaacttatgaaaataaattgatgtggaattaacccacattggctgagcctcagtcccgtgtctgctgcaattcgagctaaaatgctcgatggcttcacgctggccgtcagagcgaggctttgtctctcgttgtcttcccgtctcatccccaactgaaactcatggctgcgtttgcaagtcaaccagtcttctgggatcatggcgcctttgtcagtcaagagggcggtgacatgatttggctgtttatccccgatgccacgctgcacc

SEQ ID NO: 1654 - DNA, 2203 bp, Emericella nidulans
acgacacaggtgtgagatgcaagagtagggacgcagcagttgcgaggtgttgcagaaatgaagaagcgatggaaacgatgaagcggaacccgtcacttgggcgttggcggtggtgacgatggcagtcccagtccggagagctacacaccaccatcgtgcagccactagttcttctcgaccgctactctcatttctctacataattcaagcgctcataacattcgtcacagaacaagttgatggtgcttgtcatgtatacgctccttcactattgcccacgagttcccgaacattgatgctacgcagacttattttccggggactgcacattgctgctcttggcaagccaagctgatctgctatcgaggaccttcgcacctcacaagatttgtgtaggctgtgaaggtcgggcctagtgcttttcaaggttctcatgtcctcaagaatcactcgcgttgttgtgccgcggcgcaagctacagcattccgttcgctctccgccaatgttcgaagggcatactgtgcttgaactggaccgaggggaagctgtcaatcaagcttacaataccaaatacattgacggtgcagatagataggaccacccgaagaacaagttgccgcttaatacatatcctactgcttggacgattggccatgaaacggtgttaaacacctcgctcgaccagctccctttccactctggataacggcttcttttcgcgcgactggcgataaagccttcctatctcactcaaaagttacctatggcaattgacgagcgacagcaactgggtgctgtatcggaatcctcgtccggtcactcgtcgtgagggtctacacggagcaggaggtttgttgcttggcacataacccctacacataaacctatcgtcgtcgcattgggtgtgagagcctataaattagggcttccttccgtcatgaatctgaattggctattgaggtcccggacttaaggagttggactccggaggctgtgtttttgctgtctttgccatagaagactaggtcaaaggtgtatgggagcagactcccagtcaacggctgtagaccacacctcggtcctggctggataaaagggacggctccgtatctagatcctgggtggggcatatggttcttaccagagtccggtgattaaacgctgaattcctgtgatggagcagaacctcggagtatgctccgatgtcagtacattaaattttgtagcgatccacgtgatttctattttgcgtccgcaataggtcttctgatacggctgaagaaatatagtacgtggtccagtgcctatagacggaaagtattttcgtacggttggctcccaaggcaataggtcaacctcgcatacggagaataacggtacggtcctgaaggaatgaggggatgtattctccttctccgagggccagaaggggaacaggcccgcactgatccggcgaaaatttcccctctcgagtcttcgctctcccccccacacggctgactaacccttccattcttgcccgcatccagccagccagccttttgtcgccgcccttggttcgggctactgtcatcttcccttcttcatcttcatgccgctctcgactgaaatattcagtctcttgctctgatttacagttactacgcgcagacacgctgcacatctccgcgatcatgaccgaatccactcaagaacagggcaacgatggccagcgaatgcccccgccccggcgacccccgttgaggattacgtcttccctgaatatcgcctgaagcgtgtgatggatgacccggaaaagacgccgctattgcttatagcttgcggttcattctcacctattacgttcctgcacctgcgcatgttcgaaatggccgccgattacgtcaaactgagcacagatttcgaaataattggaggttatctttcgcccgtctcggacgcctaccgcaaggcaggtcttgcgagtgccaatcacaggtagttactttaacacacttcttccatagttactatccaggactgatctggcggctttagaattgcaatgtgccaacgagccgtggaccaaacgtcagactggatgatggtggatacatgggagccgatgcacaaggagtaccagccaactgccatcgtactggatcattttgactacgagataacactgtccgcaaaggtatcgataccggaaaaggcactcgaa

SEQ ID NO: 1655 - DNA, 10311 bp, Emericella nidulans
ggcaccaccacgcggaaccttcataagaccggatgattactccattgacgacctagatattctgcaaaagacgtctacgcgcgtgctgggagagattatacgaagatctgtccgataacggcttctccagtgacacgttgtgtaattgagggagccagctgctcgctcagagtatctttgacatcatccacgagtttgtagataatattatgatccatgatattgacaccgaggttctgtgccatccgactcatggtcgtgtcaataggcatgttgaagcagacgatatggccgttggcagcggcggcaagctcaatatctgactcgctgatgggtccaacttcagaacgaagcactttagcatatacctcgttgtttccaatagctgttattgagttctcaacagcctccgctgaaccgtggacgtccgccttgaccacaaaattgattggtttgggaccagataatttctcttccgtcagctcttcctcttcggaagcttctttccgtcgcttctcaatcatgtcacggcgggcctcgttgatggctgccgtatcttgacccagcctctgagtctcttccctctcgactcggtattccacgacatccttagcgtgctgctcgtcttctgcttgcagaagctccgtgcccgcggttgggttttctctccagccatctatttcaactggcatgccgggagtggcctcggaaatagaaacgccggcctcgtttctaagcgtacggacacgggcccaggtgttgccggcgacaagaatgtctccaggtcgaagggtgccgcgtctgatgagcacggttgccacgcgaccataactcttcgtggaggcctcgataacccatccttcaacgaagccatccgggtcggctctgtggtccaaaacctcagaaagagtgataatggcttcttcaagctctagcattccttggccagttttcccacttacaccaatcgcctggacatcaccaccatagtcttccacgtggataccgtgagatgagaggtcttgtttgaccctctcagggtttataccttccttgtcaattttgctcatagccacaataatagggaccttggcgcttgtggcatgtttgatggcttccaccgtctgcggcttgacgctgtcatcggcagctaccacgagcaccacaatatctgtcacatcagcgccacgtcggcgcatatcgagaaaggccgcgtggccgggggtgtccaggaatgttatctttttaccagacggcatggtgacggaaaatgctccaatgtgctgagtgatccctccatgctctgatgcgacaacggaagacttgcgtagccaatcaaggatagtagtcttgccgtgatccacatggcccatgatggtgacaacggggggtctagacggccatatagatttgtcctctggctccggtgcagctgtgaggtcctgctcggctccagtgtcgacgataggctcgtaaccaaattcggcagcgatcaagccagctgtctcggcgtcaagaacatggctgtatgaaacatcctcgaaacccatttcctccatccgttcaacgagctgtgctggccgcatgccaacgacatcggcaaaattgctgacgctgatgaactcgggaagatacagcgggctcaattcctgttcatctgcctgcttcgaccgtctttcttttttcttcttctttcgctcttcacgccggcgatgatattcatctacatcaaactcttcttctagggcggactcgcgctcacgattgcctcctcggcgctttgctttcttgttatgctcatcacgagatttctcaccacgagatttccttcgttctgtggatggcgaccatgtatctgtctccagctccgtgatctcttgcttgtcccgcttagcagctctcagctccttaagccgccgccgaagtgcaagatcctcttctcctgcttcttgtgcctgagccaacttcgcttccatatgctttctgagcgccgactgtcgagacccatcatcaggctcggcgtcatgggcgaacttcttgcggattttgaagggctcctcgatggagtcgccagtagaaccttcggaagcctccaaaggagagtcggtggtcaggttgattccagcacccgcaaccgtgtcccccctagactgtttaacgtcacttggggaagacgtgccagcaatgttgtctctagaggaaggctccgtcaagcccgaatttgtgtttcttgctggcctcctcgctttacaacgtggacagagtctgtgcttaccaaagcacgtgaaaccacaattgggacaaatccaatccttaaagcgagactctccttgcgatgggtttattagtccaggtcttcgcgctttacacatcggacagatactatgttttccgaaacaccgaaagccacattcggcgcacacccaatcctggttgcgcagcgccttcggcagttttgaggcaccattgacctcgtactctttcaagggctgaagatcccggctttccttgtcgatggggggagccttcgttttagagccggagtggcggtgggaccccggaggtctccgcgatggcgcttcatcttgttgccgctcctttttgcgggtagtcctaaatagcaagctgtcgcgaatggcttgttcgtcaggacttagagtggaagacggtgaggtttgcctcgctgcccagcgtgaaccgggtttcgataccgatgtcgaagacgcaggcacgttatcctgttttggagagtctgaagttgaagaaccggaagtcttcggtagcaaggcgtttcgaatagcctgctcttctggactaagagcagcgggctgtgatgtctgcctgggtgcccagcgaggaccgaatttcggcgttggttgcggggatcctaaggaaccggttgttgtatttgaggatgaaggagcggcggattttgttaacaacgcgtttcgaatggcctgctcctctgggctgagagccgcgggctgtgatgtttgcctgggggcccatcgagaaccgaactttggcgccgagttctgagacgtcgaggggctgcttgggtcatctgaattactagaggaagaactatcggaggagttgagtctggaaagggcgggatggaagcatcgtcgcggattgtaggctatagcagcatttcgtagtcgggctgtaccgggccaatcgacaggatgacgacgggagagctgtgagagcccacgttagcggactcatgaagatcaagcggttccgtgaatggttgagtatcatacctgcacaatggtccgccgttgcatagttggcggcctcttgtcgtcgttttcctcggatgatctccaaagctccggcaaagcgcaggaaaagaaccaaaaactccgccgcagtcttggtttcccgtctccaactcacgtgcggcccaatcggaggcccgcattttcctgtgcgggcgctgaggtgataattcctgataagcagctcatctggccggttgatattgcagaaatcattccctcgtttcgccccagttgtccttgtttcaattcctgtagtgtttcctgacccatcgtcaattggccagtcgcgaatccaggaccagaaatggagcctcaagaaatcttggagcacgaaggaggaggtgctctgcgtacaattaaggatctatcagcgggcgcagctggcggaatagcgcaggtgcttcttggtatgtgaaagtcagactgtgaggtcttcgtttacatccttttctgtgtcatctcttcccttacagccgcgtcgccctgctcaagttcattataaatgcagtgcggggaactcactatcgctgttttgagcttcagggttatataacaacagtcgctaattagtgcgcaggtcaaccattcggtatatacccaattgatcatcctaccgtaccacctctgacccctcatagacatcgtcaaggtccggctccaaacgaccactcaatattccagcgcccttgactgcgcgtccaagatcctgaagaatgagggacccctcgctttctacaagggaacattgacacctttgattggaattggtgcctgcgtaagcctccccaaacacgctctctacatccgcgctcacaaataccccaggttagcgttcaattcggagccttccacgaagcgcgccggcgactggaggagctcaacaaaaaaaagtacgctgacagcgccctcggctacggccaatattacctcgcgggcggcttcgcaagcatcacaaactccttcctctccggcccgatcgagcatgtccgtatccgttttcaaacccagccccacggcgcaggcggccttgataacggacctctcgactgcattcgcaagctcacaaaccaaggcggcttccttaagggtctttaccgcggccaggctgttacctatctgcgtgaagtccaagcttacggcgtgtggttcctgacttttgagtacctcatgaaccaagatgcgaagcgcaacaacgtcaagcgtgaggacatctccagtctcaaggtcgctacgtatggagggctagccggtgaggctctatggttgtctagctacccgatggacgtggtgaagagcaaaatgcaaagcgatgggttcggtgcgcagcagcaattcaagagcatgaccgactgctttaagaaaacgtatgcggcagagggactcgcgggcttctggaagggcattgggccgaccctactcagggctatgcctgtttctgcgggaacattcgctgtgtatgttttctctcgtaaaccggtcaactatggttgcgctaacttctatagtgttgaactcaccatgagagctctaggttagatacactcagcatatagaacggtttctttccagtttagatatcccaacggcttattcaacaacgaggaaaagttttgaaggaaagttcatcctatggccttgcttgtcattatacctccttcgtttgcaaatactacatagaacgacaagacaaaacggatttgacatcccagaatacgagtagtgcagttaccgaatatattctgttaatacagtgaccatacaatatctatacatacaagccgtatatcaattcccaaaacaaaaacgatgagagacaaccagctttcaccaggattagaattgcggtgatccaacctcacctgcatcgccgtgcagagctttcctctctaaatcctttttagcctgctccagcctcctcttctgaccagcctgaccagcccgtcccagcacacctgcgatgacagcaacggaacgcagactgtcatcattggcgggaattgggtaagtcaccctcgtggggtccgcatccgtatcgattattccaatggtagggacattgttgagcccgcactcgtgaagcaaaggctcgttctccagcgggttgaggcaaatgacgaggtccggtttgagaatggcgtggtcagcaagtgactccttgagatccggcagctcctcatcaagcacattcacaactttcttctcgcagtgaccgaggatctgttcgccgtttgtgagagatccgggaatccagcgctcgaaaatgtggtaacccttcgagagttctgccgcacgaacgacgatgcgcttctggcctggtcgtgtgccggcgaaaaggattagaccgccacgcgcggcaacttcctcgacgaccttagcggcacggcgaaggtaggctgctgtgatatcgagggagatgatgtgaataccctcgcgaataccgaagatgtagcgcgagttctgagggttccagcgggaggtggagtggccgaggtgggtttggttggcgaggaggagttctagggtgatgtcggagggaaagggagggtggcggataaggttttctggtttatagacattcgtaactgacgttccgagttgctggaatttatgtcctaggcaggtatcggtgagtgacttattgatgcgaaatgacagaggtccaacatacgttgttcagcttcctgcgcgagtgccttggccgcagggttgtttgtcaatgcagcactgctctgccgagtgccgggctctgggatagaacggtggactattgtctcaaccggcgttggtgtctctgttcctgtagacgagaatcttctggggatgtagccctggcggttgagagcgaggagctggcggcctggacaattgaattttaacatggcattcttcagatattttgaacgattggaatagaggggtacatactctgccgcgcatagagctgccttacaatcatctttgcggatggttgaagagcgtatgaggacgacggcttttctcgcaggagttcgtttctttctccgtcggaacttttgatgctggcttggcacggtacttttatgcctcaggcagcagttctggcctattaccatctacttcaaaataccactcccggacaactccgcacgtaaccataagacaggcagcaactcaggtacgtattaagtcagcctgagtcgcatagttactggattgcactgattgaattggcactcgttgagtacgttagaactctactttgacccccacgctttagtggctttctgctgctacttattcaaactacttatccaacaccccaagttcccagcaggctaagacggggtaatacgtggaaacctacgccaaaatttggttacttatttaatactgcaagcagtctgtctcgccctatggacacaagcaaccgacctgatatagaaagtcaattggaacctttcccgttgtgtacgcccatgtttatgtgatatggccttggttcagtgctccaatcttcaagccgatgtatttgagagacaactgcagaatcctgagaaaggcaatctgtgtcgtctctgcaaaggtcggaaagttcggtagtagaacggtagaatgggagaattgaccaaatcgctcctttcttacgcaggtcgtcgtctgacgatctgtaatccatggatctgaagcaattcctctatcactgcacgactggaaacgtttcctccatcaatgactagatcgtccgagtaattgaggagaagactggaaacacagagacggaggcacattgcatcaaaaggggccacgagcgaggttcttcttttcctcccagcgcttcgctgggcatttacgagagactctcccaaccgtcgcgttgtttggggtagctttcttcttgaggtttactcgtattcagctgtgcgtgttcgttgccgactatgcctgcaagtccctcgcaccagaagttggatggacggccgactgacaccaagtctttgcgcctctaacatgcgtgtttccaccgtgagggtttcccgactggacagttgatagaagtctctaggcttgccgtactactgacaactagggaccgcatctgattgaacgcatagtgcccggctgcagtcgttccgactgccacgacaattcgtcagcagtgtgctcgatcaccatcgtaaaacttaccacggccatatgtccacggggaatttcagcggacacattccattctggcgaacaaccggccaagcgaagagcaggttcatcgtgctctgagtactgattgctttcatcatcactagagcaaaacacaggttaatagaaacaattgtctccatgcaccgctgcaactagtgtgtttgacattaacacagctaacagatacatcggacactaggtagcgggccgtgtcagccttactctgactctgatctacgcctagaaccgctggatcggcctttcgataatgcaaatgtgacactgtttgcatgagtagccttcatctggattcagggtcgatttacgcataccaccattgcagcacgtctgaaaagtacttgtggtcaaatcactagtatatgttgatatctgaatgatttgcctattgcatcggactgaattagtgtatggtacatgactcgtttaactacatcagtatcagttggtagccccaattttatctcaggcatcttcatgatcgcactgtattgtggaaaatggcactgttaagctcggtatcgaacagaccaaggaataggtgttcattatgattgggccgcttgtagaagttgggcatgagactggctaggatgcttaagaaggcaatatgggatatggtacgcttgccaacacacaaaaaaaaaaggaaagaaaattaagtagcttgtctgatgatagactatcaaccatcatataatcagtcccgtgatccgagtgtataacagatcattgatcccatggcatgctcgtgatcgatcgattatcagaagatcatctcaaatttctactatgatcagaagatcagcctcgatttctacagtgcacgagatcacgaagctgatactcgctactcgctcgatgtaaataagaagcttctgctttttttacaatggtcgattgcggggatatggggtttaagacaatagcattctccagcatcgaaaaatcgtcggtatcataaaaaaaatgcataacaatgtatcgtgtacaagagacaaaaaaacccgtgccccgtcccaacattctaaccagcccaggcgacagatagaacccttcagacgacgagagagacaaagaaaaaagcgagtaatggtattccacaatcataacctcataggactaacagaagaaagtcaagcggccgtgtcaaatgttcatcgctcatttcttgaagaagctgccgagctggtccagctttgaagagtggccagattggccagagtggtgggaaccgccgtactgagagtgctgatcgtagtagggttcatccttgtgcttgtctttcttctttagcgcatcctgtgcgagacttccgacaatcgcgccaccaatcgcgccgaggactccatggttgaccttgtgacctccaaaagcactgttgtacaataatcgattagcccttgttaattcgtttgttgcgcagatagacagtaactcaccctgctaacccaccagcaacggctcctccaagaccacgttcgccttcctgagcaccgccgggagcttcctggccatacctgccattcagttagttactgctgcgttgcgtaagacgagaataaaacatactgttgctgctggtgctggccgtattgatcgtagccttgctgaggaggctgctggccgtagtagtcgttgaaagtgccacgctggctatcgtactgttggtgctgttgggggtagccctgatcatacggctgaccgtgctgttgagggtacccctggtcgtactgttggctgtgttgcggctgatagccctggtactgctgaccctgctcagggtagtaaccctgctgatactggttcgggttgtagtaaccctggttgtgatcgtaggggccagacattgtgtaatgtgagatgtgatgtaaagctttaatctgcagagaaagagtagttgataagatgaagtagagtgagatcgatgggtagagaaagatgctctgagccgcgggacccaggcctttataaggtaagatgtttagctcgactcgtgaacaaccccgccagcgctggagaaggactgaccaagcgccgagactggattccgaccatacaagatcagaataccgtcataaaacaggcgcggcaactcagcggccctgaatctgcgggcgtagatccgtaatcttgcctaggctgccgttttctctttacaatgatggcggtggattggtggagctgactgcgcccctcactcgcagggctgagggccggacgaactcgtcaaccaactgcaagcccgagatcgccaagttgcctcctggatatggtaatctcagagaagattccatcacttacacaagtgagggaggcaatatttcacgccatatgcaagtcttacagagtattattccactgatcacaacgcgatagcctgaggttgatcggatgcgatgctgccgggtgcattacatatctgtgacatgccccgcgccacccacctgcaccgcctgctactgtggctcagttcgctcaatccagccaaaggccagagcttgacaagcgacgaatatggaagtatcgtgcgcctctgattcgtaatttaccacgtaatattgcctgattatcagctgttcagggctcggagagctctgcataacttgtgatcagattttcgtcaattctcgaagtggctgagatcccgactccagctcggaatttgtccagcaggcaacgagattaccaggcttgagattcgggagatttgccgacttccggcacgttacggccctacaggtctggctccggctctgaccagcgcgaggcattctttacttgaaagagtagttcctaaccaagatgagagactgtatatgtacat

SEQ ID NO: 1656 - DNA, 2754 bp, Emericella nidulans
gcaacacccagcacgtccctcataaaagacggcacagcaacaaatgtcgactctgaatctcgtctcatggctctcacagcagaacaccaactcgtcgagctcgacgccctagaaggaaagctgtccgaatggtcccgtcgcaaccccaaggccttccttcctagcgatttcaagggcgttaaggaccgcgcaatgggctgtctctgggacttgtctgactcttctcgcgagcggctttggctatacggtacttcctggctgtggatgtttgatctgaagcacgatttcccgtcgactgaggagctgaccgaggccgcaacagccgagaacgacaacactgaggcaaatacgacaaagaaacagtctcataaacgcaaacgcgaaattaatgaggagcttacttccgcagtgggcaaaaagagcaagaagcacaatactggcgctggggataagattccgctcgcacagtctgctgtcttcttcgactcgaaggcccggactttcgttggacctgatgcgtcacagggtgagctagtatctctcgaagatcagaaagaacgcgatccggaggaggatgacgaggaggatcaggaagataacgatgcccggcttgcgcggctgcgtagggaagctaacgctcacggtcaatcgaatggcgccgacggtcttgatgccggttccaagcagctcgtcaagtccgccccagcgcgccggtggtggtatacgtacaagtatcgggggattctggggattgtacccttgagttcaaactctgatcatgctgacgacgagcttgtggatgaaaacgtccacgctgggttagaagtcgcggttgtggagaggccgatgtgggatgttgatctgccggatcgatatgtgcgcgagtatgaataggagaatgattggctttacttttttctgtctccttcgtcccgcagtttagttgtccaattgcatatatacctacgtgtcccgccctgccgggcctattgtttacggcgtgctgtacaaagaggaccaagacaatattaaaccctggtgttgggagctcttggtggatccactctgcttaccttatccatctgactgattcgagtttgtactacggtattatttgtttccatgccattggcgaacaggatatgccatctatgttactgcattgcatagattttgatccgtttctaattccaaaagtcatgttgcttatcaattgatttgagcgtagaccttgctgttcttggcggcatgcagtgtgcttcttaagtccctttatatttaattgggactttcttaggctagtagaagatgtacctaatacggaccgaactgacctagatatgcagctgccttacgagggagcaggaattcgcgggcgttttccgctcgactatatccaatacctgggtctcaatggagaatgtagctttcttcctgcctttttgttctacgagtgcggatttctggaaacgggctgtgtagacggtaggctagagaagtagtacaagggtgctgggatttcatcttagaccaggatatggaaggatggtgctattcttgtctccctaggcctccagtccctccctagaagggttcgatattctgcagttgcagaggtatcctagagtaaggtggaaaaaagtggacatatatcagacgtcctgtatgccatgctagttcctatctaaaagccctaaaaccgtgtactccacatgtaaattgagataataacaaggatgaaagtaatcacgctgcaggccaccggcccgaatagaatgcttatccgtataccatcaaacataaagctctttgttagacaacgagagaaacagcagaccaataaacaacagataggacaatcacaactccgcctattccttccatagaaaacggcatatgctcgcttttgatgcatctcttgcacgaaagcacgtatgttagagagataagatatcgtttgccctagtctttatactgtagtattcgttgttaggggacacggggtatctcatgcgactgatgaagtaatgctgacccctgcggacctgccacgtcccatattgtcatactggatgatatggaaatacggtctcagatcgaacactcttttccagtgtcggagaactcatttcgccgtgttcattcgcggaccgggccgctatcacctgcggaacgcgcacactggaaaaaaacagtggcgcgagttgtgaaccggcggcgattcaattggcagtccaataacgaacgtcgatggtcctaggtggcaaaagacactgaccaaccacaagatgaggatccagatcccttagatgggtgacatatagcggataagaaattattggcacgtaaaccagggattctaaaagctttgggccgaaacaacagcaggcttgagtgagttagcaagctgtgagcaaaacggggggtagcaaaacgttccaaggcgagcacggcagcttcggcagcgtcgcacgagacgcggagcgtctgcttggcgcaatgaaatggatcaagtgaggagccactcacaggactgttaatcaggctattcctttccttgcggcccttcttgatatgactctttaatgccgcagaatccagaggtttcaacaactcaaaactacagagtaattcgcccgagacggacatgacagcaccccaattatcgaactcgccacaatactattgagtggtcagtttgaataacatgatctaagggacacacttccggttggagcaaaaacacggttacaa

SEQ ID NO: 1657 - DNA, 1144 bp, Emericella nidulans
ttatgtatatacacatacgatttaggtgacactatagaatactaggatcgcattgtgtctgctgtcattccatggaagggttttcttaaaaatttcttcgtccataactacggtggcttagatatattatggtgccaagagacgtcctcgcgaagctctccttgaacagaaggtcatgggcaaggggtacgacagtttcgcccggaggaatatgaggaataccgtaattatttgtgaccttccgatagtggcaaatatcaatgataccgtcgtgctctatacatttaagtcagtgtctatccaaaaacaccgtacgcatctatacaccgcaaattagactctagtccatgttccaggaatctcaagctctaattgcgtgtgactatgcatatatatatacatttagatgtatagacctgaaaccaacaacttcactgctcatttaggtggccgtataacatctgaatatccaaccaactgcaaatcctggccctaatatgtcttgcagtattatcaggcacaaagcgcatttaattgggttgtccctagctattttgcgagtatgtcagagatatatactcacgtctactgtgagttgaatggacccgattctactggtcaatacatttggatttgagatctgtgcaacgtttcgtagcctagtagcctacaggtgccttgatacagagccctacttattgcgccaggatggtgagatcagcatctctaattaaggatgtagagctgtttatcattgtagaaacaatgctgcctgactttaacaatgtaaaggaagataacactatgttgaagtgcgatataaagggcttcgagacgttcttgttgccctaaattacagcttgtctttcagcagcctacaaatctttctgccactcaggctccgattcctccaagccaagcaccaatcaatcacatttgcatctttccagcacacatattgccttcatagtcatttatatctggcagtaccaagccaacaccagcagtatgcgctttcagctaatgtacgtggccatattggctgtcttcccgggcctcctcccgcggacaaaaagacctttccgcagaacttgagggagtttgctggggcatctacacaggctagagataacttcgggggaag

SEQ ID NO: 1658 - DNA, 1742 bp, Emericella nidulans
ctcgtcatggacaaatcatcgtgcgctgcttcacatcttagtggcgctcatccataagcagttttgcgctcggttccgttgtcggttaagcccgatcttgccatcgcatccggaaattttatgggctccaggctgtgcatagcggcggcataagcgggcattagcccgcttaagcccgcctagcgtgctgggtcctgcccagaacattaccaagcccaagaccgtctgagcatcagacccgaggctagtctacacgagtcaagatttccctggttccataattatgaagtcagaagacttttttttgctacttaagtttctgtatatatatcctggtggaggggtccctaaaaagatagacctgtttgtttgaaatatctgcctcgtgctctacctacgcattcatctacataaaagcttatctacaccggaatctcttaatacacccgtgttactctggactgtcctccacgaacccctcgctcacctcaccaatagaactagctctctatagtgctggcctgacagctgcacccacccgttccggtttttcggctcacccctaggccctgaagtgctgagcgtcaatcgaagctcgcaagctctcgccatggcctacgaccatggagcgcccaatgggacgtctcccattgaggcgcccgccccgcgaaagatcccgttctggcgcctggtcgtcgaccagggcatcgtcacgcaagaagtcgtcgatcacaaatatgctggatcaggtacagaggaggacccatatgttgtcgtctggatccccaacgaccctcgaaatccgatggagttctcagcgatgatgaaatggttcctgacgggcgttgctgcgattgcgactctggctgttgctttggtctcgtcggcgtatactggtggtgttgcggaaatccaggtcgagttcggcatcggcagtgaggttgcaacgctcggtgtctcgcttttcgtgctcgggttcgcgattgggcctctgctctgggcaccgctgagtgagatgttcggtcgtcagatcgtctacttttttacttatatggctcttacggctttcaactgtggatgcgccggcgcgaagaactcgtggaccctcatcatccttcgtttctttgccggtgcgttcggttcgtcaccactcaccaatgctggcggtgtgattgccgatatgttctctgctaagcagagaggtgtcgccatgagtttgtttgctgcggctccctttttaggtatgttgcttcagcccgtgctgcttggttggctgcttgtttgagtgcttggagctgacgtcgtatgttctaggcccggtcctcggtcctattaccggtggatttctcggaatgaatggcggctggagatgggtcatgggattcctcggcgccttctctggtgcgctctggatcgccgggtctctctttatgccagagacatatgccccggttctccttcgccgccgtgctgagagactttccaagatcactggtaaggtctatcgaagcaagtcggatatcgagcagggcagaatcactctgggggaggctttcaagacagctctttctcgaccctggattctactcttccgcgagcctattgtgttcctgctgtctctgtacatggccattgtctatggaaccctgtacatgctcttcgccgcctaccccatcgtgttccaaaaggttcgcggctggaaccagggtattggtgcgctcccgttcctgggtatcatggtt

SEQ ID NO: 1659 - DNA, 3233 bp, Emericella nidulans
gttcacagactgagtagtatttctcagattctcatgccatttttgctcggaaatttgacgtgagccacgagagtacttgtcgatgacagtgcgtgcaaggtgcggaaattgaccgagcagcgtcttctggagatttcctttgtcacacccctccaacacctcatgatcctcccgaggaccgagccctctgccgaaacctgaacgtcgaatggcaagaatcggtctaagatttgcgggatcagaccgagattcaatcttttggccgccccgcccagtcggcagtcgccgtcgcccgtcatgaggcggttggagttggataggtcgcggtggaccactccttccttttacgcctttgtgatcctcgtcatagcgtgcggtacgatccctaaaggtatcatctattttgacccatttgtcgaatttagtcgagactcttgctgatgtttgaagtctctaggctacgatgagggtggatacagcgcttctgtgcgcctctactccttcaaggccgacttcaacctcctcgactcgaactggacgaacaacgagaccggcttagcgaaccgcgtagcgaatataacttctttcaatgtcctgggtgcggcacttggcgctttggtttctttagacttgaatgaccggctgggaagactccggtcatggcaattagcctgtgcggtgtggatgtcaggcacattcatccaggcgtttgcctcagggatgtatggactgctgctgtttgctaggatatggggtggactcggtgctggcgcgttaaccgtggcgacgccgttatacttgtcagaaattggtttgtgaagccggccctgggattgagtgtgactgaccgttctcagcgcccgcacgaacgcgaggtctgattgtcagtatttacatggtcgttctgctgacagtgctagctcttggtaaggcgtcctttcttgcatacccattcgtttctaatatggcatttaggcttttttattaattacggcgctaatatccacatgtctccaacacgatcgcaataccgcctagtgcaatctataccattgatccctgtcggggtcgccttcggtgcctcgactatgatcccagagactccccgctatctcgtctcaaaatctcgtctcgaagaagggcggaatgtcctcgctcgcctccgcggattggatgctttgtcccccaaaatcgaagaggagttcagcctcataactacccaagcgcgcttcagagctgacactctttcatccatctccaactggacagcttttaaagaaacgcaatcaaatcccaactatcgtcagcgcttctggctcttgatggccatgcagacgatctcccaatggacgggcggcaatggcataacctactacgtttcgaccatcttcgagtccgctggcgtcacagggaacgctacatccctcgtctcctcgggtgcctacggagtcgtcaagctcgtcttcaccatggcctttacatgggggttgatcgactttctaggccgtcgttattgtgtgctcctcggcttaacactccaactagccgcgcatgtctatctagcctgctacatgggcgttctccgcccaagcgatgatacggagctggtaaacaaacccgcttccaacacagccatcgcagccgttttcatctacgccatcggctggtccattggcctctgcacagttccatacctctacggaacggaaatattccctacgcgcatccggaatgtcagctatgccgtaagcatgtcgcttcactggttcttccagtttgctgtcgtgcgcgtgacgcccaacatgtttgtctcgttgcatgattggggcgcgtacatgttctgggctatcatatgttttgtgggtttagttgtcctcggcatatggatgcctgagactaagggagtggatattgaactgatgggagagctttttgaggggccttggtatctcaggtggcgtgctcgggttcgaccaaagaatggggagcaaactggtctataaacccccatttgtttcggcgtttcggaccgtttgggtttcgaaatatactgttttattattcatagtgctggagttgctatataccccctgatgtacaacgtataaagattatgtgcaattcattttcaacataaattcacaaagctaagaccgcctcacccatccatacccctccgcaggcgtcatattcgtcgtaataggttccgcatacgaaaatgcctcaaacacctccggagtgaactcataggaagcgggattttctagcgacattaacggttccgctaacccgttgaaatcgtgcgttactgctgaccgcggaacatcatgatgagatgtaccgaattccgacgcgtacatggacggttgataggggtagaactggtttgtggatgcgctgatatcgacgcgtgcatgagagatcgtagaaggggttctgtggtgcgtggagacagggtgagatgtagggggtatgttggacagaggatattgatcagcgggagagtggcgatgtgtaattgaaggttgttgtggttgagggtgtagtgcgtttcgctctggaatggatagttcgattttgtggtccacacgcaagcgttggatttcttggtatatgaggcttaatgctgtagtgatcactagacatgtatagttagtcggtttgaccattgagtggacacacgttctctagacacataccaggactggaaacgctaacgaacaactaacgcagagatgcagatcttcaatttctccagtgagcccggcgccgcgaatttcagcgcctggatctcgaggagaaaaattgaagcggccgtgtacacgctataggcgattgagaggacgatgatactatccccaaaagtgcgccggtacattgtaaatatcgagaggatggcagttgcggacgtcatgcagtgaactaggtggctcttgtcgtacgcctcacggctccatttcgagcagagaataggccggtgagtcaggatgttgatagtatgataaacacagcttgatcattgtcagtttaagtcaacacaatgagggccgcatttatacgcactttaatgtcacaacgtgactgggaggggagtatggaggcagatctgttgggatgagcttcagatgctccggtagttcatcccaccatccactcaggttgcgggattgttcgcgaacgcaggtatgaaactctgcctcagaaattcgacggttgggtcataacatatgtcg

SEQ ID NO: 1660 - DNA, 2133 bp, Emericella nidulans
aaaaaaatataaccctaaaacccaaaaaatataaaaaaagaaaggttaacgaaaaccaaaaaaagaagtaggataaataaaaaaaaaagaagcacaaagagaaggaaaaaatcgaataaaaaatacatcgaacttaatcacaaaatgaaaacctcgctagaactttaaaaaaaaaaacatatccatcccctcacaccaacttccgtgaagaaagcaagcggtacgccattacaacggtaagtcgcctcaactctcggccttccatagaactttctcagctccattacagctctttcatgggcgcaacctccaaggggctggacccggacgccttttgtaacagagacagtggtaagcatttcttctaccatatcgggctgatatatgggaattaatcagttatagggcggtggctggcacacatgtacgtggtttcctccatacagtcgggaaccttctaatatgagatgatgcagacgacatcttctctagactcctcaaggtacataacttccccatgtgccataatgtatatctaacaggaaaaggaacgaatcatatgcttaaatggcgaagttgacgaaacaatgtccgcctccatcgtcgcccaactcctctttctcgaagccgacaatcctcagaaaccaatccacctctatatcaactcccctggtggttctgtcacggctggttcgctctcctcacgacaattacccatagtggaaccaggttggaaaactgacatacgttgatatcctaggcctagcaatttatgacacaatgacctatattgcctcccccgtctctacaatctgcgtcggtcaagccgcttccatgggctccttactcctctgcggcggacaagccggccagcggtactgcctcccgcactcctcgattatgatccaccagccatccggcggatactttggacaagccaccgacatcgcaatccacgcgaaggagatcctgcgcgttcggcaccagctgaaccagatctacaagcggcacttgacaggcaagaaggaattatcactggatgagattgagaagttgatggagcgggattacttcatgggcgcgagggaggcgcttgagttgggcatcgtggatgagattttggatcgtagggttaagactggacctgatggggaagggaaaaaggagcagtaggtagggctctggctcatcaagcaggggagttattatacccaggacattcttttccgatggttctgttcaatatgtaatgttagaacaatggtatgtacgacatgacaaatctcaatgctcacgaagctatgctcgcactatctatagaatacccaatgcgagataaaaaaaaaaaaaagcccgaaacgcctctaatgtagtgaaaattgcatcccatattagatccagtagtaggaccaagtttagccacctatatgcattccacgcacgcaacggaataaagtcaagtgtgccccgaagaagccagctaacattagcagctagtagcacgttcgatgatgaaataacgcaatgcgaatatcagccgctcatggttagcattaagaccaaaagaaaagagactcgtccagaaacaattaagtagacctctccttttgggtaatctccgcagtaaacatctcttcaacggccttgatcccggcttcctcggatttcttcgaatcagccccatcctctccggcaacagcctggtcaagagccagtttcgtctggccaagagcatagatctgctcttcgatcgtatctttcgtcacaagacggataacctcgacctcacgcgtctgaccaacacgatgagcgcggttctcagcttgcacgtcttcctgcgggttaaagctggagtcgaagatgatgaccttattagcgcaggcaaggttgatcccggcgccgccagctttagtggagagcaaaaagaccgggatgtccgtgttctcatggaaggtgtccataatggattggcggtcttcgacgctggtcgttccatcaagacgaacaaacttgagatgttgattttcgaggacaacttcaagaatatccattgccaaacggaactgggagaagacaagaacgcggtcgccgttttctttgaagcggcgaaggagttcgcagagtatgtgaacc

SEQ ID NO: 1661 - DNA, 1155 bp, Emericella nidulans
tctcacggcaacgatctccgctctggtttgtgtccctgcaccatgcatgatctcgatctgatggttggcggttacagactaaagacctgcaactgcttggaataagccgagtcggaacccaagttgggtcaggtagtcggtagctgacactgaggcgaaacagaacgacggaggatcccgcacacccctgtcctggcagtggcagtaagtcatagcgtgtcagaatcagcttgtcagcctgtcagagaagtgtcagacgtcacttaccggtggcttgggttacagcggacgccctaggtggatgcccctgtcgttgattcggttagcggagattcgatccgaggtgtacttgagagtagtacctgtgattttgctgactcagccgtttagtgggccgctaatcggccattaggcggacatcggggaccatcacgtcatggcagttcggggtacacagatacgcagatacgcttaatcgcactcggatggctatgtgatgagtgagtttgccgagtttgccacttttgtggttccagctgagagttaagtctttggaaaccggttcttcagattggctaccgggattgagaacagtggccctccagtcacgagggacggggccgggcccgtctcgacttgtcaaaatttggctgcagtcggcgaatcaatcccggcggatcgatggccacgagattcactagtttagccgctctagcgtgcacgcgagaggttggcagttggcagctggcacctgcggaggctgcgggatggagcccgtatcaacgtttcggcttcgaggacgaaggacggtgtacgcgaatatgatcgagtatggccatcgctcataggccaaataattcgtcccagcggctaaaagtttcgcctcgagtcgcggtatctttaccatatttggcggttgcggatccatccccaaggcgaacagtctgatgcgatggcgggattccttcagcggacctgcaagtcaactcccatgctggtgagggcccgtccaggctgacaggaacaggggaaatccttgcgagcgggcgtgcaccgaactggccggttccacccaaaataagctcggtcggacagaagaattccctcggctgcccaatgacatgtgtgagtcggtacagaagagccgtttatacg

SEQ ID NO: 1662 - DNA, 5474 bp, Emericella nidulans
ttttcctcgaaactctcctcttcttcccaacatgcgcatcgggccgatactgctccataatatgcacatacagatccttactcacattctctgccagccaccgcatgatctccctgccctcatcttccttcccgggcatcacaaggtgcctcagcagcacacccttcttcgcaatcccatcgctcgtaaatgacaaatcccccacctgctcatgcatagccttgatactctctcttgccgtctctgcatagtcatccgccttcagcagcctcttcgacgtttccgacttccacaccttgaaatccggtaagtagatatcaaccagtccatccaacagttccaaagactcgaggctatcaaacgaagacgtattatacacaatcgggatccgcaggcccatatcccgcgccgctagaatagacaacacaacctgggggaccacatgctctggtgtgacgaggttaatgttgtgcacgtgtcccatatcctgtagtttcatgtaccattccgctaactcctcgggggtgagatcgaagccgttacgtttatgcgcaatatcgtggttctggcagaaaacgcaccgcagattacaccccgagaaaaagacgctgccgctgccgtgaaagccctggatgcaaggttcttcgccacgatgaggcgcaatcacgttcacttttgccgtttcggcgccgatcaggcagtggccagttgtttcgaagcggttcacgccacatttgcgcgggcagagattgcaattcgagagatgggtgtaggctaggctgcgctttttggcagcgtcggtagacgtgaggagggcgtagcgcggggtgtagtcgtcaagaaggtattggggtggaataccgaggccgcggcggatggtgagggggagaaatctgggggtcgtggtagaacagcttgccaaagggcgaatataactcgtgagattcttaagtagagccatgttgtatgattctggattacgagagaatggtttcgtccatcgcgtgaaagttgatcttgttctgctgaaggagttacgagggcaaagaacgcggagattccttatcggccagcttatcggtaatcgcttatccttatctccactgtggcgtcatactgtaatcctcggctcctggatggccagtcactctactggagatggattgaagattcccaaaagcagaagacaaggatgcaagttgaattggccagctaacaaatggggtatgagagtaactatagtatacagtgatgaacaacataatgaatgcacgagcaaagaggtatcaactatgtacggctcggcactccctcctaagaccagcagaggtatcacccgcaggaaatatacaacaggagacaagttaaccgtccttcatccactttcagtttatatgtcgtgtaatcgtaatagctgtatagctgggagtatgaggctcaagagagcgcgagccccgtcccatcaccggtccagcggtaaagagacagcacttcccgccggcgctgctgctgctcaccaaaatcatctggaacgcgtccccgaacctgggcaagagcggagcgcatcactttgcggaatgttcgctgttttcttcagtcagctatatcatagctaaatttaggaaccggcaggggacatacctgatactctgtattcagcgtaacgacacaagcctcatgtgcgcgcacgatagtctcacaagcgcggacgacgctcggattcgcatccccctgtagcttatctgcagcaagcaagagtagaaaacttccctggagcaggtaaatgccgaaaaagaacggcatgaagctcaaatccggatcgtactcgagaatatcggctgctgcctctgcggcgccgacagcgtggctcatggccgcgaggaatgactcggaagagatccacatatcatggtcctcaaggaggttgatggggtcccatttacccgctaggagaacatacaagacgtgcatgatgtgggtgccgtaggcgactaccatcttagtatggacgattgactcgttgacgcgcgagccaaccgtactgctggaccggccggatgggctgaggtgatcaatgtgcgggttctcgggcggttcattctctgctagggcgaggctatttatatatcgtgcttcgaagtcttttaggctctgcccgtaggcgtcaagttgctgggttatggccatgatgtactgatctagatcggggccgctgcggaaggtaagtccgtaccgtggatgttctcgcgcttgttggagatcgataattcccccaagtatcgtcatcaatggcaggaagtagccgaacatgctgtggcctgtgcattcaatgggcgggccgacagcgcggtaggtcgcagctggaaaatctcctgcctgccataaatcatcattcatgggctgcagtagctgcgaacactctttatccaacagagtaagcggcctattatagcataaagccagatggcgatcggtagcgtacagtagccaccacagacgccggcgctcctctcgttcttcttctgtgacgttgacattagagtttccgccgtgcaatgactggtttcgctttgatggattgtcgccctcgttttctcgctcgccgtcctgacccggttgcgatgcgttggggggcagctcgcggccaagtttcagctctcgggcgagagaccaggcggccgtccaccagcgcatacttgcggctttgtattcactggcagatactaccgtagcgagatggacgtacgtggcgacatcatccacagctcctgtcgcagtactttgggctcctagttggtccatcgagacaccaaaaccaccgagcgcgacgccgtttattaccatatttgcggcataatttggcgaggcttctccgagcgccggtccgtgaatgagcgggcgcacagccctatcgtcaattctagtagcttctgacatacccgaccgcgcgctgagggcggagacgtcaggaacggcgcatcgcttgtttgtgcgcctacccagagcatactcgctaatagcccaggcgagcacacgcgcggctttgttgggtggaggaacgactgtttgcgaaagatataaccaacaacgtacggagactggggtgataggtgtgaagaggaggagctcgtaaaataaaggtcaagaaggtcgcaagcgagagactgaggaattattgaggcgatatgtggaagaaccggctgaaggacggggtaacgtagactggttccagagaacggagccatgggaaatgaagggaagtttgcgggcgacggtgatggcagcggaagccatcctggggattgagcgggaggtgagaggcctaaaaactgagccgacgggttatccgtggagtttccgagtcggaagtgattgagtgaagtcgtattcggctcttgcgagttcagcaacgagaatgtgttatcattataggcgtttaggccgtgcggaagagcggatggagagcgagggttgttgtggaggatttggagtgatcgaaggtctgacacgggcatctgggagcggcccgactcgttcagctgagtaaaatggttcaaatgtagagcatcaagggccgaccccagcggcggctgcgagtgcgccgcttgagtgttgtgaatactagacaaaccgttcgcaggtagatgtgattgaacgcgcgatgcctcaagaacggaatcgtaccggccgcctggctcctgcgacaggcgtctatctgtaggtgatcggttacccatgcctccctgatgtcctgcagcggcagcagcagcagcaatatctttttttgaagccttgccccgtttcttccgctcccgagcgtattcgcatgttaaaccgaattctgcaccgaacgctttagcagccgatcttcgcatatcagaaaaaaatatgaagagatttacctatacaatgcgcgcacggattctgcccgtcgcactttgtccggagttggttacattggtcacaagcccgactgattctccggcggacaggcgctgacgaagagttcttgcggatcatggaacgggcttcagctaaagagtcgcggacggaggatggcttgaaagtagagttgttctcagagttgccgccctctcgcgataactgcagctgctctagcacatattgcgagccctcggcgagggtgtcaagcccgatcgtctgagactgggattgcgacattctcgccgactgggaattcgagaagggggagaaggacgtggccgtggcgaactgttgtagcgaggttgtcgacatcctcgcggaacgttgggtcaacggggcatgagaggcgtccacgtaactgaaaatggttgaagacggccagaaaagaggtcaggatcagacaaggagtgaaattaaaggatacggggagaaggattttagtcggtgttagaatggcggggagagctgggaccccattgccatttgccgatgaaaccggggggaactaaagtagtgaacaggaggtaacgctggaactagcccagggtacttcgtagcagtgaaagccttacgggccacgagcgaagaaagaggggagaaaaggcggaaagacaagccaagctaaccccaggcctggacgaggttggggacaggattaatcgagagataggacaagaagacggggccgcagtctcatgtcatgccatgcagagctccagactctagactccagccagcgagggtccccgcactgcaatgtcaggacaacaaagagcaaaatagtgactctgtgacgagacaccagaaaccacaggttaagaataattcaagaccggttctatcttggaaggccacagaacaaccgaagaaaagcgacgaaggatgggaagaatggaaccttaacgaacggaaaggtggggatttacagcctcaggcaggaatctggagatcgggcaccctgcaaggctgcaggaagacgcccacgagccgagctgcatggtgagggacgagtcaatagagtgaggcggagtatgggatagtaggcacggattggatgccaggctgctctacaccatacactgtggcttttaaatcactccatcacaacaataatgatcgactactggacggccacacccaggaggacgcggttgagccggattctgcctaaattaccccagaccctcaccctccgtttacccggacggtgcttattcatacagagtacacgaattacagcaagagttggaagagagccgctcccgctccagaagaagcgttcattcagaggtgtaaatacatctcatgtctcggtatatatacaaagtaactcgtgagaggatatcataatgtacatcaccgccaatatgacggacaagagaagcaatcaaaactcaaccaagatcaaacgccagatgccatctgtaaaatacaacccgttctactttttcccagagcgccagccaatggacatataataagacattaggagaaaaagtacttgtctcgcggattcgagacacgtccca

SEQ ID NO: 1663 - DNA, 2837 bp, Emericella nidulans
agagcaccaagcctattcttagtgccaggaaggcgattttattttaatcgttcagtatctcattagacccgcttgacaattgatctggcctcgtccgaagggacgtggcaaccgtggtttcatgagacagggagggaaagtcaggcgaagtggtccgtattcaggtagcactctgtcgttcatttttggtacacccactctgatacctgctcagaagacttccttgtatatggggaagcagagtcatgggtgtgcagtaagccgaaaaaaaaaaaaaaagttaaactacatgctagcattcgcaatgattccacggccaaggcggccaggttcgggcaacataatgaatcttgacttcagggccttggccattctctaccggacagtgctagttagttgaatgcaacaaccctccatggtgtcagtgaaaccgcacctttgtccaaattatataagcctgacggtccactgaaaaccatcaaaaagaccttgaacctaccgtaagctgttgcagaagcatctagtgcggtagtgtcggttaaaacggccgacgaagtgaccaaactgttggagatactttcagaatagtcagaacttctcggtttgaaatcagatggttgtacaaaaagtgtccaaactagtgtatgtaaacgatacttccttccactgacactggacatatcaatcaccgcctagctatgatagagcagtgctagtactaaaccagaaggggctataatagttgcaatcctaactgtggagtctatgccaggatattatattgttctgttccttggacattcttcttttacggcgctaagccattaaattgaaatgctgtaggctatcaactgtagttgagtgcatgtatattcctcctagttttcagccaaatgattataacttgacaagtcatgctttctattcgtcgacaatggttgaccgcctactatatgaagtgataaggagtttttcccgtggcgcgttactcacgtgcttaattattctgcctctctttggcaccagacattaagttgtctctcctccgtgttcctgtagactgaagggtgcccttgatcctgttactttggactacgttaccttttcaattatttgaatatctgtaggtttcccgtgcttcatcaatatattgcttgggttttaaccaatgtcgggcgttcagtttttagtcgattggcctgcctgaatcgcgatattccgttgtttagccctcacttatcttgaggtgatacaatcagccatggtcatatattagagcgatcgtgaagcactacctggtgacccatccttcaccaccgttccgcattcgccctcccattgcactgaattagtgtaccagacagacactcatgcttgtttaccgttccgtatttcctggttacagtcatgcatcccgggtttaataggtcaggacacattcgatgaaattaaagtaagcatgacagttcagcctgttctggtctaagcactgacggtgagtttcagaccacttcacgattgaaatggaaagggacgctttgtctagatatcctagaacccgcgctcgtctagggtctgatgacccatccacgcgcagcgaagcacaagacctactttccaggtttaccggaattccatccaaagaggctcaggacacccgtaaaaactccggagattcaccgatctctcacatgaaatcaacagtttcaaaggttcgagccaagataccaaggggaactgttcagcaacgaccacggccgggtgcgtctgttaatcctgccatcgtcttgccgacagtcaaaagtaaaccaccgttgctatcctcctctgaaagcctgtcgcctgagaggcatattcctagacttgcggtaacacggcgttcccgccgcgcaagagctgggccggtagactactacaagaaaatttctctttccgacagtgaaagcgaagaagtgcaagcaaataagacgaaatcaatttccaggagtgtgtcacgaagtcggcatagtgccatccctgccttgatgccccaagcttacccggatcgcgccaaaaacatcagacggcaggatgcttcgttaaacagtctatttcagcgggaactgggcagtcatcgccctccaagactgaacgcaaagttcgttgacaacttgagactatgcaaagcatggaaaggagcttctaatgatgttgtttcactggcatggtcgcctgatgggacaaaattcgcagcaggggccactgcacaatgtgatgaacacatgatggcttataataggaaaaataacctccttcttggtgacctagtcactaacgagctccacgaactatcagatcactggatccatcgaccaaagaacaacgttgtgaatgatccgcgtcttttcatgagcgttactgctgtacaatggtttgaagacacattatacactgccagctacgaccatacagtcaagctttgggatacctcaagaggcagaacctcatgttacaaaaccctgaagcatgactctgaggtggtcgttatggcacgctcaaactttgccgagaacttactagctacggggacacttacaaatacagttggctactgggatattagcaaagctcagtatacaccgctcgaactgcaacggggaagattaagaaaggatattgaattgatgccgacatctatagcatggggctctacgcatgcgactaaggattatcttcttattgggatgtcggagaaagaagatagcgtggcccaacatggattgcttgctgcgttccgcgttcgagaatcatcaatcgaaccggagtcctttctgccaaatgcacagaatgtcttcgat

SEQ ID NO: 1664 - DNA, 2947 bp, Emericella nidulans
cctcgaagttttcgcggccattgacggcagcataatggatgggaagccggcgaagacagcctggatctctgagagaaagacctttgccgactagatagttgattgtgcttggagcggcgaattgagcagccgcacacaaaagggtagatatgggggtgctgtaggtagcctttacgtccgcaccgcagtctatcaaggtccgaacgagccggtcaattttatcgaggaattcgcttcgagtctcggagtcgaggatctcggctggcatacaggctgccattagaggagtgggcctgataccgggaagcagctggttgatatcggcaccatgatcgagcagtttcttgaccacctcgagatgaagatttgagcatgctatgtgaagggctgcgccgtgtttcttggaggcaatggttatatctatccccggctgggatagaaggaagctgactgcatcatcacagtctgcagagttcaatgcactcattaatggtgtccatccaactgagcactgcgcatttatgtcggcacctgctcgtaggaggcggtgaatgcattcgacattgccacccatagcagccttgatgagcggtgtttctccgtctttgttgcgttgctctatgtctagcctcccgcgatactcaagtagcaatgttactatctctggctgagggaagctggcggcaaggtggagaggggcttgaccagccgtagtagtttcctccaggttcacaccagcttcggcaaaaagccggactatctctgtactaggacggtggcctgaagcgtcatgaataggacaccaacctgcattgtcgcggtggttgatgtccacacctcgatcaataagcaatttcacgacgtcggactgttgctgtacgaccgccgtgttgatgacggtcaagccttcaccattctcctgctcgggattcgcaccagcgtctaggagcatgcggactaacatatcgccattgcgcactgatacttggaggagggtctcgccggtgtcagccaaaacgtccagagggggcttccgctcgagcaatctgcgaacaacttccttatgcccgttcacaacagcgtagtgcatcgcgccgcgctgctcgtcgttgaggaggctcacattggcgttgtgcgctagcaaccaatccactacaggaatgtgcccgctgctggaggcccagactaagcctgtcgatccgtgcgagtctactttatcgacacccaatggagatttgctattaataagagcatccaggagagcgaccttatattctgtactgagttccgacgaactgcatagctcaaccaccaatgggggcttgagaagctcatggttggggtctgcaccatattccagaagcgtgcgaacagcttctacactccgagagcgcatggcagcccaccagagcgcagtgtcctgtccaccagggccacataagttggggtctgcatgattttcgagcaaaacttggagagtcctgacgtatccagagtcagccgcggcgataatgggagcccagccgtccgcagcgggaacatagttgggacgggcgccaaattcgagaagcaccatcgctgctaaccaattcccccataaggatgctccgtagagaggggtattcgtgttgttccaactccaggagtcccacggttgtgtgtcaccaggacccagattgtgtcggcatgccgattgttcgcagcagcaagtagcataccaccgtcttccctcaaaacaccagcatcagccccgcttcgtagtagtagttctgcgattcgagtgtggccgaaaactgaggccatatataatggagagggatatcgcttggacaccacatctttcggatcgggagaaaccccagcctctaggaggaagtcaacgagacgctccatgttgagccaagttgccctccacagcaatttggacggccaagtatcatcccctgctgcggcttgtatcggtgtaatgacagcatcattaccaccttcgctgccctcaatctttctggtaacgatacgttggatatacttcaaagcagcagtctcgtctctaatcgacatcgcgcggactaagcaattcataggggcgaactcgctgagggacgggtctgatgaccatgctgcactatccgtggtattcataagacttttcaacgccttgcgaaaagctggatcgaggctcttcgtattaagaagaacagataaaggcgagctgagtttctccatcgacggccgtgaaaacgggttgctcatagcccaatacaactttgcccaaggcgcaaggcgctgctccggtgagctgctgaatatctgctctagatgtttccaagattggggacttttctctagatgatatggaaatgccgtggtagcgtaataaataaggtcttcgccgttgggcagtactgcaggcacgagctcggtttcaggatcaccaattgaagagtactgatcgtagatctcactcagccgatttcgaacttccatatcatcgaggtaggcgctaagaaagtcgagggctgtctggtgcacagctggttttatctcattccacatatattggggattctcaccaagaagtatgtcacgtacggcctttcgaacacagatttggttagggccaaagtgaaccaagactggtagccatgacttgaggaggcggtgggccttttcaatctcgtcataagcaggtctgggaaaggactgatcaccttcggtccggttgcagtggcacaagaggcaggcaagttcaatactgcttaagggccggtggccgtaaatcagccagaggaggatccatcgtaatcctatctgatcgggaatcgatcgaagtatcccgtctagtatagccgccggcgtacttgtcggtttaaccagaccaagaagtgttaagaaagtggacatgcgcgtgacgatgggtcacaggcaatgagtgtgctttgtatga

SEQ ID NO: 1665 - DNA, 6343 bp, Emericella nidulans
ggcctttgaccgggtcgtctcgaagtgacgggccctggaggtcaggagacggaggcattgtgaacgattttgagataagcagctcgcactctctggaccgcggcctgaagatgctcgatattctcccaatccatcttggtttgaaatgagatattgagaggaagatggtagttgatgaaagagttgtgttactctttgtttgcccgcacgccaagtcacgtctgtacaatttcgaggggagagcttcccctcattagatgactcgattcagctacctcgaattattgtacggtctttccaatcatcttcactatggtttcaaggcagacaaagcccagttctctacatcaatctcccgatcgacccgaatcccctgcgtgtctctgccgcccttccccacggtaatctgcgttagagggtacgtatcgctggtggaattgtttacatgcgtctggtacttctcccttcctccatagacgctccgaatgggttgcgcacctgtgtccgtccgatccgcagtggagctgtgggaacctttgcttccatacgtaagtcgactgcgaagggagcttaacaagctgccgcacttgatcagcaagggcgggtatgtcggcagacaggcgcagaggatggctacgccaaggttaatggtcgaccatagagctgctcgtgccaggggaactgcagcagttagactcgtgccaacggggttccaaggtacgtacggagatcatcgccagggttgtaatggtagacgattcggatcgttccagtgacgaggatactatactgattggcatgattcagccagggatctctctaacgtacaaagcactcagcaagaagatactcgccactgcaattctcttccgcaagctcatgtgcgatcgcagcaccgtcggtatgggcaggccgatgatggccaaatcgatgagcatatccaccagctcgatcatgagaaaatacacagagaagttgaagcagtgcccgtccacggtcttatcccaaaagcacctgattggcatgcaatacaagaaggagcttataatcgcagcaacaaaccaggcaagacagatggcaatggtcgcctagatgacctggcgaagaatttgcaccgggaaaatgcggcggtagaggaagcacatcgacagcttgattggggtaaccgtaaacccatagagagggggcaccgcgtacgtcgacttcatgtatgcgacatatttccgctgtctttcctgggggtcgatgtagacctgtccgccgccgaaagtgtagacgctcacgagggtatttacacagaagccaaagtagagcactgcgctcagcaagacgaaccagtcgcctaggcttagagaaacgcgttttatccgccttgcagaaaggcgtacctgacggccaagccagtgagaaccagaaataagattgtcacgactacggtggcgtacgcatgtcgttgagacccgtggatgaggagcgtggggtgagcatcttgccagaaatgcgactatggcacccaactctattccaacgcaataaagcgagtgagaatagggtattatattagaatttcttaccgccacatgttggaatgaccgcgtcttgcacagccctgtactcccccagattcgcagccaggcaagggaagatatttcagctcgacacctccacgcacccctttccaagctgtccacagaactggggccgcagtatcggagcaaaagcattgggatctaactagtacgtcagatagagcctgccgagtcccagacgttacaccgtccgttgggtttgcgctgcatcctccaacaaagaccgagagcactatgaaaggtcgactcctcgttctgcaagagttggatcttctgcaatggaagataggacgcacgatgctctgagactaccgctattggtctccgggacgcaccgcatctggcaagccaaagggaatggtttttcatcgttattatcgagctcagaaacagtgttctctccaccctggacgaggatacttatactcttttcagagagcttttatcaggtgctgacggtatgctctgggtctgtcgaggcggcggcaaccgcccgcagctaccagaacacgccatgatacagggtgcttttcggggaattcgacttgacgaactggcatcgaagtctatttcactgttcctggaaccatgctcaaccgatccaaggcgcatatcagagttgacaatgcgagctttcggtgctgtggctacaagacctgtgaatgaatgtgagcaggagtacgttgagcgcaatagttgtctctgcgtcgatcggcttatcgaagctgattacatcaacgagagacttcctgatctcctagcagagattgaggagagaaactcattgtttggagcgcatacagcactgtggctcgacattacaacaccaggcttgttggatacgctcgtgttcatcgcggatgaatcgtatcagactccgctagcccgtgatgagattgagattaaatgttgaagcatgcggggtgaacttccgtgactgccttattgccctgggacgcgtcgctggggatcgcttcgggtttgagtgcgcaggcacagtatctcggatgggcagtgaggttcgagacctggatataggtgatagggtttgtgccagtgcaagtgggacataccagacctacgctcggtgcaggagtggcgatataattcctatcctgactacatgagcttcactgaagcggctgccttgcctgtcgtcttcagtacagtttactacgctctcacccatattgcgaatattcaattaggcgagacgaaactcattcattcagcgacagggggtacaggacaagccgctattcagattgcaaaacttcgcaacgcggagctctttgtgcccgtcggttcagaggaaaaaaagaaactgctaatggagttataccagatcccgccggagcggatcttcgacagccgaaatgcgtcctttgctaaagctatccgccgtgtcactggtggcagaggagtcgacgttgtcctaaattcattaagtggtgaccttctggtgagtagttgggagtgcatcgctccatttggtcgattccttgaattaggcaaaaaggatatcctttcaaaccacgatctcccaatgcggcaattcgagcgaaatgcgtctttccatgcaattgacctcaatgaagcgcggaaataccggccagaactattacagcggttacagagagaaattgggagtctcatggcaagccataccgttaccccgcctcgaccgatacatgtttatcccattagcgaggtcgagcaggcatttcggtatctgcagcacggaaagaacacgaggaagacggttatcgagatacgaggggatgaccctgtcaaagtaagtaggaagtctcctcttccctgaaccgatggtctaatacctcctagacgaagcttacgatacagcgctcgtggtgtttcgatacgaacgctacatacattatcgccggcggtctcggtggcattggccgcgctacagcgcgggggctagtgagcaggggtgcgaagaacctcgtcttgctgtctcgttctaggtccaatgcagagacccagcaagttattgattctttgataagagatgggactcgcgttgaagtccatccgtgcgacattagtgactatgaacctctaaaacatgtgctcgaggacgtttgccagacgatgccgcccattaaaggctgaattcagtaggccatggtactccgtgtaagtgtggcttgtattatttgttttctgcctgtccctgctgattagttgcagaacaaagtcttcgcgaacatgccctatactgactggaaagaaacggtgtcatgcaaggtcgcagggacctggaacctacatcttcttcttcccagtggtatggacttcttcattatgtactcgtccatcgttggcgggattggaggcacggcggcggtcaactacgccgctgcgtgcgcataccaagacgccttggtgcactaccggaacggtctcgtcgagcgcgcaataacactcaacttgggtgttatgctaggctacggggtactgcgcgataacgacatggtacgcaatgagctcacggcgtctgggtaccctattggcatctctcaaagggagattttcgctttgctggagtatcactgcgacccgtctcttgaaatcccccgcacaccgctcagatcacaggtgctggttggtctcaatacaccactgggcttagctgcagagggccgcgaggtccctgtcctcctcaatcggccgctattccgtggaacttggaatatcgtcgactccgtcgagtcgcccgccgccaatgcagccgaggatgcaggaggcaatgaggacatcctccgtcgactggtggctgtcacctccatgcaagagaccgccgatgtcatcgccgagtcacttatgcagcgactcagtaaggcagtcggcgttccgctcaagaacctagatgcgaccaaaccgatgaatcagtatggggtggactcgctggtcgctgtggagttgaggaactggttcaagtggaagttggatgcagatgtcgccgtctttgagatgctgggcaagatgacctttgaggagatgggccgtatcgcggcggtcaagagtctggtggttaagaggatactgtcgtcttcggcttggtcgtaagcgatggcagtggcagctgatctgcatattgaaggtctccggtgacagttagggcttggatgtggagtcgtctatatattggccagtcagagcagtcagaagccgccagcaattagcacaaccagtctaagatgatgccatcgatcaacactctcagcgacatttagcgagtacttaatagtggagttctcaggcgatagataacgctccaaccccaccagagctttctcatccttccacttgctataatacccattagattttctacactttctctgcaaacaactaagagcgtcaattatcatcaacatgtcgtatggaacaatcgcatcggtggaggatcctcccagcgcggatctcgctcaggagcacgaacaggacgatgaacacgcccaagaggatgaaccgctgctccccgccgtagactggaaacctcccaaagggttcctttggatagaagtcggtatgttctctccttccgctgatgtctctgtgggattcaccttaacatcactagcaattttcgccaatgttttcctctccggcttcgacggcacaatcacagcctcgacctacgcgctcatcagctccgagttcaaggccgcaaacacctcctcctggcttacaacctcatacctgatcaccagcacggcattccagcctctgtacggcaggttctctgacatctttggccggcgagcctgctttttcacgtccaccatcagcttcctcctcggttgcctgggctgcgccgttgcgcaagatgtcgtctttctgaatctcatgagggccctgacgggcgtcggtggagggggtctcatgacgatggctacaatcataaactccgacatgatcccctttcatcgccgcggtatgtaccaagccgcgcagaacgtcctgcacgggttcgggtctatctgcggggcgtcgctcggcgggtctattgcaaatacgatcggttggcggtggtgctttcttttacaggtgcccgtgtccgtttttgcgcttgcgatcggacggatcgttatccctatgccgcagaaacctcctacgggcgttggctggagtgtttggaagcaagttgaccttacgggtgcgctcctcctcattctcggtctgtccgtgcagctggtcggcttgagtctgggtggcaatgagctcccttggagtaacggatgggttgtttctagtctgctcggcagcctggtcctgttgggcgggttcatagtcgtcgaggcaaagacaagtgctatccctgtcatcccgctgcggatgttgaaaggtctcttgccggtttccacgcaaatcgccaatgtttgcgttgggatggcagcttacgctgtaagtctctcttgcctccctatctcttcgctcagcccctccctgcaagtatcaagacgcaactattgacgtcagcagttcctcttcaacctccctctcttcttccaaatcgtgctgctagacagcgcatccaaagcgggtgcccgtcttgtgattccgtccctcgcgacgcccgtcggcggactcctgtctggaatcgtcatgtcccactacggcaaactgagctacctaatgcgtgcaggtgctatgctcatgtttctggggaactgcttgtaatgatattggactttgaagactcggcatggaagtactttgtt

SEQ ID NO: 1666 - DNA, 1929 bp, Emericella nidulans
ctcaggggtctgccttagtgtggctgctgctcagacatagaatggtaagtcatgcatgttcttgcgcaaccgctgggacccttaagtcttctatcctatgtagtcccttattcccttaagcgtctacacgccgttctgttagatgtcagcgggttaaagaaacccgaggcatgccgtctgacgatcccaggtcacagctgcctggagagtagtaccggacgagcggagccatcctaccccgtcccagcaatgatccaacctcgatttattgattgtatgcacataattgtagtagtcccgggttgtaagtgtggggtgtgactgagtggttgggaggttgaggctgacgcccggcggggtgctaagcttcttcataagacaagtgacagggatcggttgtatctgcattcatctgctcttgaaatgccgagtctacggtattaaccctattgattataagaattcatacagagtggggatggatgcttgatgttagcccggacaacgccatcatccatgccctaatttatgtgcgtcgcgaatatccctccaatgagcagccacataccgacgatcagcgcctttgcgggtgtgcctgagaagtggacgcgtacggtcattaatctatttctcgcaagagcgaaataacatagatggaaacagacggtctgtttcgtgataatgttgggccgatgggataaagggggaggtatttaagttcgatctggctgtcagctggcgattcatcgacaccaccattgatgtcgacataccggctcaataccctcggatcgactagctttggcgaacatgctcttctggaaggtatgcccgcttctctccgccattctggtggccggcttgaccgtcaccgagacagacgacggcatcaccgtcgatgttgaaggtgacgatggcttcgtcgtgacgatcgacagcaccgggtccatctcctcacttcagtaccgagacaccgagtatcagtactccgagaccctgagccatatcgcctcggggctgggaagcgatgcttctgtctcgtataccacccaaggtcttccccctcaccctcaccaaagatggtatgtcatatgtacctaacgaacgattggggccggtaggggagtatgccattgtttccgcaacgattgacgatgacaagttcaacctaacccactattacatcttccaaaacggcctcagtgcaatctacatgggcacgaattccctatctcagcctgcagtgggtgaactgcgctacattgctcgtctggtgaatctgcccgaagcatacaaggagggcgaggtctctgatatccgaaatggcgaggccatcgagggaagtgatgtctatctcgtggatggtgagacgagaagcaaagtatacccaccctctctacttggtgtttgaattgttgttgaccaaggctggatggcagttctactcctcccaacgtttcatcgacgactccgtttactgcgcctattccaccgacagcagcgtgcacgcctgtttcctgtctgacacgcgctcgcgcgaaaagtcctctggcggccccttcttcagagacatcgaccttaacctagtcagcgactaccactccttgacatactacatgaactcgggccacgtacagactgaagagttccggaccgggttcttcgggccgtatattctgtccttcagcggatcttccatcccctcctggtctgattttgacgtctccttcttcgacgagctcgagttggacggctacgtcgggtcctctggacgtggcgtcgtgacagggacagtgagcgggacatcatcttctttacctaccatcgtccacttctacaacgacgactatcagtcctgggcgaatgcctcggacgacggctctttcacgtctcctgagttagtggaaggctcctacacgctcgccttgt

SEQ ID NO: 1667 - DNA, 3634 bp, Emericella nidulans
  unsure (1)..(3634): unsure at all n locations
aatccgaagccagagtctcgagcgcggaggaccttgactttccatcaggcctcgatcccaagaccaccatctggcgtgttctaggcggctacggagttaccggagagtgctgggaactaccgatcgacgagattctagtcgacagcatatggcagcccagcctaagaatcgcagctgcgtactccaccccctctttcctcgtcttcttagcaggagactctgcccacctttctcctccccacggtggttacgggttgaacagcggaatcgtcgacgccgtcagtcttgcatggcgacttgctgccgtaataaaggggtacggcgggagctatttacttagttcatatagtcttgaaaggaggcccatgatgatgcgtgccttgtgccgctcatatcggcatctcttggaacatgtcaagctggggagtttgtatgaggaattcggtgatgttattgaggcggagggcgacgaaggtgagaatgtcaggatgtacctgggacggtggattgcagagtctggcccagatatcttggacagaggcgttgagttggatctgaggtatgagggcagtccatgcatctggactgagcctcagtcagagggagaggaggacgacgcctgggacgtgcatcggtatagaccaagcacatggccgggccgtcgagcaccgcatgtttttctcaaggacgggaagacgagtacttatgatttcttggggaccgagtggacgctgatgcaatttatcactcatgagtcagaatcggaaaccagcaaggcagagacattactacgcacggcgaaacaacgaggtttccctctccagcatgttcttctgtgcggagaggaacaagtgaggaggatctggcgaagagatcttgtcctcgttcgaccggatactcatgttgcgtggcgggggaagggaagactagcggtggcagaagctgagatggtgctggacgtcgtcctggggaagagcgtgaggccagagtatactccccctacgaatacagaggagacgttgtttctgaagacggtggaccaactggtgagcatgggaaagagcactggagagcgtgccggaccgagagacgtgaaggcgaggctttaatgcggtgtatgtatagtatcaatggattgccaaattcagtatcgataccatccaaatggttactgataaatttaaattacggcactacaaggctagctatatataatttacctacactcagctacagtagatttctgacatagatcgaccgattcctttcgactacttccaagagactggtgtatcgctactctccaggttatcgaccatatgttggtccgtcaagtcaaagccagtttaacacaggcccagatggtcttttgatgacccccctaggaaggcattcttccccttccaggagcgagatggacttcctctcacccggaacccgacagtcttattcttactgcaccatcaatgttagctgatcaacacggcagcgggtatttttactcggtgtcttatcaataacgtgattataaggaacctagcttatgtggagcaaaaaagtcgaaacgttcgtatgattagcaatgataagtatctatagacagtaacttgtcagtgtctagaatatgtactgatgcaatagcacccacgttggaaactaaacagatattttaaaagagaatacaccctgctcttgttgcagttaattttggactactcgcgccctttttcgccgccccacgatatcctcgacctgctgcggcgcgagtgcatccgcgacgaacccaggccgttgccctcacggtcgtaagtgctgcccgcttcaaggttcgtcccgtctgcgaatgagatttttccaggacctttccggttgttgtggtcgtcctcaccctcactaacagcatccgaatccacatcgtcttctgagtccgagtactcaccaagggcggcaagacgacgtcgacgttccgcaggtgtttcaccggtgtcgtccaggtcgagcgcttgttgcggaagcgcgaggccagcgcgttcgcggagcttggatggcggcactcgttcggtgccgtcgtcatccgaatctcgccgcgaacgagggctccgttcgcgggacgatgtccctgggctgagatctttacgtcgctcatcggcggcggttcccgtagcagttcctgcggcaatacgtgccaatgtttcggcgacgttggggccaggtccttcttcagagtctggctcgtcatcgctgccactgcttacagattccaggtcatcatgaggcgctccggtctgatgcgcagacccagcggccgacgcacgtcgttctcgtttgtccgcctgctgagcgtcgtcgcgagcagcatctttgacacgtttaggagcatcggaatcttcaacaatgctttgccgggcttttggcccgagattcctgatctggtcggcaaattcttgcttcgtcattctccgacccttgtgactaatgccatgtttgccaacagtctcatcgttagcaagggtgaatcggagcccatcatcagcaagccattcgttttcatgcgtctttttcccggcctgagacggttcgccttcttcttccttgccgaaccacgttcccatgcggaccaaaccacgtcggacgggggcgttgcctttggcttcggatttgtccacagacgggatggagtattttttaatgacttctncatcctcatcctcaacaatgatcgtattaccaaactgataagcgtgagcagatcgacccttgcccttgggcgctttcggaccagcttcttcggctgacttcttctcggtcttcgcatccttctgctcctggttctcagatcgctgtttaccaaatccgagccactgtccgaatcgccgacgttttgccttatcaccgatactcttctcaagccgttcgcccgccgttggctgctcctcagaacttcctggcttggtttcatcaggaggttgctgaaattccaagttcaacttggatcgttctgcttggacatgccgcttttgttcctcagcagacatgtggccgacatgctccgtcttcagtacgtttccatctttgtcttcatagataagatcatgaccctcgacataaacgttgacaatagcatcacgccatgtggcaggtggaggcgaaggtgtcgtggactcggtgtccccgactgtcttttcagcatcttcagactccacttcggatggtcgttgaggcgcaatggccgattggctgataggtccacctgctccgtcagcctttctgcggcgtctacgacctctgcgggttgatactctgccagtcggggaaccactatcgtcttcctgtacccggcgcaggaaattacctgggagaccgattggaggtaaagttccgggcgggtactcaggctcatttggtgacgatccttctgaatcatcggctttgcggaaggacattgaccctttagctaaagactggacacgcgggagacggttcatccaagacggtccttcttcattcgcctgggtgtaggacagagtaattgatagtgtgttgatgcgtttccctaaggtgaagaccgcaatggacgaaccgtgaacaaggatggatgcgacaaccatgaaggtagtcaacggccagataatct

SEQ ID NO: 1668 - DNA, 5445 bp, Emericella nidulans
caggggagggagtagttccccgctgtgggagtggagttgaaaatagagcatggatatgactgagtcgagatatggcgcagagaaaacgtaggcgaatattgatccacaaggcgctgcagcccccttacgtgccttcctggttggcggcgcatgatagagagtactggcccggacaatccattcctgctcagtgacaccccaagctctataacaactacaagggtataatgctactgaactatagcggggactgtgcaagaaccaagggcacgccataaaatgctggatttggggataggcaaaacaagagggtttacagtccgaggcgggcgtatcaaaaagagaggggccgtgattgatccgtcatgactttccctctgtctttttccatggatgctccaaggagagggggccgagcgaatacatctagacatacctgtcccggagtcgattagtcgttgacgttgacgtatatctgtttaaaaaacgtcgattctcaagggccatccgtaatccattcaaatgacataccctgccggagcgtaatcaacacctttctctaactctctctctctgcgtctcatgtttcttgtaaccctttgatctctcggcgtacaatttcgctcactcttccgataagagaagtctcttcgccccaataagtcgggtggacaggcagcacgggcgtgagagccggcaacaaggctggctgagacttctaaacattttagagcgcaaatttgcgtagacgtgcactagtagtcttatggcgcagcgtttgttgctggaaaaggggacgagtagacaatgtcaggtgacggctgttgccctatgttgtcggctcagacagcaaccatacttcacggaaaccctgattcttgccctgggtataatgcatctaatgcctacgatcataattgagattttgtcgatgtcactatttcgtctacattttcctgtatccgacaagagacctgtcctcgtctacgctgctatcaagaagcttggtgccggcgttacgattccgccggcccaatgggtctcatgcataagtcccacggcttgtacccttcttcccctccggctatctacccgaccctgctgcatcttgtgatcctattactctcggagcagagcaccacataacgctgataaatggcctgacttatctgatctcgtgctcaaatacagagcgagtttttgcggatgctcctctgtggtaactgtacctgtaactcttttttatctcccttggggcatatggacagatgctggctggctctgtttgaagtgtggaggctggagctgcgtggcatgaaatgagcttaagatacagtctgaacggagaattggagacagacgtttgcgttagggttgcaccaagaagtagagaggcgcaggcctgagcctggtgaggaaggttaggggttacttatgggagtgatgctagattcctactttgaaggcggaaagagtcgttcatgtacgcctcaaggaatattggagttgctctaaagagctatatagcctgtgcactaaataaatgcgatcgtgataagactacagagacctagggttgtttcttagatgatcgattgatacacatcaagtcatgataaattcgtactctgactactaaccgactgggttctgcctaacacccgtgatggcaaccataactagctaaccggccagcgtaccagtacggacaatcccatcgacctaagccagcaggtaaacaaacaggcccaaagacaggtaagaacgggaagaggtccgaatccaactccactgcgccgaagcgcatcagtcccgtcttgagcaaatccagcccgtctacacaccaagaccacccactataccgcctaaaccgccaacaagcggcagattttcgagcatgctctgcttcttgggtgccgcgggtgcactggctgagggagacggtgacgcagcaggcgtagagccctgctcctgcttgttttccacatgctcgccctctccggcactgggttttccggcagtaaatgatgggcccgcggacgaaggtgttgccgcagcagagaccgaaggggacgcagcggcatgttccttttcagccccggttggtgccgaatgctgattgcccttcgtctcagcaccggacgcaggctttccgtcggcaccggggaacgtcgcgaccgtgttgggggtcatgttaatgggcatattgttgccataatccgggacgttggtgttagcgtttcctctagccttggcttcatccttgtcatcttcttcgacactgtacaagtccatcatctgggcggcggacttgcaaaattagaaagtgttcacggctgaaggggaacgatgagcttaccttgagtgaaccgtacgcgatcttggatgccacgtctgcagagggagagtcgccatcatcgcgcttgagcttgaggggtgttggagccgcgacggcgacgagggcgaggggtagggcgacggcgagggagagcttcatggcgatgggtgtgttttggtagttgggagaaagaggatacgcttgatagattgctggctgatgaggtgggagcagtacagaacagaaggcctagacagcgcatcggtgatttatacctgtcaacaagcaagcaagcttcgaccgctatggatggacattcctgccacgtacgctctgctcgcggtgcctcgcccgggaatttgatccatcagcgaacagtaggtatccagggtcctgctcctgtccctgggtgcctggttggtggctggagagtcaggagatggcggacaggtggctacacgcccatgcaagggatacgacaagcctacgcggagaccttgaagctcaggcacaaagtaacattccaagaaagtaggtaattgcgcaactacactacatacctagagcctatcgctagacttttgactgcaagaatgtagctccttctgattgacacgaaccgcgccactcaattttgacagcggccgcaacacgagggaggggtggagagaagaacaagttcaacttccgcttactatcggcacgacatttgacctcgactatcatgggtttgatggacaagacttcgaaggtgccattcgctgcggaagtattaccagctggaagttaatatatagctgttgtgggttagtcgaaagaacgaggcgatcgtgaggcgaacggcagggcaggacaaggaaacatcaatccctttcactccctgcggtctgaaactgagtagtcattccatgaccttgatagtgattcgaatacgaacttcacacaggaagacaagtatagtggcatgtaaatcatggctgaatttgcggttgtgtgtgctcaaaagcgaacctaacaacctcgcgtgggtggcaggcgtcaggattagaatgggcagctcactctcggtccctttctataatttgtcaacagaatagagctgtccatcaacaagggtatgttggagacctgaatatgtatgtgagaaaagagggaaaagaatttgtcgccggaattttgttgtggcaggtcgattagtcatcactcttgctactcggtcgaatctttacccgagccgagagctatgaaataggtctccaagttctccgcaactgctactggacgcacctcgagagtcttaacgatcgctgaattgtacagtcataaggtatatacattaatattcaacataatcgaactaaaaacgagcaatgaccttctcctgagtatccgccaacgcccacgcgtccgacgccgtcttgctgaggaccttcttggcctgctcagctgtgaagcccttggcctcgaccgcagggttgtaaccgagaccattgatcttcgcgacatccgccgaagataccggcttggcgaccttaccatcagcacgcttgtacaccgtgacaacgacggcaccgcccagtcccagattgtgctgcagggcggcgtcggttccctcgaccaagcggttgttggcccagccacgcaagtgccagaccagttctgtacactgtgccagaccggtggcgccgagcgggtggcctttggagatgagaccgccggatgggttgataaccatcttgccgccgtatgtgatgtcacccttggcgaccatctcgtgagccttccctggttccgagagctcgagcgcgtcgattgtgatcatctcgttggcagagaaacagtcatgcagctcgcacaccttgatgttcttgatgttgacaccggcctcggcgacggcagcacggcaggcggcgcgggacatgccgaatcccataaggtcgatcgagcttctgttgtacaacgtggtgttgtcagtggcgagctgctgaccggcaatcaggatagcctggtccttgaggtgagggcgggcatccaggaaagcctgcgagacgatgatggcggcagcgggctccgtcagaggtggggcagcactgcagcttggtaagaggctcatggatcatcggagccttcataacctgctcaagcgtgtattcgtcctggaactgggagtatgggttgcgcttcgagtgctcgtggttgatgcgggcaatctccgcaaagtgctcggctttggcgccgtacctaaccagtcagtttctctgtcagaaactatgggctagaagctgcttacttctccatgtattcacgaccagcgttaccgaacatctgcgcagcaccaggtgcgttggttacaccgcgagtctcggccatcatcataccgaaaagaccagtggggttggcccggtcgttgtataccgactgcagcgatcccgggctcattttttcgaaaccaacgaccataacacagtcggcggcgccgtgagacacgagggtgcgggccatagcgagacctgtcgacccagtcgagcagttgttgtttacattgtagatcgggatctgggtgaggccaaactggtagaagacacgctgcccgcaggtgctgtcaccgtagacgtagcaggcaacgccctgctcgacatcgtcgtagttgatgtgagcgtccaacagagccttgacaccggcctcgaaaccaagctcgttgtagtcgaccttgcctcgaggcttgatgaacttggtcatgcccacgccgaggacgtaggcgggagaagctgcttttttgcccatactgacggttgacgataaattatggattgatcaaacgctacgatcagctccaaagagaggagaaggccagctttatgtatagttcaacaggacatgtggatgatacggtagtggctttgttgcggagaccaagtttgcggggatgccgtggccgtggccgtggccgaggtcccgaggatatagcggacaaaagcggttagcgcaatcatatgacaagaggctgcgaacttcaggtctcctgcctctggatgtctttcactcaaggcccgcctttgctgagccggttcggacgcggtacggtcaacgacggccatatttaccgc

SEQ ID NO: 1669 - DNA, 2744 bp, Emericella nidulans
  unsure (1)..(2744): unsure at all n locations
caatcacatcaaccccacacaagcgagccgcacttttcgaccacatcgaaaaaaaggcacctaggaatcctcaactcctcgacagtcgacaacttcagccaaccacagccgaacacccttcagtgagttttgctgcaaccgttccaaattcattactgggatgatcttgtcgcgatgaataattctgtctaacaatcgcttttcccattcagatatgtccaacgttcagaccggcaagaagcagcgnnttctatcgccgacgtggtgacccgcgagtacaccattaacctgcacaagagggtatgttaaactgcgaaactcgtcattatctctcctcccttctttcggcggttcgacgcacaatcgaccaccgagctgtgatgctacggaagacaaggatgaaacataccttctctttccgacaaccgtgaggcatggatggagaacaaggacatgaaacccgcgccaaccagcgataagacaagcgcacgatttcccttaactgaagaaaccttcacttgagaaaagaaaggtggaagccgcagccttgcgggggaagcaaagcaagtcgtcgcgcatgcaactacagactggaaccaggaatcatgcttcaccaatctgaaatccaagtaattgggtccagatcatgatgaacctgtgaactgagtgagaaggtcgtcaaacgcaaaaaaagaaaatgaattggttttatgaagtccacctcatggccgcaatcgcagcaagaaaaaatattcctcttttcaagatggcattcgggcggaagactgattcttctttttttgttactcaatagacgcacggtgtttccttcaagaagcgtgctcctcgcgctatcaaggagatccgcgctttcgctactcgcgccatggttagtcacttccgtcccacaagaaacccctgtgaaatttgagcatgctctaaccaccttttgtccggtgggcagggcaccaccgacgtccgcctcgacccccagctcaacaagaaggtctgggaagccggtatcaagggcgttcctttccgcctccgtgtccgcatctctcgcaagcgtaacgacgaggagggtgctaaggagaagctctactcctacgtccaggccgtcaacgttaaggagcccaagggtctccagaccaccgttgtcgatgaggagtaaacgggtgtttcgttcctaccggttctagttggttgatacaaaaatgaattcaaaaatacctcttctgtgacggcaacatttgcgcctgtagaactgaatcctttctttctcgtaagctgtggtagctctagtggagccgagatgtcctgtcgcgttgcaaatgtcctccgcatggtttcaattggctgctgttcgcggcccagtcttgcagcacagaaacctggtcaaaacagtgcttacgatatcacttccagcatctaacagataccaaggtacgaggtttcctttgtctaggtctactcctattaccttgagcgaataaaaactgagcgcaccgagtgtcatgctctaataaaacaataagcagaactggaactataaacctgtgtactagaagcaaaactccaacatatgcatatcggcatgctgacctgatgttcacaaagacacgaggtagaagagtagaagtgggtaataacttggaatccaaaatcagacccggatgcgacgtgattcgaaattgtgacaaataatacaaacaagactttcgattagaaaaagcttgcaagcgagctcatcatcgaatccccggatagaagtataaagcaaaggccggtggatgcattagtgatgaagactgttgaaatgaggataatgtacccttgccaggtccatgtttgctcgtaaaaatcccttctttctgagaatcagtaaactaattacgacttgttctcgtccatggcagtcccaactttcagggcttcgccagctttgagacgaagagcccacatctctggtgcgccttcggccttgggaacaaggaattgtatgttgtttccgttcacggtgtacttaatctccttcatcaatctggcgttcaggaccacatttccgctagggtcggctcgaacgaggacgcgactgcgggacgtggttcgattttttaagatgcgcaagaaacccacaccttgactagcccaggatccgtctaccatcttcaaagcacgtgctcgtgtttctattacgatgtcttcgtcttcttcgccggcaccacttctagcaaggtcaacctgaggttctggcttttgagcgtctccatcggcggaatcttcggctccagtatcggaagtcacacccggtgttgtggcacggctctgggactcggaagtgagcacagatggtgtcaaaaaagaagatcctggttgggaaggaccaccgaatgagaagccagcagttccctcgttaccgcttgggccaggttgagcacctgcggacggagccccaaagagcgttggatgatggttagaggattcagaagctggtgctgccgttgcggtttcggatttggctgataaggttagacctggtgcagaatcagatgaaaacttgatgggcgtatttggtttccaagtattgtcgctgccaggcttggtggcgctggaaccagtagcgaaaatcgaaggggtgcttgcgcctgaggtagctgacgttgaattaccaaagatactaccagccggagtcggagaaccgaaaatgttggtggataaaggtttgggtgtggaaccttcttccg

SEQ ID NO: 1670 - DNA, 3619 bp, Emericella nidulans
aatcaaagacgcggtgacagttggcgcaaccctctgggccacctactctgctttcaacttctcctacgcgatgatctacattcccggcacgggcatcctggccgcctacacggacgccgagaccggcgcgctcagtcccgagttcaaccaagctatcgcaatctacctgtgggcatggttcattgtgaacacgctctacgtggttgcggcggttcggagctcgtgggtgattttcatcgacctcgctattctgagcctgggcttcctgttgttagctgtggcgtatatgaccggcgaccaggcggttatgacggccggttactctgttacgatggttacggctgcgctctcctgtaagtctctttctcttacgtctttttttctttcatctttgcggcttcagatcattacttgcttggcgggtgctgatgggtgtacctagactgggcgggttgtgctgggctttgggccggcggggcgaccccgatcgacttgcccatgttcccgatgtataaggaggctcagtgatgtagaaagaaactcgatgagacgtagcggaagcacagataaccaggggtgtctacgagatcccagttcgaagggggtcgatatcgaggttacaagctggccagtgtatcacagcccctggttggatgtcagcaaattagggtacttagtagacacttccagattggctatgtgatgggggtttgcgaatatccacacctgtactatccttcagataatttacatataatatacatactccagcaatacctcttgagcagaagaaataaggtggtatctgtgctgatgtagttggacgggaaggcaacctagaaaaactagctagaagagaaaagaggtgttgagatgagcttatctagagaacaaaactccctctatcgacgatagcaacgcgacttaaaagaggcccgctacattatatgtgctacgcgctatgcattatgtagatgggcggccgctctgcatagccttaagggtcatactgatcccccgacggtgtataattattctacgcaagtctagctacctatgaatatagtatttctccccccagatcccttcaacagcctgcaacctgaattatgagccatatggtacgcaaaaaccaaaccgtctcgctcagtattcatcccagacaatatctcctctcccttcgttatagcttcggcctctcccttctgcctatcctcgagctcggcaatgcgggtctggattcgttccatgtgccccaggagatcctattcggcgcgtctcaagtgggtgaggctgtcaagcattttgtctcctatgacaaatgagaagacttgctcgttggtcatgagtttgttgcagtggcgcagggtagcggccattctgctgaggttcgaggccttgttaactgggctgtgagttcatttaatctacagaagtatgaagaggaagcccagacgaacagttggtacagaattcccctgcctgccagcaattggcgcagatgccgttaattttcttgccgagtctcccagcacaggacttccagagtccccggccccctgaacagccagcacaaggtctctttgcgataaggccgcgagtttgattgaatgctgcttccaggtctgctgtgtctccggcccaggacttgctctcaggtgtggcaggcgtaggcgcatgggccgtgcgccagtcgagtcggcggagcacagggtacaaaatgtagaaccggattgtcttgctggttgtcccagaaggaggaatcggaaggttgctggccgtgatgccgggaagtatgggaagtatggggtggatgccgaggatgagcttgtctggtctagggtctacgacggtgcatgttagctccttgtcttgcacggcgttaaatgaggttggaaaagttgcgctgagaagtaccattatgagatatcgctctcgtattcgctctgctctttatgtttgctgtgtctcgctttccgctgcaaaatcggacggtcacaggatcatcctcgagtaatccgccctcaccctccaagttgctagtacagtggcctcgcttgcatgtggaaggaaagactgccatcacttgggaggggacattgagggtacatggacactggtggccgtgatcggaggcgtccataacgacttcaatagaggagtctctggtgagagtgggtttgttaagaaccgaggggaatcgccaatgtcaaggtcagagtcgctgatgacactctctttggatatggcgaaggtcagatactgtctatagtgagatatgtggtataggaacgtattgataacgggatggccgtagagagctcagtcaatcacacagaggtatgtagacggaggagagaagatggcgaggagggtcgataaggtagctttataccggtttgtcagtttaacatcggctcaggccttttcaccagtgccatattgtatgaaagggaggtattctcaatcaagaatcaagagctatggattgcaacgatgacagctaccatgcagtgagcctagcactgcacggcatttaccatttctccaagagcagaagggaagactgctgagcaatcaccgaaggcagcgagaccatgaatgatgggttgattgtggagtccacaatgcaatacctcgatggacaagactatactggtaattcatacttcttgtattgggattagttaatatcacagtggcagacggtctgcacgagggctgtttctgcaggcaatgacagtcctggaggtgactgtcagagcgcttcaggctggcatttagagctacttagggtttcgtattcaccagcaaattgatccgcaagcatgcaccgatcttaacgcagaacaccccataataatctctccttgaagctaaaatgtgaaaaagcacgcggcctcttgcagggtgctcggttgaatggtgtgatgtgttgttggtaatatgcgtccgagtttgccgtcgcaggtatgattacacagtggtctgccgcgttgagtggctcggtatatatagaccgagcttttgaatcattgtagctggaggatagaaggtgaaagagaatggaatcaatatacacgcagcattgtgaacataaactggtgtctaataaccttaaaatcggggcttccagtctactttagtgggaagtatacaaatggtcatgtttcgcctgctctacgaagtcagggtagcggactcaggccaccaatcattgaaaccccaatatctattccccttgagcagggtcatggggcgaatatagttcacgttatttctgtcctggtctccgtcaaacgctatgaagtagagatgatatgaagatgctgctttccttcgtctaaattggtggcaactaactcatcggcttccttgcaacgtgctgaattgccaatgtaattcagtttgcgagatcctatggcgatttgctgttagtataggtcccaaaagctttcagccgagacaatcagagatcaaaacgtggatagcggtgtttaccccatcgtagttgactatgtcctcatagcactgcagatctaggcctggccgtcgtcgtcagatcagagaaatcaaaaaagcccatgggtaactgtccctttgcttgttatatcgatcg

SEQ ID NO: 1671 - DNA, 3687 bp, Emericella nidulans
gccaatatgcttcagtatcagtttcatattttgcttcgttcatcagaaagaccccattgcgagatggaaccttgcttttcagcaactatattgtacaaatttcattactaccatatgaagtgttacagcctcgtacatccctactccaaaccctttctcggtgaccgtccaacatgcccatgtccttgaggcggatttcccatcgcagcagccgtatcaccctctccaagaatcttcgaacgtccgtatttaggagtttcagtggcgtctgcgatatcatcctccttcacgactcccttgcttggagattgtaatcgaaaaagtgcgtaggcgccgccaatcacaccggcaatagtcataaaggcaatgttgcgggaggaactgtagctcataattagcgaagcagctcataatttccaaaaataataatatacatgcgaagcaggagagcggccagcgctctttccgatattcatggtggcaggaggcattgtgttttattatgtatagcttcaaagccagacgagtttttgataataataaatgattgagatcatactctcttaaatatgtttatatacccagcgactgaccacttgcgccactatgacgccaagatgatacgacaacgggtcgggtctggattttgatctccccatacaccccggggtatgatgatgttatgacgggaaaggtcgagaggatgtggacctgttttgttggttggcgcgcgggctggaccggcgctaaaaaataggggttcaatgtggattaaggaagcaagggatgggcggggaagccagggttggacacccgacggaggaccgctgtttaagcttactttttgtagcagcaggtgacgatcttcatcatggtgtatattacagtgttagtacgtagtacgggaagcgcatacgttaacggtccgctggatatcacgctggcatgcatactaatgtcagagcgaaacatggtcatcacaatgacccaattaagaaaatatccatcacacacaagtgatagaggaagccatattcgaaacccacaaaaacaggtcagacctcagatcgcaagtcaggctttgtatcccaggggccgagctgtcactcccaatattcgttgcggctgcagaaccgttaggtctctagaagtcccagtaccaagccaaccccgtctcaatgcagtctctccacgtctcaaatctgttcagttagattcactcgggaccagggtcacttatgaaatgactaaagccatggaagaagaagagccgataaaaggccttcgccggtgggtcaggaagcggttcgtgggctgcttaaacactgtaatccagctgaaacaaggttagagtatagtcgttctttcaattctttgagaaagctgtcttagcttctcaaacagctagtatgcgagacgaggcaggcgctatgtaggtaattttggtcagtgtgctactccatgatggaatacttaatagaagtcccaagaagtgttcaacttccgaagcttgaggcggggaactttcctttaggataatcatcggcgttagggattgttggttgcttcttgaatgctatgttgtgcttgtaagcgccacgcctgtcaccggatcatacagcgaatctgaagctcagccacagaggaagctacgtcctgtggcgcatccttctacgctgatagtgatcaagcgatctctcacttccgatccagtctcaataaacatgccgatgaacttgctgatgccgcctctctggagtcgctcgccttggaataggtctcgcatcttccgagatcattcggcaactacgcaatcccagtgacagcttttctgtgctcatccttcttggaaggatttgcttcgtgcgccatcgcccgctaggcgatatcgggggtcactccggtataattttctttcagttaaacgctcattatgaaattgatttatcctgaagctgactgcgcgaatcaggatgggtcgcttggttcgtgtcggcttttctagcagcagacggctagcagaatctgggcagtccgttcttgatcaataccgcgtggtcagaaagcatccgcgatagccacagctggatcatgggcttcatacgcgacttggaagcctggatgtacgcgggtctcagacgggccggtccgtctgaacagatttcgaccagcgttgtgagtaaggctcgagaggagggcaaaagattcagtcagatttcccactactgccccgatctttcaaacctggtctctatgtcactatgctgctgaacaggccagtcctgacattgtggtacgacgttctctattgcatggaatgaccactgcagccagtcaacttgggatgtcgctcttcctgcgggatatggggcgattggggagtgtctatcgtcactgcaacagagactctttaattgtcaacagtcaatctttcttagtgaatgcaggagaatgggaatgtcgacatttccagaagacaatcatcgtcacccgcggcaacgggtcataacatgcgattctcgttgtcggcaccaaagagggattaacctggaagagctagtcggtagacccattgatagaaacgtgtctcgagtttgatggacacgccttgtacttatagtactcgccaatttttggcagtctttctgatattgctgcaggattgtcacgaatacatagttcctatacataaccggtggcttagtcgtaaccgagagcacccttggtgctgagttattacgcaatcccagagcctctagtgcccctttctcgtaaggaagtcattcaaagtctgagttacgggaacgatttgcagtgaggaagcttaattctcgcgtcaaactagcgatgctagtcgttccccgacacactgtcaccaaaggaaaaggaaccacggaatgagctgcgccagctggcagacgcgctaaataatccacagcgataaagaactgcacgtctatgacacatatcagcgccgtaagagctgccaagatgacggtggaaagctgatgacagttcaatatcgctgattcgatgctccttccggctgacgctggtgattttactcaatctcgacagcatattttaggatgcacctaaaatcatccagccataccaagttcaggacaaatttttccattcggctgggttatccctaggccggtgtgcgcggtacaaaatactacgcctggctaaagagctgaatcgtgcgccgcttgtccgctcccaccaccagttcaagtcattttttttttctcatcacctagaatacttaacgctaagtttgcatggactctagagtcgctccgtttgcctacccttctgaaggcttgttaacaagagctccagctacattccggcccccggcagagtgacataccgcgttatgcactaaggataaagacccttttggaatggttttgggctctggagttgtcccgcaagggtgtttcttcgccaataccagggatttcccggtaaatcctttctttttttttctcaaataaaaactctcttttattgtgtcttcctccttcttatttgttgttccccttcctctttatactttcttctaattattactcatcctcgtacctttactcacctttacccttacttctatttcagatcattcctccttttacttttttctctcattatcatccttccctctctactccttttttt

SEQ ID NO: 1672 - DNA, 4948 bp, Emericella nidulans
tacgtagtcagggaagctggcgcttcaccggtagcaacctggctcgacttatctgatggaacccaagagtccaagtggaccaagccagacaagtgctgctccgtcccggtcggatcggctgcggcggtaccgatcgaaacttcaatcagcattcttcctcttcccgcacaaggtctatcgccgcttcctcttttctctccttcactctcctctcttctaccttccaatcctcttgtttgccgttgactttggggtactgtcaaaatgtttgctgccagaaacttcgctacccctgcccgccaatgcctgcgctcaacgcgtgtggcccccaatcttgcatctactcgtctgcaggtaaatgcagcgccgtccgcttgcgatgaagtcaagtgttcgtcaaatcgctgacttttgtctagtttcgctgctattccgccgctgccgacgagcgggttgctaagttcaagggacagaaggacactgatgtatgttgggctattttgacacttctcttttcttttttcgctcttgaagctttgttccgaatatcggccatttctcaactggcgatgctatgaacgaatctgggaaacaatatcctattcttggattgctgctaacctgatattcgcttggttctagggaaaatacacggtcactttgatcgagggtgatggcattggacccgagatttcccagtctgtcaaggatatcttctccgccgcaaacgtaacgcttcctctcgtcgtcatctagctgcgatgctgttatactaagtcgcccacaggcccctatcaagtgggaatccgttgatgtcacccctattctcaaggatggaaagaccgccatccccgatgctgcgattgacagtgtccgcaagaactacgtcgcgctcaagggtccccttgccgtacgtaaagccacgtccgtcgcaaagcgcattgctaaatcacgtccagactcccgttggaaagggccacgtttccctgaaccttacccttcgtcgtaccttcaacctcttcgccaacctgcgtccttgccggtcggtcgctggttacaagaccccctacgacaatgtcgacaccgtcctgatccgtgagaacaccgagggtgaatactccggaattgagcacgtcgtcgttgacggcgttgtccagagcatcaagctcattactcgggaggcttccgagcgtgttcgttcgtcgctttccagtatgctcgctctatcaacaagaagaaggtccgtgtcgtgcacaaggcgaccatcatgaagatgtccgacggtcttttcctcaacactgcccgtgaagtcgctaaggacttccccgatgtcgagttcgatgcggagctgctggacaactcttgcctgaagatcacgactgaccctaccccctacaacgacaaggtcctcgtcatgcccaacctgtacggtgacattctttccgacatgtgcgccggtctgattggtggtcttggtctgaccccatccggtaacattggtgacgagtgctcgatcttcgaggctgtccacggttctgctcccgacattgctggcaagggtcttgccaaccccactgctctgctcctcagctccatcatgatgctgcagcacatgggtctcaacgagcacgctagccgcatccagaaggccatcttcgacactctcgctgagggcaaggtaagtatctcgacaacctataacttcgttgatacttttaactaacttctttgtagactctcactggtgaccttggtggtaaggccaagactcacgagtatgctgacgccatcatcaagcgcctgtaagggattcagtcaattccctgtactatatccctctcttgttcctttttagcctatgaatgaattagaccaaatgcagtgatctactatatatgtattgaaatgaatctatatttcagcttttattatctgcactactctcagtttccgtagcattgttcgtatactacatgcgattcctattctagcaggacacaacccaaccatgaaaacatatcattgaaacactaacaagtttaaacccactgcacccggacgcccgcgtcctcactggtatcgaacatttttacatcgaaaaagtatcagccgcaaaatcacttcaattctgtcgccgtcgaccccttcttgaggcgccgcctcctcttcgacgccctcgcctggatgtagttgttcgagcccgcgtgctccggccatttggcgagctgccagtatccccatctgcatcctcctcctcgctttcatcctttgcgtcgctggactcctcttcgctctcttcattctcttcctccgattccgcatcttcgtcttctatttcggagctttcctgccgggactcgaccttgacttggagacgcgatgaccgcgtgccccgtccagcgggacggccgcggccgggctttcttcctcgagtgggaactggtgatgagcgcggctctgatttgactagtagttagcttcatcagtatagcgatggagtggtaaccgcatttgggaacgaaccgtctgtgtcagctacggtgctacctctcctcgactctggatgaccactaggagcgggagacggcgatccttccattgctagccttctttcgaacatcaaatcgccgtattcatcctcgggaagttcgaatggacaatatacttccctcccgtcgacgtcatcggaaacgtccgttatgagagagtcttcctgttaacgggcaaaagttaaacggggcatactgcggcaaatagttcgcatccacataccctctcatcaagcgctggcagattgtataatgtccctaactttttccatattcccggtattcgcgtgtgttcggcatgcgaaggcgcatagccctggcttttcatgaattccgatatggcgaccattcgaaaatgcttgtgcatgcctagtaatcagctctatcagcgagctggtttgggaagttactagaaaagggactcaccaacaggtttccatttgaccactcctttgagcagcgcagtctcctgctcatcagtccatgggtccgtcactaagtcatagctcggggtacgttgagcaacggcctccgttgatatattggcaggggacaacgcattctctccatggttattgagcttgggcttctttcttgggggcattgcctatcaacaattgaagttctttcgcaaggacacaactgcttcgatgatcgagcgccgcaaatgaggagtatcgggtctgaccaaacgctagaccggatctggttagcgccgcgtgatttcgcgatccctacgcgctgttcaatatcgataagggaatcggacagttgcgacttcactgagatgttttgctttggctaaacatgggtcgctgcgatggattatcaagactatggcgcggacccgttctccagcgatgggctatggcgtatctccaagttcactctggattcactacaaccgctggagtctttaccctgggacgagaagctccctggtacgtgatacttcttggactgtcaagatttaactttcttactcctttacagacatctcggagggctttttcaagaccccattccatcttcttgagaaggaagacacggaattgcacaagttagacattttcggagccgacctcttcgaaccgagcgtgtttgcagagtcgacaacagatgcgtcaagtgaaggtcaacaggaaacaaacgctagagcacaagatattggtaacgagttcgataatatttggaagattgagactatcgactcgctgcaacataacaatgcacctagatcgtgggagagatatcatgaccgacagttcaaagagcctgcttcagcatacttcagtgagtctggagctacaggcttcgacgctgcaattgagctccacagcaagcctgaagacgccggttattcaaaacgtacagtgcgcaacgacgttttctttcagtcattatttcgggtcggtttagggtggagctccatgctctttcgcttcaacaagcaacgacagaagtttgaaaaggttgtcaaggatatccgcatatcgggcgtcagcactcttgcgcttagcggcataatagacgagatgctacaatgcggaaataacatgcagcgcgttcgcacattcatcgggagggtgccaactgctgcagcagagccatcggcactatcagcattttccactgctgcatcagtgattgtttacaccttggaaaagcaattgctccacagcttcaagcaaattagctcagtccttcagattagagctctgttccagcgatgtgctgagctgataggagttctagtgaacatgatggatgctgtggagacggccggctcagaagctcggataatctcctctgtgttcaagttggcagcacactatgcccaaatttatggacaaatggaaagtctttttcgcgagattgttttcaaggtcgcacagccgtggcttacttatgtggaaacttggatcggttttcgtccagagacgtcggcgtccattgaattattgaccaatggtaggagcttcgtttcccttgagaagagtgaaagcaatggcaagatttcgtctcaggaacggcacgagtacgcgtatcttccagagcagatgccgtccttcgttcctcccgatcaggcatacttgatatatgagagcggtcgcagcctccggctgctgaaacggtatcacccgcatcatcccctcgcaggtgaacaagtacgcatcgacagcccgaaacttgcttgtgctggcacctgggctgaattggaaagaatacaaatgaaggcccgtgactacgaagccagactccgagcggaagtcctcaagtacaatcggaatggaccttctgaacacgtaatgaacatagagaagcctaataccatcgagtccaaagagcttccggatgcttttagtctttttgacattaatgacgctcaacatatgact

SEQ ID NO: 1673 - DNA, 5155 bp, Emericella nidulans
cgttcatcggtcagtcgatcgcaacaagtcaaaagatcgtaaactcagtcctcggccacgcgctgaaaagtaatgtcggctcgttaaagagacaggagagtcattttgtcatatcttttcaatcatagatttcaaaatgccctactaagtgttagtcttggacattcacgtagagagtacatttatcccgaagtacacttacccagagcgaaatcttaggccgattgtcgtaatccattttgagcctctccctgatgggttcttcatatcccttgaacgatggcgcaatttcggaccttctcacggcacgaagtttgtcttcgtcgggaatcgtctcttcgtcttcatgaacctcaggagcagtgcgatccacgacctcgatctctccagcatcgatcgcatcaaaaaattcgtcttcatcgtcgttatcggattcggagtcataaaggctgctgatgtttgacaaggcagagttcttgcggtgtagctgtggttgtcgagatttctgttcctcgatatgtgaggcaacctcgacgatctgtggaggttgtggcgacaagtcttcttcgccgtcgagtcccgcttcgactgaagcagccttgaccgccgttcgacttatactgtttggtgtattctctagtgcttctttaagagctcgttttgtacgacgcctcttctcctccgactcgcccattttagactgcaactcttcatgctcttgagcgatgcgtgccatgctctcttcccacatcttgcgtaaatgtgcttcccgattcagtcgatattgccaatatgagtcgcggtcccgagaaatcttcagaagattctgcactagatctttaaggctgctcacagcttcctcgtatgcagttagcgcttgagcaacagcttggtccgaaagtgccgtggattggtctgtcttctgtaaagatgatgcaacactagcaagtatatcgagttgaagctttacagactgtgccgtgatattcatagcatctttgtcggttggtggtgtttcgcggctcgaagcataatcgccataatcatcatcgtccccctcgagatcaggagcggtggtaacatggctggcaaccctattaatgtcactctgggagggtccctgttctagagagccgtacattgagccgtcatcgtcagccggcacaccgtcgagagtggtgcgtgatgtgtaagtactcagtttcgtgttactggtactcgggacaccgagagataagggccctctagatctgaaactaggagattcggatgggttttcgcttggcctaccctcagcctggtcaagtttcgcctggcgaagtgcttccgcatgttttgtctggcgcttttcctcttccttggcctcatctttcgcatattgaatggcgttattaagcgtccagaaccagcgcttcgcctccacaacatgattcgctttaagatgatatttgactgatgatttgccgtatatctcaaaccgagttttgtcttgcgagtccatgttaagtcttgcgattttcatgttgatcgcaccacggcaagcggagccggtgtcatctatgctaattagtcttgagtcatgcaattgaaacgttgcttggagcagtgtccagtccaacagcgtaccttgatgtttataataactcaatacaccgtcctcgaggacaaaccaacgcagtttatagccactagtatagttcgtccatttcttcaggtagcctttcatctccctggagtctttgtccgcaaaggaggccttaccggttccaggtcgtccagacacgccttggccagaacttgtcccgagaatagccttttctgtataccccgctgtgctatgacggcagcaggggattcttgactatggctcgagtcctatcatccttcgtcacatcctgtggcagctttcccttcttgtcgcgacggaaagggtcagctccgtgcattaagaggatttgtataagtcttgtgtctttcttcctagcgccctcatggaggagggtgccgcctgagtggagggtagtggggtccgtgacaaggtctagagcattgacatccaggataccctcgacacggggttcctccaataacttctccagtttatcatattcgcctttggcgatcaacgactgaatctcttgcgtcttgctgtctatgaaaagcgatcgagcaagctgcagctgctggaaaatttcaggtgcacgcgaagcttccagcgccgtttgtccacggtaattgacgattgagtcattaatctcaggtcgattcagtagttcgcgaacaacaggcccacggccaagctgggcagcaaggtgaaggggtgtattgccctctcggtcgcgcgcattaatgtcaatatcgttgccagctgacaatacatactccaccacttgcggttccgcgcattggaccgctagatggaggatcgttgtccccgacaggccgtttacaccatccggatccctgctctctttaatagctttagagatagcggtcgtatcaccgctgcgcagtatctcaaaaagtcgaaacgtcctgacagactggttgagagtcacatccaccggggtcagggagggaagcttttcgatgacgtcgccttcacgacctagagcagcagggtctgatgatgaatctgcagacatggcgggcgggcttgtctcttggcgcgatcttcgtaagctggggctgcggtgtgtcgagatggcggagacggacgggctgctattgttgttcactttcactggagacgacggggcagagtcgggagagccgttctcacgactgccgacctcttcgtgactgtcctttgacttgtcacgatgcaaaatcgccaatgccaaagcactcttggagcgtttgtgcctaaagatgcaggcggggttagcaatgtcgtcactcgttccccctttatcctgtcgacggatgatagccgtggtgttctaaccacggtttggttcaaacgacctcggatatgggtagtctgatccagacaagaattattcaatgtcttgtcaatctcattgctacttcgcgcatcgatggatctcgagtcgctcaccctagcccgggtaaccaaaaagccatattggtacttacccttcaaccttctcggacatcacgaggtaccataggtgagcataacctcggtaggatgaaacacgaagatggccctggtggatatgtgatatcttctaataactttgaatgactagtccgtccacaagaagatggttgaggattaagaaacgaacgtgtaaaatagtgtcgatcttccctaacgcctgtggcgccttggcggcttcgagttgagccttccatatcctacgttcattgatcacctgatagcgaagcagaattaagcagcaggagcttggtttcgttggaataaggcttacaagagctatttgtgtctatgccggagtaccgcttagttttattaccatcatcacaagtatacgatgctctaaactccagtatatgtggacaggacaacgcacgcgaaatttatgtataatacaacggccagagtcctgtgaagtaactcccccccaagaataaataatgatctattgaactcccgccaccaaaacaataacgcttccaagctgtctctttaaatcctccttatcgacatcatgggtatcctcgacctcgccccacatatccgtttgccatctgacttcgaggctggaagcctcggccgcctcctcgattccaaatctcttccggcttagctgttgcagctggcaaaagttctcactccattccgttaccagtctaacggcaaccaggagacttttagatgcaagaatacccctttcaaggcctgcaaggtcataggcctccagcccttcaacccactgtctgatgatgtcttttgtcgcctgggactgggatgcccggaagatactgttcccatccagaaccggcactatgtcgatgcctggccataccttggtgcttaaaaaggcaatgacatcctttgcaaccctcatctgagcttcccggagcgtttcctgttgttgtgtttcctcgtccttgacagcgtcatcttgctcaggtacccagcaaagtaatgtatccgtctcaagataacgcatcgcagtctttactatttgagttcgtataactctctccacaccagcaccagcaccagcaccagcagcatcctcctgcgcaatatccgcggcacgtgcagtgagagaggtcaggggaatcgtgtgattcttcaaggcttgctgcgctgcattcatgacgtcccattctaacgcaatggcttgcgcaaggtgttgctttgtagacggtattgacaggacactttttgagggagtccgaaccggccgtttgtcaagtagaacctggtaatcgcctcctgcacaactgtcagttgcgataatcttatttgcaaagaaaaaaaaatcaccatctttttgctttacatcaacatccttccagaaccgcttcttcaacactgtaggtctcttgcgtggtcggtgttgtggctcgctttctgtattcgattgctgcgtagtacacttttcgaatctgggggacggtgaaggcgctttggggggaggtccatgagcagtgaccggatgcgcaatggctgcatttagagtcgaagattgaaaagcgcgtaggctagcgaagttgtattgcacagcggtcgaaagttgctgcgcccgaccggcagaggttcgaaaaattgttgccagcattttaaccattcctgggagaggcacaatcacagctgattgtgaaatacggctagtataaatggcgcgactaggtaatgtcagttgttacctggctgttgatttcaatctaattatcggatagctgggccgaagcactcgccacaaacgccacaaccagtccaacactttcaatagttcatgtccgcgaagtactgagattggcattacaacgcccatgcaggtagctatgcggacgatatgaaaagcagttaataagtccacaattaaaaaaattcaaaggtttcgctcgctttatggaaagtgagtatactaaagctgttgagccaggtcaccgcctgcaatgtctttatgatcaccatcctcgtggtggcaaggaactgtgttttcgaaaatttgtgaagatgtaaggttatcagagctaatctatcatgcaa

SEQ ID NO: 1674 - DNA, 2005 bp, Emericella nidulans
gaaggggggaagaggtatgaggaggagggagaagaggaaggggtatgaggaagtgggagagaagggggtagtgtagaaaaggaagttgatggtgggaaagtgggaatgggataatagcgagaggagaggaataataataggggggaggaaggcggagaaagtggagtagagagaaaggttagataagagaggaaactgtagcaaggcgaaatgagtagattttggcaaagagaggtagagagtagggtcccgcagactcggcatttatggaatataagtggaggggggagaggttatgtacgaaggaggtccaggaggtccttctaaataaccaatcgtggggggaaaagaggttatagcatctggtggcgagtgggtcatctagagagccggctcggctgcacggggaggatcctagggaagttttgcttgtgtggataaggggctgaatacattgtggtggggggaaagttggtgaggatgaggagtcagtgggcaggcaagaagaagggctaagagggatgcaagagcgggaaagagggagggtggcgcgccagctcatcagtccaatgtcgtggaggtcagagtcttcataagatgtccctgagcatgtgcgaaatgagagaacagaaaggaagcaaagggttttagggatgaaggggcatccgaggactatgtatatgattaagagataaaggagtaatggtggataatacaggactctgtgtgaatttcactgggcgtcatcaataccccaatatgcagcctagaattcacagtgtctatgaatttctccatcaagaatgttgtaagaacatagtagatatgaattatatcaatggaaaatatgtacaatgaagtagatgactgaacacgctccaacacctgggcatattttgagaaaaacgctgcactcaaagcacaagcttcttttcgaaaaaagcaataacagttgaatcgcaaaaaaagcaagatgtataggctgtgattcgaaagaatctcccttctatccatgaccgtgcaggaatccatcgtaatagatagaatacaatcccaccaactaaacaattatcccgcagatccagaggcaaagtcttttctctccatttgccgacatggtaattttcgtagatcatcgtcatcatgagacatagaacgaacctgtcgttgcgcgggagcctgtccagcgtgccgaaagtctatttgttgtgttgttgcgtttatgcggcgatggtcactgtctcggtggcctggcggacagcatcgacggcggggcggcgaacgataccaccggtaacagggagctgagagctgatgccagaaaggaaggtatcaacctcgcgagcgcactggcgaccttcgttgataccccaaacgatgagggactgtccgcggcggcaatcaccagcagcgtagacaccgggaacgttggtgccatagtgaccagggggggtcttgacattcttacgggcatctcgctcgatttcttctccaagaaggcggtcttcagggccgaggaaacccatggagagaagcacaaggtcggcagggaagaactgctcgctaccctcaacggtcttcatgtcccatccaccagtggcgctcttagtccattcaacacggacagtgttaatgcccttcacgcggccgttaccgtcgtcgacaaactccttagacatgatgcagtactcacgggggtccttgcccatgtgggtcttgacctcggagtgaccataatcgacacggtaaatacggggccactgaggccaggggttgtcacgagcacgctcaggaggaggctgaggcaacagttcgaagttgacaacagacttggcgccatggcggacagaggtgccaatgcagtcgttgccggtatcaccgcctccgatgacgacgacgtgcttgtccttggcggagatgtaagcgccatccgccaattcagagtcgaggagagatttggtgttcttgtgcaagaactgcatggcgaaatgaataccctcgagct

SEQ ID NO: 1675 - DNA, 2156 bp, Emericella nidulans
tatcggccaccagtttcagtaataacatggtcccgaccgatcttcacgacccgatccttggtcaaacacatctgtggcgaatgaagcgaagagaggtaggtagcggtgttgactcgtcgcttacagcccggctcgtagttgggctttagagtttcacgatactctggcggagatctttttcgatataggcgtacgtggcgtcccgaatcttctgacgcatcctgctaccgttcgcattcatgcgaaaggaaaagaacacgctctcaagctcccatgcgagaagaagccggtagatgcgtgctgcaaatggcacgtgtttcatcagcattttgaaggcttctgagtacttcgggtttccctactcgaagatttagcgcaagaacaccgagacagcgacagtaatcctaccctttttgtccaccaatgggcacttcgaacaaactgggtgacacttccttttgggccaacttccttcactaactcgggcacaaactgagtggcagatgctccgttgcctaggacgacgatgtgcttcccagaggcttttaatgtgtcatcccaacgtgcgctgtggaaggtcttgccctcgaaagtgtcagagccctcgatattagggacgaagggacgatccagcgtgccaactgcgctgactaccactggagcttcccttttgtatatctctccgctgctggtgtcttggaaagtgcacacccacagtgaacgggcggtatcccacaccaaaccgagacacatggcattgaaccggcagtgcgggataatatcgtatttttcagccacagatacgaaatctgcaagctcctagtcagccgcatatatattggaagactttgggaccaatttgtggcaacttacaagcatgcagctcatcacggccggggtacattgtagtccagtcaggcttcagcgcaaaactgaaagagtagaagtggctcgggatatcacaagcacagccgggatacctattatgccaccaggtccctcctatattatcggatttttcgtagatagtaaagttgtcatggcctaacaggcgtttcaactgcaccgccatgccgaggccagatacgcccccgccaatgatgataacttccttggacgagcccattttgcaggaatggctttgttgcaatgggtgctatggtattctctccaatctcatgcgaactttgaccgcgactgtgacgtttatgactccaggagtacgctccagacaagaaagtgctgatacaggacaatatatatagtttctaccggacgtggtctttctcgttcatctttcgccaactcccgggctattgttttccgctgtcgttctctactgccgctagaagcatccaattcttttcttggtcaagtctgtaaaatgcaatccgtgcctgcgcttgcaccttccaagggccctcagctgtccaaaaaagcaaagctgaaactacgcatcgttctggctcctgtaccaactgagttaggcaatggaagatcggtcgtcggcagggagggagccgcctggggccccaggatcgattatgtcatgccgggttcaagatggcaactccagccgctcaccccacggccgttgctttcctgcatcattgttatcttttttttttgtctctccaaccctactgttccctgtatgtcaattgagtatcggcaaatgcactcgacgagaactaggacgcggtctggatggtaccatgcctctcaaattcaagtcggtcatgataagctgactccatccacagtctgccatgtcgcagccgtcgcaggaaatgtgtgatgacgcctttgggttcccagcagctacaaaagagcagtgctttgactaatgtagttcatttaggtgatgaaagacggccacagtgtcaacgctgtgaagcacgtggatacatctgtcagtggggcctgaaggcctcttttcatccctcccgtagcctccggttatcaactcccgagagggcagccctcctagcaatcgagaagggacggcaagatcccgcgactgatatacagaatgatgatccgaggtcgtcgctggagccttccgcgcccattgtaagtcggccctcactctttcgacgcctttgtgtaaagagacagaatgcctatcatccatccttctgatgtaccgcgcatta

SEQ ID NO: 1676 - DNA, 2490 bp, Emericella nidulans
gtaggtaaagtgaagaagtgaaagtagtaagtaaatgtgtgaataaaaaagtgaggggaagagtaatataatgaatagggtgtgaaagaaagaaaggagagataaagtgcgcacgatttgtttaaaaaaaacaatcgcttaaatagataaaggaagttaaaatacggggagaatagaacagaattaattagctcatatcaagttaagggtttttccttttaccgcccaaatattttcaatacaatcagggcagagggtgataattagtggtccaacttaacattcgagcccattccgtatgtggtgaccgaggtaccgctagtttgacctcatacgatcttacatagtgggcgggcctcgcggattccatttaacctctcccccctaccgtttcgtcggcccattctaataacgagtcgcccggcaaactggctttgtttccggggtcggctcgtcggacggaaggctccttaatatcttgcatctcttgatttcgcgccttgacgtctctacgaacgagtcttaaaccaggatggctccagatagcctccacccgaataggcttgagcctccgccacctccaatccaacagacggacagcaacatctcaacgccgaccaaccgccaacgatgggcgactcatcgagcctccactgccggaggtatgcggaaacgcgtttctatcatggatcgcttccacaagcgcatggagaacaaagatgagaagcgaaagtctactctggccaattcggcggcggggccatcatcaccagtaagcccaagtgaaggaaacagaaaggtctatgtcaatatcccgctccctgagtccgaaagggacgaggatggccatcctctggcgaattatccccgaaataaagtccgcactgcaaagtatacgcctatcaccttcgtgcccaagaacttgtggttccagtttcaaaacatcgccaacgtttatttccttttcatcattatcttgggtgtaagcctccccgctctctcctcttaatagctttaattgcgagcgaagccaatactgatgagccgctagttcttctctatattcggtgtcgacaatcctgccctcaacacggtgcctcttatagtcatcattgtcgttacagccataaaagatgcaattgaagactggcgtcgaacggtgctcgacacggaactgaacaactcacctgtatatcgtttagtcgattggcacaacgtgaactccaccgaagacagcgtttctttgtggcgacgcttcaagaaagcttgcactcgaggaaccatttggacataccggaagctcagggtctggttctcgaagaacaagaatcacaacgaatccgcatttgcggaacggcgtgcttcattcttaaccaccgtctctcccagagcatctatggactcggaacatggcgatcgcggagaggaggaagctatacaaatgactcctgtttcttcaccgatgcctgatgctcgttcagattggccactatcaagctcagaaacagaccagcatttacaccctgataaagcggctcgtcgcgctagcatggccccctcagatatctcggtaggggctccgaggaaagctggcagcgtggttgatatgtccaagcaaatagttgggaatgcgcgattcaaacgtgactactggaaaagccttcaggtcggtgactttgtccgattgtacaatggcgaccccattcctgcggacattgtggtgctgtcaacgtccgacccggatggtgcgtgctacgtggaaaccaagagtcttgatggcgaaacgaatctcaaagtccgacaagcactccattgcggtcgaaaagtccgccatgcgcgcgactgcgagcggtcagagttcatcattgagagcgaagctcctcatcccaatttgtacgcatacaacggtgccgtgcgctgggatcaacgggaccctgattatcccgatgcgcctcgaaaggagatggtggagccgatcacaatcaacaatctgctcctacgtggctgctctctccgtaatactgagtggattttgggtgttgttatctttaccggcgttgagacaaagatcatgctcaactctggtgaaacgcctagcaaacgttctcagctcgccaaggatctcaactggaacgttatttacaacttcattctcttattcttcatgtgccttatttccggtatcgtcaatggtgtggcatgggcttcggatgaagggtctcttaactattttgaaaccccctatggcagcacccctgcagtgaccggtattattactttctgggtcgctctgatcttgttccaaaacttggtaccaatctcgcttaacatctcgctagaaatcgttagctcagcccaggccattttcatccacagtgatgtttttatgtactaacccaagcttggtatcaaatccaccacgaagtcttggttcatatccgatggagtaaagcagatatagtcaatattttcaggcaagactggtcattt

SEQ ID NO: 1677 - DNA, 1835 bp, Emericella nidulans
ggccaggaaaacttcgaccggaagctctgaccccgttcgcctgagcatccggagtgaaatgactagtaccggaaggtaggaccctcccgccgtagagataatccctctcgtgttggggacgtagtgtaagcgaaccacattcatatttacggcatcaagaaatttcatgtgcgcgttcttcatctcatcgacctcttccggtagcatgtccagcatctccggtcggttgtctggatcagactcttcaaccctgattgatggagcagtccctaatctaacgggtgaatcgcattttggcattgatgtaagtaagaccggctggagttggctccaagcttgaatatggcctgttaatacttgcttttgtgtgtggccattggtgtttgcaaaaggggccttcggcaggctggacgaggagcttggatagcgcgagtacgaccatatggagaagaaggtgagcgctactgctaacaagactatgcggaccctcgtcagggggcgtggcagagccattatccttcttcaagtatgtcctccaggccgagctcacttgcggtctgggacgtgttcaacacgcaagctgcaattgatcagcgttatatgtgacacaggcgcgcatatataagtacttgacaattggccttgaattcttaatggcagacatcggccacaggcaaggactatcaggccgtagaaagtgatgatgctgtgacaatcgtgatgatataggcgacttcaagaagcagtcgcaagcttgcacctacactccgcgaggaagacgacttcgagcacaatatatcatgccaagtaagccgaatgcgaagtcctgatacagagatgttttcaatgataacgacgtcgagataaaatttgaaactgtgttaagaggctattgtcgatcctgatcttacgtcatcgctggcccagaagtatacttcatctacgactcaaagtcactatacagaaaaattgatgcttgtaattaacatatatgggcaatatatagtccaattcctggtcgccaagagcattcaagaactgagctgagttacaagtctataattcagagtcttggctttcttcctccaatatcgtttcagacaccagaccacgcttcttcagatggccagagcctaggccccagctcgagctcgtccacaattcattgcttgtgctagattcactcgattcttccgaaagtgtatacttggcccgcttgatcgcccggccatctagtttcggcctaaggcggacaggggtcgagagatttgagaatagattcaacagtgagtcaatggccagagttgtaatgaagtataaagccaaggccacaccagctcctgccagggaagccactccgagatagatcagtaaggcctggcatggttagactcgaggttccttcatctgatatggaatggactgcaataccttgaggcttatcagaatctttatcgggaggaggaccagccacagaattgcgaagcctaggtatatgaaaggggatgcgagtaggctaagaaggaagtatgcgctgaacgctacatagtagacgggatatacaaggaaaacagagaaagggacagtcactatggagaataagcccattggatgataaggcttagctcatgtagcatcagagacgatgagatgggagtctctagactctactctggagtgatgatgtagtcaatcgtcaataggcctgcggacgcctgcgtacgattggcggtacgacccggcagaatctgccccaacagcatgactacccagctcagttcatcaattcgccgccatatcttgcatgccgtcattgaatcaacgttaatattggc

SEQ ID NO: 1678 - DNA, 3997 bp, Emericella nidulans
cggactgtttcacttttcattctctcgtcgtctttgctcatatttgctcattctccttctcgagctggaatggctcaggcaccatgtaagagcacgcgctgcttttttcaggtctctccatttgcccactcggtcggcgtcaagtatagccaattcatggacaatacttgatgaatatgcctgatggaaagaaagtgtgtgcaacgtgacgtcctagaagctaggatggttagagagcttccaatgatcctatcactttttacttcttatcatcagtgtccaagaaaatgctcatccaacatttcttaccaatgtctctagttctaccattagtgcattctcagcccccgattgcctttgcccaggatgtgccacaaacgcctatcgcttcctcagagccgctgagtgtcttcgcccattttctggtaagtgaaccccggagacgaaacttcaagccgtgttgacggtccaggttggagttgcagggtccatgtcaccggccgagtgggagcacaatatcatcgcagcccaggaagctcacatagacggattcgccctaaacatcgctccgcaagacgattacaccgaccaggtcctgcagacagcttatgaagctgcggagagaataggcgacttctcacttttcatctcattcgactatgaatccgggggcgcatggcccgtagatcgggtcatcagcacaatcaacaggtacaagggcaggccagcccagtatctttacaagggaaaaccattggtatccacctttgagggctcgaagagctcagatgactggccagccataaaacaagctacgggctgcgtgtttgttccgtcgtggacgagtctctccccttcgcgactttacactgttcacggtacaattgacggtgccttcagctgggacgcttggccggttggagcacaagagaaggatacgtcaagcgacaaggcatggatgaatgcgctttctggcaagccgtacatgatggctgtttctccgtggttctacacgaaccttccccagtggaataagaactggctgtggcgtggcgatgatttgtggcactaccgctggcaacaagtaattgacttgcagccggcaatggttcaggtaagtaaagaatcttctggacgcgaaagtgctgacaaggctgctctatgcagattcttagctggaacgactacggagaagcgcattacatcggacccatctacgagccaggaattccagaaggtgcatcatggttcgtgaaaggatgtccccacgacgcttggcgggaatttctacctcattatatcgacgcctatcgtcgacggagtgcaatgttccgcgaacgcgcgtcgaatcccgccacggtaacctcgttcgctcctagacgtcctctctcatatacggacaagatcgtgtattggtatcgacttaacccgagtcactccggaagcgctgatggcacgacggggaataacccgaatatgggccagcctggattggatccgggagaagtgtcgcaggatcgagtgtttgtcagtgtgctggtcacggagccgagccaggtgcatattcagattgggcctgcagcatctagagtcttgattgcaaaggagtccggagtaaatcactattccgtgcctttcgacggacattcagggccggtgaggattgcgattgtccgacatggtagagaagttaagaccgcaacagggcctgctataacggaagagtgcacggacggtaaagtaaattggaatgcatttgtaggatcaagttaatcgatataaaattgtactagacactaaaagcgttgggataaatggtatctagataacttgtatgatgtttgcaatatcggggcctgttatcgccaggcccggcctcccagccactgataagcgtcactcctcagttctccgcatgaccgcatcttccttcgctcttctccaactctcctctctgtcgatgtcctcttcaccatctctctttgttccatatccttagcctttctattgcatttttatttatcttttgaatatgggcaagaaaattctgtctgacatccaccaccatgagtctaacttggcttaccgccagtatgcccagctgcctgaaaccctccacctcaactaccagcctcctactgctactgcaacccccgccgcacacaccagcccgatcccagaggcaatcaaccccgacgattactcgcaggcttactgcgattgtatgactgagcatcccaccatttttcacgcagtcgatggcttctctaagcaactcgaaagcaagggatacaagtacctatccgagcgggaattatggacgccgcagctcaaacgcggaggaaagtactatacgactcgcaatggaagctcgttgattgcgttctctgtcggccccgagtataagagtgggaatggcctcgctatcatcgccggccacattgatgccctcacggcgaagctcaagcccgtctcaaaacttcccaataaagctggatacattcagatgggagttgctccttatgccggcggtctgggcaagacatggtgggaccgtgatttgtctatcggcgggaaggttctcgttcgtaacgctagcaccggcaaggttgaatccaagctagtcaagttgaactggccgattgctcgcatcccaacgctagccgaacactttggcgctccttcgcaggggccattcaacaaggaaacacagatggtacctatcattggagtcgacaactctgatcttttccagtctaccactccagcggcagacgagggcatcgaacccggcacctttgcctctacgcagcccccaaaactcatcaaagtgatctccaaggaacttggaatcacaaactacagcagcattctcagctgggagctagaactttatgacagccagcctgcacgtatcggcggtattgacaaggattttatcttcgccggccgcatcgatgacaagctctgctgctacgccgcacaggaagccctcatggctacctccgaccacacctctccctcttccatcaagatggtcggttactttgatgatgaggaaattggtagcttgctccgtcagggtgcccgctccaacttcatgtctagcgtcatcgaacgcattgcacaatcctttgcaacatcatatggacccgatctccttgcccaaaccgttgcaaagagcttccttatctcttctgatgtcatccacgctgtcaatcccaacttcttgaatgtctatctcgagaaccacgcgcctcgtctcaatgtcggcgtctccgtctccgcagactcaaacggccacatgactaccgacagtgtcagctacggcttcatcaagcgcgttgctgaaaagtgcggctctcagctgcaggtctttcaaatccgaaatgactcccgaagcggcggaaccattgggcccatgaccagctcgcggattggaatgagggccattgatgtcggtatcccacagttgagcatgcatagcattcgcgccaccacagggagtcgcgatcctgggctgggtgtcaagctgtttaaggggttctttgattactttgaagaggtggatcgtgagttttctgatttttaggttgtgactcttgttttctgtcgaggggtgctgtcgcgctgcttggccgtgtctagtttggtttgcatgattttggtgctagggttgaagtgcttgggcattaagaacctcatttagaatggtgacttctttgtatacggggttcggagtccgtctatagaggcatgtgtaaggataaaaatcgaatcctacataattccaggctatgcacttgaacagacaacatctagattctaggcacgtcaaaccatacaatatattaagaggcttccgtctatttgatgctccacccggcacgaatctcaacagtaagccccgtagtctactccgtacttcttgcctgccgaaggagaggatggagatgagggtgacgaatgcgttgttttcaccagtgccccaatgaca

SEQ ID NO: 1679 - DNA, 3612 bp, Emericella nidulans
agatgagaataaagtgatattataaaattaagaatagagaaagaatagaagtagaagaataattaatgagagaagagaaaatagagatagtgaaaagatagatgagaagaaggagatatagataaagatagtaatggtaagtagaatgaacgaattagatatagagatgatgatagaaaaagtaaaaaaagaggagattataatgattaaaaaaggtggaaaaaataagatatatatataaaaagagaagtaaaaaaagaatgtagaataaaaaaaagaggagaagaaaataataagaaaaaaaatataagagagatagaagaatgaagaataaaaaaaaaaaattaggaagaaaaatagtagaaataaaaaaaataaaaaaaaagttgataaaaagaaaataatatataaaattagaatgagtagtagaagaaaggataaattaagaatgaaaaagaaaaaaaacataaacaagagataagaataataaaaaaatacagcccatatttctactcatagttttcatgtaatgttaaatctgttatccaatcccgttgaccggctgactagcttttctgtggtggtagcttcacatattatcgggctctgagttgcctcgctatacccaccgcaattcattatcgaaatcgcaatcgcaaaccgttttcaaacaagattgtggaaaccaatcgtgagagaatatggccattctggacaaggaccgcccccgcggcttgcgagtgccgtcgctttcctcgttcagatccaaacacaagtcgcctgaatcaacacctactatccacctgccttcaccttcgcaaatgacccttcaaaacgagtcaatcccggtgtcttctttcaaaccagccgaaaaggcattgccccctcaaccgctgccgtccgcgccacagccctcatccgcggcgggatacccatacccatacccgccgcaaacatacaacaatccaccaactccggtatctgtccagaattcgaccccaactcgacctttcggccatgatggtcctgcgcagctcctctacctgcgctccccgccgacagacctatgccccggccaatccctcagtctactaccccaccagcccggcgcccgattcccaggtccacggcggcttcaacaactgcgccaggccagcgccagcatccagaaccagcaccagaaccagcaccagaaccagtaccagcacaaacatcaacaccggtatatgcacctgcgcctattcctgcgccttcatctgtaccaccagtgaacaatctcattgcgcaacagagaaccccgccactgagcgagggggggccggagcagaggaaatccaacggcaccagcgactctttggaagacctcatcccgtcgcccgaaccagagcctgagctagacggtgcgagcagcacacccaatgaaaccgggtccagcgaagaggacaacagacccttcacaccaccggaggttgaacccgttgctgtcccgctgaccaaactgcattacgcctgctaccaggatcatcgcgcaatgccggccaccgggaacgtgtggtacgcacttccctgtatgacatgtcagaaattcgatcgtgagatccgtcaccgatgcgttttttgctgcctgcgtgtttgcgccgattgttatcaagcgctgcaaaaatgccctcgccgttcgctggcacagctgatggagaccatctcacctcaaaatggtgcaacaaaccaaccgtctgtaccggatatttaatgtttttaccgtcgtcatatgccctatgtgtttacatcttgttgcctttgattcaatattctcccagtcacggcttctatttgtgatgtttattgattgtaccgagtcaatgatcataataccctcgtagattgctgatttttcaaagaagataattgatttattaatgttaatgtcagactcaatgttctataaccatggcctatatcgtgaactccggtccgggtcccaatgcaagataagcagaaaatgagtatatgcacactgaagaaagcagaaatatcacatagcacataagaagtccgtcatcaatcatggtcttcctccgtcacaccgggacatccctccatctcggcagtatcgtagcgatatttgcaccagaagcaatagttgtgcttttcgcggagatactcaaccaaccgccgtaagcgctcagccggctcaagggtattgaattcgtccagctccgggtcttcttcctctacttcttgctcgaggacggtagagagatcacgtccgccgccaagggcttcgtggtcgtcccgatccaacgtcgcgtcttcataacccggtaaccgcgggttcgggaaaaacgatgtcggcaaggatgtctgcagcatatgccgggtctgaatggcgcgctccttttcttcacgctcgcgcacaagtccgcggtataggatgttgatttgagacgttggctttaccttggcctttgctttgggcttagttgcgggagcttcttcatcactgccctcttgctccttctcgtccttttcctcattcttatccttatcttcgacgttactggcagaaaagagatccgcttccccgttttcatccgcatctaatcgctctgcgaccttctgcgctgcatgaatctgggcttcgatgcgcttcgtttcgcgctcgagtcgtacacgatctcgatagtcgccctcttcggctttgatctttttcgcggcctcctcggcctcctcccgaatcttgcgcttccgctcactatccagcccgatcccaccacggtcttccttaaatataagattcaaaggttccgtgcgcgactgtgcattaggaccgctaccctctttctctctatcctctccggcaggctttcccagcgtctggcctggtttaaatcccagctttgccatcatctgaaaccccttgttagaggggttaagtgtactagttgccaaggctgcatcgcgtttggcagcttcctgggcggcacgttcggctttcgacggaactctagcgcgggcttcggcctggaagagacgagcgggttagcaaccgtaacagcaggacactagagtaggcccgtctagtaccacgcacctctcgttggagccggcgcttcttttgcgtgaaagtctccttctgctgtggttcctctatgaccatggacatgtagtcaacctcgtcctcctccgcagccatcttcgtgcggggttgcggtgcgctattccaaatgtcgatatcaggcgtacagcggatgcttaggacgaaaatgtccggcagtagcggagaaaacaacgttctatgagatcgctggcgattttttccgatttgtttgttgggacggactggggtagtgtccagtgacgttgtggtgagtgacaacaaaaagactgacttcaagatttgcggggaaaatgggccccagagtcgatgaggagaaatgggtttttccccctccggttaggcgcctgctcactcgatccaatctcgactctctccaggccaactcttccagctatgaagttatactttcaatgtttattcgtcgtgtgattgatttgctggctgacctgcagtcaaccgtccaaatgaggggacatcttccccaccgagtccac

SEQ ID NO: 1680 - DNA, 6222 bp, Emericella nidulans
cagcatcgccgctatttcgcccgtggtctgtgggctcagcgagcttgacccgttttctgactttgtggatgagccgtccgaagtccgtgtaggggccgaactactgccaccgccccaactgtacccgccttgagatggtgaatcggtgtttgaagcagaagtctccgaggctgtcgtacttgtggatgaatcagaatcagaggtgatcgaggtggttgttgaatcggtgttaatttcggagctagaggttgagccgtcatctgaccctactcccataatactttcggtgctggtgccagacggagtctgggtagatatcacagcagtgggaatatcggggctcgacccactgaacataggggtatcacttgagccggacggctggctgattataggaaccgacgtagaaacagtaacagacgtagccggagatgcggcagaagtgggaaccggtagtatttgttgtgtggatgcggatagactctcaatatctgaagtaagggaagcaataatgccagaaacctcggtcacggcctcggacagcgcggctgacatcgacgccacagcagtcacggactctgtgggatcggttagcggcacagtggaggtgtcaatggtgtccagctctgatgatggactggtggcaggctcttccgaatctgagaacggcacagtggaggtatctgcggaagccaactctgtggaaggtccagttgcggactctgagggctccgttgccattgtcgatgtctctgaaggagccgactctgtcgtcgatcgttcatctgatacgtcttcagcagtggctgccaccgcggtgtgatctgatattgaagttgtcaggtcgacccccgatcccgtggtgggatctgaaggatatgcgactgtcgttgttatcgtcgttacggctgtcaccgtagtcgatgcatcatcggacatagtagtggtatgtagctcagtcgtttgttgatccgaattactggataaaatattggactcagaggcagatgcggtctcctgaggaacttgtgttgtagttacgatcgactctgcacccgcggtgacactagtctgcgtatctggctggtcttctgtcgtggacggattgggctggtattgtcgtttctggtgcaattccacccctcggtcttgcaaatccccagctcggccgacatccaatattgactcctgtctatcttcccgggtttctagccggtgcttccgtaataatcgttcgtaccgactatgtctggaggtaccatggctggtcatggtggcgagaaatgagacaccgctgggcagagggaataaacgtagtagaatagaacgaagtgtctgcctgcaagacactcgaacaggcttttgtgagttcgataaacgcgatactccgatgcgacgtgaaaagagagcgggttaaaagagcgaatccggcgtcgtcagatgggagcgatgagcgatgataatgactgggggtatcgaggaagatggaatcgaattgaacagagatgtcaaggagcgatgcgaacaatgtctctagagtcgcagctgtagaggtaggtcaaggagtggacatcgatcagcgaacagtagtggctgccgacaaagaactaggtaggcttgggagagcaaatcaacatgcgatctaacccgaaacagtcccagtgtcagttcccaagtcccggtacacagaaactatgagtttgggcataggtgaaacatacaaggaaccgaatgatattggtcagggtgtcaagagtcgtcaagactaggccatcatggagaattgctcttcagatggcaacgggcggtaattcattccgttccgaaagtgttccaagtccaagggtggagtgggcgaggatccacgttggctttcgagacccaaggttctagttctggcccaagagtggccactcgcttcttgtctctggtggcggattccgtcaacagaagatatgcctttaagatgacaatagcagagccaaacaagagaaagacgggcggaaaaccttgaagagaagaggaaagaggacgaagaaaggacgggaaaagaggagaagaggaagacgggttcaggaacaggaaacggaggctaagaataacaacggcgaacgctcagactggctccgtaattaaatgagacgacggtcttagacttgcagacttaagacaccctaaccactttagcccgcccagcgggtcacagaacagtttcacgccctcagttctcttcaacgggcgctgcagaatcgaaccatgctgtctacgcacgatgaactggagaactgacccggtgccgggtcgaaacgcgcgagttgtcccatggatatgtcgcactcgaatgttctaggcgaccactaactgtgtgatccccaccgccgtcagacagttcggtgagacctttctagcaccgtgtgactgcaaggggccaagtaaacaaacatgcaaggtacgacgttaacctgcttactgtcatgtggacagacgatatatgaactccctagtgcctatggtactacgaatactacgcttcttccgaagctgacgtcagcatgtgtacctggagtacagtagcctggaatagtataagttgagggtagatccgcgcgaggaatgcggcataggaatgcttcagttcagccttatccgagatgatatctgatgggcgaggagagcctcagtcatccaattatacacgccatcaatatggcgaatactaaacgtgcacctctagaccataccccgtggcccatgaccaaaaataaacagactaaaaaaaaaactcgccaggaatgtgtagaggaattgtttcaacgctgttatgatgaagggtattaataggccgggtgccttaaaacgtctccagctcatcacctgcgacttcaccctcggcagggatctcaaatccttcctgtatgctggtcagtccgtgaactcagagtctggcttggctgtcgtacctctgtagagtaaagaatgccctgaatgtgcttcaccagtgaatcgtcatccttctccagctccgggtccgcctcgatcgcattctggagcagcaactcgatgtcccgaagcttggcaaagtaaaagtcgcgctccttctccaatccactgatcgcctccttggttgagttgagttccgcctgcagtgcagcgacagtggcagagctggctcctccggcagcagggcgcgcgcgtccaacggtgggagtggttccacgccgggcgctgctagcggaggttgcgcctgcacgcgaagtgcccgcagagccgggaggggccccggagccttccggcgggcgagcgcatcatagtctcctcccggataatgttggtcccagtacttcttcgtccactggaggaactccaggttatcctgcatccggcatttggagagagactcgacggggattggcttgtcgatctggtgacgtgcgaaaacatctattaaagaagagcgggttaacggcggaaatgcgttatcgaagattgtgtaacatactctgcaggatcttgaaattttgaaggtaggcgtattccgtgttaacattgaattttactcgagacatgggcacgtccactgtgtgagcaatgtgtcagtttccgcacaatgctgttcgctgcgctgaaaggggcactcactgaaaatagagtcgaaaatctgacatagcgcagctctgcaggtttgacggtcagtaagttgtcgacccaaaggatctccatatacactaagacggccagggttttcgagaaggatggtttaaaaggctaggggctcgctcatacccggttccgcactgctcaatcttggtcatattcaactgcagcaggttgttgagccatgctaacagttcctgtctataagccgcatagcatgaatcatcagcgttcagttcaaaactccttgtaaatcggaaggtcctgatgcctgacgaacctcgattcacccatggtggggtaggttttggaggagtcaagtctggcaagaggaggagatataaggatggataaaaaaaaagattggcagaagatagaagtctgtgtgtataagcaggattaactgtctcgtgtggttatatcgtctaagacgagtagataggagatagaagatgagattgttgttgttgttcgtttctgtcgccaaaaaccgtctttgttgacgctaagtcccctggccaatcattgctatttccgcccagcgatggacacctcaggcagcgtgaccagggacgtttacaattaaacttttcggcaattaagcatatatatctaactccgtacaaacatcgatttatgaagacgtgaaatgcagaagatggcagcatatatttccagcgccatgagtatatctatcgctagccaaaaagaaccaaaaaaaaataaaaataaaaataaaaataaaaataattttcaaaccggagaaaaccgacgagcaaagaaaacagacaaaaattctctatgacttttgtctcaaaaagaccatttgagatctattatatgccgtctatgtctagccttccaataaatcaatgccatctaacccatacccaaaatccatgattaccgcgcgcgagtcttggctagtagcaacaatgcgtctataatccgacttcacactcaacatccagctggtggtccaacccggaaaatcaatggatagctctcctgcttgagcgtcaaaaaccttgacgctcgtatcgtagcttccgctgacaattcgttggttgacatcgtcaagatgcaaggaacggaccaagcccgtgtgcccttcaatctctttaaccagctggccagtgttcgcgtcaaactgatagatggctcggtcattgccaccggtaagaaccgtgcgtgcatcattgctgaattcaacacatgcgagacccctgtctctgctggagaactccttgacacataggccagacgtaatgttccacagcttggcgacaccgtctccacttgcagaaacaatgagatcgccacgtagctgaacggcgttgacgggcccgcgatggccgtacagctttttcacaagagcgccagagcgtcgatcccagacgcaaattgtgttgtccttagagcaagagacaatataacgatggtcaaagcagacatccaaaacaccagctgtgtggccctcaagacggcggattggtttatagtcattcttaatgtcccaaatgatgcaagtatggtccgaagacccagtaaccatgatttcatcgtcaaactggaggcacagaatggaagcgctgtgatagttcgatggtttctcatgcagactcacgatctctgctggagaagcgggaggaggacgaatggtcaataacggcgaactacctagtgcttgctgctctggatcatggaacgggccgttgttgaggactcccccaggcgctggtccgattatcttacgacaagcccaggggtagcgagcgtcccagactcggattgttcgatcgcgagaaccggtgatgattttgtccctatgagtatgtaagtaagtgatcataaaatagaaaatcttgccacgtactcgtcgaattgggcacagtatacactgtctgtatggccttggagatagattgccgccgccttgccctccttccaccgactctccagggtgcgacggataagatacagccgcttccaatcctgttggaacgtgtttttgccaagcccagcagccggctgtttaccagaccctgggtggcagcgttttccatagtaagagcgaaatacattgcgccacacatgctgggaggagacctgctcactccaagcgcgtgacaccaagccgctgttcatcaaagactcagggtcaagatacgagagtacctgggccatgatctctgtagggaaggcgaccgcagggtcactgcgaacgacatcggtttcatcatccgagtcagaacgatcctgcagcacgataccaatgccactttccgagtcacgcgtaagcttcgcttgctccgacttgcgtgccatttcattctgagccgctgcggctgctcgagcagccgctccagagcacaggtggttaggcacaatgggaggctctaaccccttcccaggaatcggtagtgggatggagacaccttgggaagcaggaacatattcgggatgatcgaaaccatcttcttcgtcatcttggctattctgagggcccagctcatgctcatgctgaaagggcgagttcgaagtgcgagatgacttgctgcgaatggt

SEQ ID NO: 1681 - DNA, 5278 bp, Emericella nidulans
aatataaaaaagcccgcgatagatattttacttcaatactggaatagcatcgatattggaggagtagtttatgaaagccatctggtagtagtaagaaggttctatcccccctttctttttagaaaggcaagaggaaccgaaagatgtcgggaaacccacaataaggtaggaggatgtcgcctgcgggggaactttacttattacgacagagtgaggaactatgggtgtgacagccgtaaaaggagaacacttagggacccagacaaatgcgcaaatatgagattattcagaggctaagcgaacatttagttggataaagctttcaaccaggggtcggctacatctagaaggacacacattaggctctttagccgatggcgataccggtgcattaacatgcaagtgttaagcttgcgatccatggagagtaccggccaccacgattagagcatccgccagggaaagtatgtgggtgctcagagccctgccaccaaggtgggtagtgttagcgctaacattttccccctcgtgatcggagtggatggtgaggtacaggcgcatcagctcaacgaagtccttgttgtcggcaaagccgagctggttggccaagttgtaggagtagtccttgtccttctggataggagcaaccttgccgtccttgaaaacattgcggtagatcttggcggcgatggtgggcagcttggcaataaggtccatagagtcctcgaaggtgtagtgccagtactccttcttgttgatacccttggcgtaggccttggcgaaagcagactcgtgctcaagagcagtgacggcgagagagaactgagccatggggtggagagtgctcgggcagcggtcgataagctcctcaatgaacttggggaggtcggagcgggcggcccactcagcagacaggtcacgaacctgctgctcagagggaacctcgccggtcagaagcaaccagaagagacctgccattcgtcagatatggccacctgattggattttgcagcattcttaccttcagggagaggctcctcaccaccgggggccttgggaagaagcttctggcactcgggaatctatgaaatagttagaaaggctttgattaacggagaaatggtgttactcacggtgagaccacggaaacggataccctcctcggaatcaaggacggaaccctacaatataattgttagtcagttccattgccaaatttcgcaaattcgtttgactgcgacttacctcccacacgaggcacttcacgccacgggcaccaccataagcctggtcaagggtgagctcgccaatgaccttgttgccatgctccctacaaatttgaacgatcaccgattagcgatcattgcgtgacaagaatcatcaggaatagcgcactttcggagcttcttgaccttctcgagctcgccgggaagcttgtcggcgaaggtctctttaagggactagataaggagattatggttagccaaacacacgccaatgacccagtcggagcgcagcgcaaagacgaaccttggtcttgccggtagagtagctgcgcaggcttttgtatgcaacagactgaacaacgggcttgccagcaagagtgctggagcggacagcagaggtactaagtctgagtgtagaagccatatctgatcaaacaacttttttgaatgtggagttgattgattgaaagagggaatggagaggagatgaaggagatcaagacagctgacagggagagaagagaagaagttcatgttaccggagaacgtgaaagctgttttcggacccatcttttttccatctggccgtaaccaggacagcctatggggccggtctcccgactccaccgcaacagaactcggagcttctgccgcctgcgttcccgccagcttccgtcatcgctcgcacagggcacattgagggccttagtatgtacggggcttactgtgtatgtctcagcatgagcttgcacatcaccggtacagagtatgggctacggtgtgagatgatgaatattacgttctgtggcgtacaacacgggctacatacatactccgtgttccaatttaaaggatttccatgttgaaatgaactacgcagtcaatgtgctttcagctgtcgcccatgcgtcatggctggtgacgtcggcaagtatccattcctcggctgtcgactggaccccagaaagtccgcaacccgctttaggcttgtagagaagggatgctagggttgtttaggagtctatagagtttatttaaagcaatcgggtacaagtagagaactactgcacatggtggatggcaggataaccgctaatgggtccctctacttgagggatgatcctttgctgagggccgtcatattttcgcctgccatcatcggccccattcggctcaccgggagcgaccatcgaacagtcagtggcacgtgaccgtttatggttgtcagtagcgctgactaagttctgaccgtctgaggctagcgcatattcgagttttctgatcacctgactttcacaaccaatgaaactttcattcaaattaccgtcaagcccctgccctcttcaacgtcttcaactcactttcatctcgcatttcatccggttcggatctcgtcactgtaatctcatcacttttctcttctctttttttgactcttaccgtttcgccttaggtcgtaccttgtacacgtactatttgacgagctgaaaggcgctagacgcgatctcgctgtttccgctgtaggccaaaggcccccctggccgtagtgacgcgaccagaaatcagcttaggctatcactctcagcacttagactgggcctcagcgacacggagtctttctcccctattaaacatacaataccatattgctgttgctggatttcccagtagaagcgactcatttgggagcctgctgctttgattcgccttcagcgacttcgtttgctgcgcgatagactgtctacgcgcaccagatcatacagcgtttcttcgtattgaattgcgattcacagcagacaaggaacagccatgtcttccgcagtagcagaactggacaactatctccagtctatgctggctctcaaggccccgggtgtctcaggatctaagatcaacagtataacttcgttatgcacggccaatgtgcaggtacttctctcaatttctgagctctgtgtgtgaaccgacgagctaacctgttcttctctctctcagaacgaatccgtccttatccagaaaatctacacgcatttcaagaaggcaccaggcacacacaagttgggcgtactctatgtcgtagactcagtaactcgacaatggttagatgcagcgcgcaaagcaggacagccctccggtagtgctgctcctgacgggacttttgccgctggtgttaacagagtgaccgagttattacctgtgttgatgaccgatatcataaacaatgcgccagaagatcaaaaggtacgctctagatgcatacgtgcaaaatatccattcccaccggattgcgggcatatacataaggccgataagacgcgacgatttattttctctcgcgctgccgattataagactttgatctacgtatatcccgcaatacatccccttaacctgcatagaaaccgcgccttctagcgattctccttcgtttggtaacgaatagtttaacttacgtattgcgtccgtcttcataggaaaaaatcaagaagctggtcgacatttgggagcgtggatacacttttcccgcccctatgctcgcatccttcaagcagaaactgaatgcgcctgcgtccaacagtaagcggctacctccctttcaaactgcagttgcttgtatatcaaattcgttgatcgcgagtgatcgcgggaaaacatgccgaacttgtctaggcttgataaacgtgaggcgaattagttctaatcctgcttataatagatgttgaatcgacgactcctgaaggctctccagccccgaaccaagccttatttggaggcacgcaacagcaatcgtcagtaggagccaatggtgcagcatccgctaccccagctcagtcagcgccagacacctcgagtattctgaaagccttggcggatatggcaaagcagaacaccgcagccccggcggctccagctgctgctgctcccgtcaatcctctgagcgcattaagccagcaggccacagttccccagcccgcgtcttcatccgtagaccaggctttgcagtcccaggttagctcagctggcgtaaacccctacgcagctgttgcaaatccgttcgctgctttaggcaacttagctcaaaacccagctttggtccagccgcaaagtcaaagccatacgccgacaccattaacggttcctcagaatcccttagcggcgcttctaccgcaggcgactgcaccgccagcgcaaccgcccaccatgacgcctgatgcactgcagcaacagcttcaactcctccaaatgttggctgcccagggtatcccccaggagcagtgggctacggctttacagatccttactctctctaaccctgccgccatgtcaaatctcaatcccggccaagctccagggttcaatctccctggccaaaattccaatgcctggggtggccttcctgaacagccacgtgatttcggggaccgcgagcgggatcgtgattacatgcgttctcctcctggcggatatcgtcgtcgctcccgttcccctggctgggacagacgccgcgatgtgtctcccccacgccgacgtgatagccctgtctatggagagtaccatggtgattctcctggccgtaggggggccgatccgcgtggtcgacgaggcaacgactaccgtcaacgcagtccggttggacgtagacgccgttctccttctcctgcacgcaaggaccccacacttcctccaccgggtcctaaattcattgaatgggactactccattggccaaggaaatatcaaagtccttagccgtaccctcttcgtcggtggcgtaacatcatctgaagcccatttacggtctcttttctcaaagtacggcgtagtccagacctgcatcgtgaatgtcgacaaacgtcatgcttttatcaagatgatcagccgacaggacgccatcaatgctcgagaaggaatggaatcatacaagaccggagatatgcagcttcggacacgctggggtgttggctttggtccccgtccagcaccgacttcaaacaggaattagtgtaattcccaatagagactgacggagcggaccggaagggagcgccctcg

SEQ ID NO: 1682 - DNA, 5257 bp, Emericella nidulans
agcatgcagaatatgtccgcgaaagctatcactatcgaagcattaagactattgtcacattaaccaaagcaatcacgtacgaaaccttggacataatcagcatgcaccaggccgcgatactggtggtaagtagacttgctttccggcgcgggtcgctgtatttctgtaggaatggttgtaggaaatataaccttgaaggtgggttggacccggcccactatgttcacataattgcgcaaacatccctcactcacaaggttgttgatcggttagtctgcagtttcttccaggacccttatggatcctagtaaagtccccctattggcaaaacaacacatatcagaaaaacaactttaccacttgagaagacttacagatggcttgttccggactgagtattcccacgcacaacctaaaatttgaaaatatatagtctatacattgagaattatattatcgtgacagagcataatcggctagacaaacataaccagccaaagatacaaatgcaataaattcgctttgcaggctctaaaccctattagacagttcaattagagtgtttcccacagtggagtcacagaccaccgtacttgccctaacaccagcaatgcaatatgtgcagaagtagacccattagattcaatcgcgtaagaaattcgtgtccgtaatgcaaactctcaccctcgccagccaacattccagataacatgcgcaatgtcctttgctgtgttgacagtatcaacgaccctgtcgtaaatgacgtcgacattggacggttgctcattgtcctgagggcggaaccccagagacgccagatagaaactctgagcgtcttcgtcttcgtcttcgtctgccgggtccacaaaccaggagttactcgagtcgtccacaaatttggttgtattgctggctgcacccaaagaattgggctgtcgcattctcccaatagatgacgaatataatcgacgtcctgggatatattttgcccatgaccaacgacccatgatcgaggagggctgaggttctggcgtgtcgctacgatatttgagcgtagtcgagggaaggggcgctatcgttttgttctcaccactggagcttgctcgtggcgtacttcctccactggaggaggctggtttcacaatgaatgtatcgtcccacgacgactcacctccaaattctaaatattcctcttcttcatatttggcttccacagcaatgcactgcaaaacctccttgttgaaatggatatgacgcctttcgcttggcgatccaaggcctgaagttgcagtatgcgttgcaagtcccgataggtgtacatcggctgctggctcgaaccctgatagatcagtagtacggttgcgagagtgtccggcttcctgcgctttcaggatggccccagcatgctgcagaagagtatgttgagataacgagcgctgcaacatagtctccgatgcggtccttttcttcaggatggattttcggtcaggacacgtattgggtgattcagagcaactcggtggcggagagacattcatcgactgcacccgtacgcgagaagtcttaagcggtccatacaaccatgtcacgtcacaatccttcagcctatgagagtgttagtctagcagtcgctgaaggatatagcgcggcgacaacctaccaattgagagaatctggggagattgttcccagattgtgtcttagcttggtccatgtcctccaagaagcattctccaatctgacgctattctcatagacctctctgtgagcgactacataacgccatgaagcccagatatcttcttctttccattcatgagagaggtagtcgacatgtcttgagggctcttcatccaccaaactatcgtcggcggccgaaatttgtggtgttgagaaactcgagtccgccgacgaggtaccgagaaggtcgggggacgcgttcggttcctcgtttgattcctcagagacagacgcactgtcatacaacggcagcaacagctcatcttggtcacctgggtcgttggaggaaatggaaccggcaggagtaggtgggaaggtcagttgcgcattcggggcgaggttcggcgaggaaggagacgaggaggctgcagagcatgtaattggacttggatagtcggaagtatagagttgtggaagaggtttgctcatggcatcgtctgggtgttctaaatagtatctctgcgcgatggggcgcctgcccactgggtctggggagaagcatgaacggctgtccgccggggacggtagcacagcggtcatattagcgaagcatcagcctcagatgccgcgttgccggatctaccctgggggtggagcgggagtaaagtgcactgagcgcagagatacaggcaagggacgaatagactgcagacaggtggccgagttcaatgatcaggatgagcgcgagaactggcacgggtcaagcgagatgggtgatgtcgatgtttggaatgtcgaggaatcgtgtagtggctagaagagcgcgagaaggttgacggaggtcgagggttttataaatggggatcgtcgtcgtcttttggccggggaaatgttctagacgaaggacggggagagggaagagagttgcgctagaaaccaaacgggaatgcgagtggggatggcctcggaaaggctgtgcggtgctcagactccaggacagcagcaatcggtaaaagcgaaaatactcatcgtccggaatatgaaccaaagtatgtacggataccaggggagtctgaagtagtagcagaataatagtgctgggtaagcgattcaggaaatgcagagcgatcggacgatcggcgtgatttgattatggaggattatggagtagtagattagaacggtcgagctgcgaggttgccactaggccgagactaagtcgcaaaacgttccattaaaaaaaggaccactttgtactatcgttgactgacagctgcatggtgagctgtccagaccggggatccgagctctgtgctcgccactaaccaagagcgggatgccggatgaagtcaacgtcgacctggatccttcgtttcgacaaaccttcccctcttccggtccctgctactatacggtggccggtctggtcgaggtccggatcccagtcgaggaatgagccaatcactgcgcgctcgcaggtgaagttcgagatacgcgtcctcgaattaagttgttattgcgcaacaaaaaaagtctattattcgacacttctattgcccagcaagattgaaccaccttcgaaccaaatccctcttttacgcgtttcgggataagtcgggcctgttctctgcgaagtggcgatcagctcgataacagtggaagccaaaacaccagggccccttgcacctccatgcacgggcgttgaggggcgttgagttcccacatcatcatgcagagcttggtgccatggatcatgggcggtggtgataccctcctgtcttcgataacgtgcgataatcgactgtggtgcaactgggacaggcgtgctaatcacagcctctgacgcgagatgagcgttcgatgttggctctggttcttgctgtggtcagcgatccggtttccagcctctggtggtcactgattgattctgattgattcagtgtatggataagtgagcgatactccgacttgcacggactacttcgtactgcacgacaagagttcatacaccagcgggtttcgctgaaagcatacagtattcgctactcgtgcccattccgcttcaatgcattggaggaccttgggctaggttgtccccaagacacggcctgagcggcagcgctagaatcgttacagatgcaccgtcaatggacggcgcagcgctacaagtcctgaaccgatgtcacggatccgctgcgagggttctttagctatcgttctacctccgtaggtatcttcctgtccagaacctaaggctcgtgtttcattatcagcatcgccgttagaacgtgggtcatcgctcagagtcattggcaatcaatcgtgttctcagccggccatccgccggtcagtcctttatatacattaatgtcagaacatcgtccaccaatgtggccaactgccgctgctgccggaacgctttccctccggctctgattattcatgttgacaagtctatgtgtatcgcgaaacatgttggcgatatactaatcgtcgctcgacggggcgctaggcctatcttgagatgcttattgtgcattcaaagtgtcgtagcccagtggaaccaaaggcgcatattacaaggtgcttgctgcttcggtctggtacaagggcgatacaagggcctagaggagctgtttacatctcacagttagcgccgattctcctgatgcaggcatagggtcggctaacgcctgcaacatgcttctatatcctccaactttcgtacttggtcgctggtctagacctgcggccgttttgcgaacgtcagggattcatgctctgacattcgaaagtaagtaacgagcagggaattttgccgcggcaatcttaggtttcctggctgcagagccacttggagcatggatcggtcctttgtttctgagcaagtctcggagacttgactgcgcctatcacggtcgtcatgataaacacaatcctacgaggatgaaaatcgaaaccaggatttttgttcccagcaatagaaggacactgggcttattgcgattctcaaaacatcgcatttcgtacgtagtagcatatccggatttgagcattatcagtgctgtataggacactcaagcctctgcttacaacaacgtccatcacttatacctaatgactcaaaatgacaagcatcgcgggagccctatggacttgactcgccagatatgaagtatgtcttaaagactagataaaacctccgaggctccgactggggcccttagtttgacggatgtctgtgctctgcatctgcatatcccaggcggtggcagcagacctacgttatttcattggatgagatccgtcagtgcgactaaagagaggaagctagcacaacggcttctttggaggaatctcctccggaataaaactgggacggctcggcgggtatctgaacgccctagtcgtagtctgccttgtttcgtgagcgttcaatgaaggatggttgcgacgcccgagcatcggcgaaacaaaggattgacctagcgtgctagattcggtgaatacttgagctgatgatatggcagcgccatcagcggggtttcccgcgaacgtgcagctataatccgtacgt

SEQ ID NO: 1683 - DNA, 3209 bp, Emericella nidulans
gggccacaagcaaaacttctgatacccggggcaactaaagctgactgcaagagtcggcttgatctccgatgacagataatctgaaccccaacaaagtgagccgggcaagaggacgaagagagtcggagacaaaggtcctgggcaacagaataggtcagtcgacacgtcggattccacctgggatcaacctgcctatatgcgttaaagatcagttcgaggccaggagtgcaatgctctgtattggtgacgcgtgtttgaggctttaagcaaactcaaatcaccagacttttacatgctccaggctcattttggatcctggcaggaggggcggggaatctttggtttcatccagatcgctatatcggttaacctgcgggaaacgcgccctgttactgacctcgtgttgccgttcctctaagaccttttgtgtccatgagtattcctgctatcttaggtagttaggatatggcgtgcgacgtgcctaagtatctttctatgcagtgggcccggtagcagaagcgcaatcgagcagcaggcaaaagaagcaagcacacccacttttgtaattccttttgagattggagatccaacctccatagacgacccaagcactgttctgcagcaggcagagctgcaaatatgtgcgtccatgcatgcccggtgcctggcgcccggtgtccagataggtgtcagtcaaagaatggctgtcaatagagggcccaagcctcaggcaccaaattcagagagcacctttccttcggcaagcaacacagcagccccctctgtacctgcacggccccgtgcccatgcccaggtgctgagggactccatgagcctgctcttctggaattgctctggctgtcgcacaatatgcagcgaattgaaccttccttgtcaacctttggggggctctggttgccctctctctcttatacaagcgatcggcaaggtgggccggtgaattgaagcatgctgcaaagaggcccgagcaggactctgcgtccaatcctggtcctttctctctctcttactatgtacaaatatatttgctacgctactgcgtactccctggtatgttctcggcctgctttcggccaacgttgatggtaaatgctgatgcagtagagtttttccatggtttcatgcaccagcaatgtcttctgacccccctcttaccaagactgagccaaggatgctggacggatcgcataaacaatattctgcagaaacctcgagctttcagttgactcccgcttacgctccgacctgcttaatctcgatggcccaatgatcatgtgcgatgggatcggtcgccacccttctcgctggggagtaaatactagaaacttattgaatgagatgcggggacggccaccccgttgcagcttcagtctgggcaataccggctgccctccgccacttcaaacactcaggaggcgagtcagggacgcgccgagggtggctccaatcaagtctctgctccatagatcagctacggcgcttccctggtgtaatctgaatgcggtcgagggtggtcattacagcgatcggcgtcaaacttatctactccgtagaacgagcatagcattcccgatcatgcgaggacaacgtttgttcggtagatcgtccagagatgctactcagttcaggttgcttgccctccagtttgctttcactcccgacggccgccaacagacctgagctccaagttctttttcatatgatacctacatggtgctgggtgcccaacaggtcgtttgtcagtgggaagccctggcgctcgaatcaaagactggccatgaactaaacttccagacttgggaagtcggacacatatgtggatcgtccgaatatagaggcggaggggaacgacacgagatacagtccatttgcggaaaagccgcgctggacccgtgctgaatccatggttgcatgccaacggataccagagtctaggtaactcgccgagattccactggatcgacggttcaagccaataactacagcatggaccgcaccctatacatacttactttccggatcgtcaacacggaggtgtctatctattgcgtattaggtagaaggatgaaaggccactaatgtttagtcgcggtttgggctatcactagcggttttcagtcctcgcttccggctaccaggcccccggatacttttttctttttctatttttcttttagcacgactggtatgaagcaggattattactgcactcctcctgagtatggggcccttcttgtgactcagcttggatgggtcatcctttggaagtcacatcaacccctcgtcattattactaataatatcacaatctttggtcttcatcccgggcaataatacttgccgtattggaacgacattgcgctgatgccggcctcatatgataggggcttttttttttcttgcaagattcgtactgtccaggcaccgagtcctggccgtcgaattcgccatgtacgacgtaggactccgggtgccgctattcagttcgtatttaatcgatttcatacacaaagctggcacaccgctagagcgaatagccaacatcatttacatcatacctcctttagagcgcagtttccacattctcgatgagacgctgatcggaaacccagtggaatattctgggtcccttggctattatccattccttgtggttgctgctcagccattcatctctgtcaggatcgttagaggcttcccagcggtactgaccgcttctccttttcatgcccaccaagtgaggtcaactgatacagttgcgcagacctgtagctgctcttgacaagcggtctcattgtcaaatggactggatgacggtgatgtcaactcattccagaagtctactcaactagcctctacggagtagttctggacggttatcaagaaaatgaagacgcatcctccgcaactaatgactggtagagaattgaggagtgggctgcttcactttgctttttatccatgtgggtaataattaccatcatcaatggatttcttcggctggcgtctgcattcccgcgagtctgcggacagcaccgggctgtggagcctgtggtgctgccatccataatcccaaggccagaggcccccctcaggcccccaggccctcaacggctgagaacaacaggggcattgatctcgaaagaaccgcgctatgcgtcccctggcgcaagattgaaggacttggc

SEQ ID NO: 1684 - DNA, 4234 bp, Emericella nidulans
  unsure (1)..(4234): unsure at all n locations
atctcatatccatctccaacatctacaatctattttcccttggcagtgtggttggatgtcttagtctgtgacttgttctagccttggaatcggaccgatctctgtcattcaactaccggtgccgcggtgtggccggtagattgggtactagccatgctaactggcgaatgcaataggttttccacaaccctggagttgtcccagaccctcgctacctgtcgacggctgactcgactgtggtgtttgaggcaacgtatgacaccttccaggatcgcgatggggccaggctgttcgagacaattcccaacagcaaccgtagccagctctgcgcggtggtccactcggtgccggacagcgtggaagggtcagagctgcgaaaatttgtcaagcaggcgcggcgagtcgccgacgagatttttgttacccatctcagcacgaattactacgccagcttcggagacaagtgggacgactttgttcgtctgatggctcaatagtcgatagtcgtccagagctgtccagagtatggagaatgtccaaggtttcgatcttccgatctgtctctgatctgggccctcccaaagtttgaagctgttgcggcgttgccctatgcttctctagtcttaactgagccaaatttccgatcatctgcaaaaccatatttccttgtttagtgtttataccgattctttctcctttttgtcaggactgcgctccttgggctgttgagaacttccttgattaaagttccgctgaaacgaagaaagtgggactgatgtcaacagtgtaattttcaatacagccgccaagtgtcacttgtgccaccacatctttgtcatcaagaattatgtttgtgctgcgtcattagactccgattgtgcgactgcgccgtgcaattggaatcaataacgcaagaagagtgtccgtgtgcgaccctcatcggcaagttcgaagtgccagcagtgcagaatcgccggggaattctaaaacctgcacaatcgttagcgaacacggcgccaggcgaccagatgcgggacctcgatccgtgggccacagctggctagtgggaccgggcgggtggcatcactaggcagtcagcactggcacgctagggctagcgccgtaccctatgtcgttatagtctgactgtctgatgggacatccttgcgtctttggatgtgtcctagtctttacacggaatcctcgtccggtctcaaactgactggcctggccggcctggtctggtctggtcttgtcttgctttggggactgttgttcttggatagtgggatactttcgttcttggtgtaagacatacatgcgaatgatacgatgtgtgctgaaattcgactgacaagtaggcagagttgagaatgccttggatcaatatcgggtcgatgcaatggggcgtcttcttgtcgtagatatacagacgatctcgggtcgggaattcactgtgctacacaatagagcagtatcgctgtttcctctgcatactctgcattcggtctccagtgcacgcgggactaccagagcgcactgcatctctagtagactcatacaacaagtccgtcgctagtgacagctgtacctcgtataaatctccgaccgttacacttttactttttttggtctatccattcctccgagattacctgggactttaagtccatagtctcttcttctagtctgtatctagtctgtatagagcagaaccatcataatcacgtctcagctgcgcagcttcggccgacttctccgtaccagactgccagatcgtagctttctaccccttttcctctatcgtcgcactagaagtcgctcaaagctacctagttgaaaaaaagacggcggtagactgccagtcgccgacctagggctaggtgggataaggcatagcgccaaccggcctttccctattggaagcagagcgccttggcgtttgtctcgcattaactcagttgaccaagtccgagtatctccgagttttccttcgtttctattcctacttgtccttatttattttcttttttgaagaaagacgttgaactggcgaaaggcttgtgttgagatgagatgtagtatcgcaacgttttgtgctatctactggagctggaatgcagaacataggacgttgggagcggaacaccaatctagacaattcttcatttaccacgtcaagaaatggtttgacgttgagcgagtcaagttaatcagtcagattcagactgaccagtgatcagtctattccttcgcgaaccgaggccggtgccggcacttatctgtttatggcgctaagtgtacatagttagtcaatttagccctaagtgcgggtaagaaccgtaagtgtcgatagtggatttggtaggtcggcagaaattgccagttccttggaagcctggaagcttttcttcggtctttcgttcgcttcactttggtttagttgggatggtatttggcacctcgatatttcgtcgaaaccttggaatcatactggtagaatcctacgtagaatcatactggtcagatggagctcgccggtatccgccatcgagaaacattcgcgaaacgctcagtctgagttgtctgagttaatgctaaaacactaccaatcctaaacttgagcctaggtagaatgcctggttgactcgtattttggccggtcattgccgggccagtgtccacaaccgcgtggttagaatctgactcgcggcgcgccgggcgaaaatcgagatcgatcgtcgtctcagaaggatcctttttttagaacccgacctaacctaactcaaaccaactcaaaacccagtgccaactcaaaaattcctggagaagattaagaattggccagaaggacctgggtggaatcacccactctatttcaaatcttgatgcggtgttttagggtttgactttgaaactgacattccatggaacgcctgactcaaactatgtacaaggcactggtaccgctctggcaccgccctggtactaacctggtactgaccctgacactggatgacactcacaaacagtctctgcccgatcagaactccgaggattgacaaagaagcgagaaaatctcttccctgccccttgccctggaggtgatacgtcggaatttgattcgggagctaaattagtcgtctaactaagagattagcgtgtattgatatgcggtatcgtatccgtattttcttacagcaaagacgcagcaaaaacggcagcaaacctccgtcactgaaattggacccgtatccgtacttgtactggtactaggacagctggaaataccgatacccaatttaagcttcgaaattctttagtactctgagggtgtgaacatccaagtcatcctcatactagttttgcctcacccagtatacgaggtctcaacttcgggacgctacgtttgcaccagacaacaagacttcattttagtcgacatatggtattcaaccgaggccattgcaagcgagcttcgactcttggtcacttcacgtcggcatcgccgactttcagtaccctgcatgtttgccatgcattcatgcccacgccctgctgggtagcatgcagaagaggagaatgcatgcgatgctcagccggaggctgagaagccttctgcatcatcgatgcaccgttcgcttccattcctcattgcgggtctaggcagggtcaggggccgggggtccgagtcatggtaccatggtgcagacacaaccgcgaggtattctgtataccgtctgagttttattagaggcgagcttttccgtgattgtcttagttggtccattggttgggtgggctgtatatatgttggactacgtcggctggggcaggagatagcgaggtctgcgtatttgtcgttctcttgacaaaaggggtgacgaatactgagaatgaagggtagggcctgtcgttggggccctaatgagtggggtctgaccgtgacattgcgtgcgaacttgcggggactgtggtggaacttgatgtgaaggttaggctccggctatagtatacgggaggaactgagttttcagtaagacgttggcgatgaatgggtttctgatgatggccgagcccggtacaaagtctgaagtacaatatgngtatgaatatacactagtattagaacaagataacagaaccctgctcgtctaacataactagagttacagtagaagtacattctgagccagtatccagtcatgtcttgacatgctgaactcatcagcgc

SEQ ID NO: 1685 - DNA, 3617 bp, Emericella nidulans
gccttgggtcgtgtcgccataggctactagtgcaggcttttccagccgactaactagggttgccccttcaatccactcttggccgggcagaaccggccaattccgaaagcgcgtttccagtggcttgtaaggggttgaagagcgctttgcttactatgaccatgaagtcccatcgagtgattccttgcaggcttttctgcagccacatcccatctaccgaaagttgccaaaagtcacatgggcgccgtggccgaaactgaatgggccaagagggaaacatactatattcataaggcatgataggtgtaatagtccgcatggctgatgccaacttccgtaggtccgcgattcgctggaggtcaagaaccagctgaggtcactgggtctccagcagaggtatataatcagcctgcgcgccatggtgaactttagaaattgcctcgcacaagaacagacagtcgacagtcaaacgggctctgatcaaatctgcttctcagcttaccaaaatgcgactgttcgcgttgaccagcgcgctggcctttactcgcaaagccgtgcatgatttgaatgcggatgaatggcgcaagcagtcgatctatttcctcctgacgaaccgattcgctcgcacggacggatcgacgaccgctgcctgtgatctggctcaccgggtaccgacgatcttcctttgcctgggtcgcatgggctgacgatctccagagatactgcggcggcagctggcagggcatcatcaaccaggtcagaccagactctctccagattttgaagtatccccactgagtaaatatgttagcttgattatatccaagacatgggattcactgccatctggattacacctatcaccgagcagattcccgatgtcaccgctgttggaacgggcttccatggctactggcagaagaacatgtaaattgacgtctccgtctcttctgaacggctggctctaactggtggaatatagatacggtgtcgacaccaacctgggcacagccgacgatatcagggctctgtcggaggcgctccatgatcggggcatgtatctcatgctggatgttgttgcgaaccacatggtaggttgataaagcgcaaagtcaataaatataaaagaaaacaaataaaataggccttcggaatcgccatactgacccttatgtgcacagtcttatggcggccccggcggatcaactgacttcagcatatttaccccgttcgactcggcgtcctacttccattcgtactgcgcaatcaacaactatgacaatcagtggcaggttgagaactgcttcctgggggacgataccgtctccttgactgatctgaacacccagagctccgaggtacgcgacatctggtatgactggatcgaggacatcgttgccaattactctggtaagcccctgcccactggcccgtcttaatattcaaggctgacccatgcgcagtggatgggctccgcattgataccgtcaagcacgttgagaaggatttctggccgggttatattgatgccgctggggtctacagcgttggtgaaatcttccatggggacccggcgtatacctgcccttaccaggattatatggacggggtcatgaactaccccatgtgtgtcatgctcgcaccagcagatagcctgcccactcacagggccagatattacccccttctgaatgcgttcaagtcctcgagcgggagcatgtcggatctctataacatgatcaacacagtcgcctcaaattgtcgggatcctacactgcttggaaactttatcgagaaccatgacaatcctcgattccccaagtacgtagaagaggatgtgatatctccacataaggctatatctaacccatgcattgcaacagctatactccggatatgagtcgggccaagaacgtcctcgcgttcctacttcttgaccgacggaatccctattgtttatgcgggccaggagcaacactattcaggcagcaatgatccctataaccgggagccggtttggtggtcctcctactcgaccagctcagagctatacaagttcatcgcgaccactaacaagatccgaaaactggccatttccaaagattccagttatctcacttcccgggtgcgttccctcccttcttcccacggtgcctcccaggtaccagttgttagactgatccagtactaacgccgcggcaaaagaatactcctttttacagcgatagcaactatatcgccatgcgcaagggctctgggggctctcaggtcctcactctcctcaacaatatcggcaccagtatcggttcctatacattcgacctgtatgatcatggatacaacagcggcgccaacctagtggaactgtacacatgctcctctgtccaggtcggctccaacggcgcaatcagtatcccaatgacatctggcctcccccgcgtccttgttccagcagcttgggtttctggcagcgggctgtgcggcttgacgaaccctacaagtaagacgaccactgcaacgactacctcgaccacgacatgtgcctcggccacagcgacagcaatcactgttgtatttcaggaacgggtgcagaccgcatacggtgaaaacgtcttcttggctgggtcgatctctcagctcggcaactgggataccaccgaggcagttgctctgtccgcggcccagtataccgctacggaccccctgtggactgtggccattgagctgcctgtggggacctcgttcgaattcaagttcctcaagaaacggcaggatggatcgatcgtctgggagagtaatccgaatcggtctgctaaagtgaacgagggatgtgctaggaccacgcagacaataagcacttcctggaggtagtttgaacggcaagctaggtcaggaatgcagcagggcgtgaatatgcgctgacggaacggtgtggccagatatatataagatacgaattccagtgtctcctttgttacttacatttagcttctatacactagcgaatctcttattcccgactacattaaacaccaaggccaatatagcccatttaaatcacacttaatagatctgtgactgtaggttgtcattctatcttcccgcaagtttcggattgcgactggaattcgccgcgagcacaagctgtggtgccccaagagtacgcttcgttgtcacatactgaaggaaacactatattacagttggtcaaggtaggtgtcgatatgatgatgataatatatattagcctgtattcgagaactcatcaagcgatgaagccctcctttgggaatgggctgcctttttgaccataggaagggaggaatctccgtgtctcaggagctagatcatgaaacagcaagcaaatttttccttgtaccatctttaggtcatggaatggatagttacgggaggtatcgggcttctgttctgatgtattcagatgttctacactatactggaaggataaccactgagttctcgtcacgtatgctgcgataagtagtaactggggcgtttcactgcagccaatgccctatgtacaaggctatgcgtcttcttttctcagacagcagaaatagtcgcgaggacggggtaggagtacgtcacacctcttc

SEQ ID NO: 1686 - DNA, 2809 bp, Emericella nidulans
gcctgaactgctagaaccgccagataatagcgatccgtatctctacaatgccagggacgacccagcgagcttgttcaccgcggaaccatgaatcgcatgctcgtcgccctgaacgccgcgtggcagaaatgacctatctgctttcacagtcagtcactcgctgtctcactctccctgtctcgcggactcttgactctactcctctccctaccgctctctctcccaccttatctaccttatgcccacttagcaaacgatatacgactgatacgccagaccggaagctggcgtagcgaacccatcccaggataattgggatccccaaacatcgacatgtccatggatccagatctgtgacgtgactggattcggctagcgggggtgggggatccttgagtgctcccagtgactgactggatgtcatcatctcagtactagtagtctgagtattgagtagttaagagtagctaggatggttaccgagtagctactctttgagtatacttctaccttctaccatttcctatcgttcatatcgcttcctacagagtatgcaggtataagtggcagaatatgcaatatgcagtatgcaagatgtgcaagcagatgaggcgaacctccggctcgtggacttgggttacattaaccgagtgctttttcccctcagggcatgacctgtcaggtcctgacttgagcctgaagaggcttgaagaggcgacgattcctgcgattttcactgtggtgcttcgagagtacaatgacggtctctgattggatattgtagtggggaaaattatactagccggaaccaatcatgagccgtcgcataagcagcagcatcccgatatggtttagcgcagacttgaaacagaccctccagtcttcgagaagactgcactcgtcagcgtctccacccctgttctgatgcaatccatgcgatcccataccatcataccatgatgccatcgtcggctccccaggccctcgaggagcacgataccatcgcatctagtgactcactacagaagtagtactacgaatccagttcaagacgtcgtatgaaagatcttgcgatgcatcgtggggacaccggtggacaagccgagctgtcagtgggccagcagcaaggtttaattaaggatgacagcttacggtcaactgcaatttctctgcgatttctgcatcctagtgggccggttgctcgcctgggctcagcaggcccagcaggccagcaggctagccagccctgcatgcatctgcaaggggaagttgcctaaatctgcccaggtgctctggctctagtctctgggcgaccgtcgaccagagagatcagcctgacgatctgtcgcctcaatgctgagtcggtttccaggtcacgatcagtgggttggctgacgagtcgccagtcagcgccaggccaccctcaggcctaattatatcagcaaatgagattcactgggatccgatgaaacccgcgcattccactgggagccaccgtctcggatctcgggaatatgagccctggtacgatgttggaggtgaggttctctgaaaggtcgcgtcgacgctgcggcggcgctgcggcggcgctgcgacggcgtccctggccaggctggcataccgggcagcatgaatccagggtccagcaccgacagccgaccgacacatttgttcttcggggcgtctggaaacgggtttgagtttgcattggcattcgcatttggcacgtctttcgcacttttgggcattttttggctttttttttggcactttttggcacttcccatcgctcgctgctttagccatagcctctctcggaaaggtgcacccagagggcaagtggtcggcggacccgctaccgttctgctcggtcctcatccccattctcccatactggagttcgaactaaccccgacaggcaaatgcataataactgcataactccacttttgcgcagattctagatgatcgcgtatttcagactgtcctagtacgctacgtgaagaaactgaacccgcaccctcccaatggccccgaaaggcgaaagccgatgtgaccgtccatagtcgaaacgcaacggcgcgagatctggatgctggtgaacggcgatccagcagtttctgctgtctggcgtgtttgccacgactcttcagctcgcgtgaagtagtgaagtaggaagtagtaagcaggaaagcagtaagcccggtataaccggcatttttccgatgtcccgttctggaagcagcaagtgcaggcgtgtcctccccgaggagcgcgggagcttacagggcatacagcatactaagcatacagagcataaggagcgtataggagtataggagcatacgaggcgtacggggcgtacggggaggctgcgtgccctgcaatgataagccgagcgagtctggaaccaggttgcttggacgcgccagatcgtgacatctaacgttcttatggagtaccatcgaggtagcaatctgataacagccagaccccgaagcagaaaataatctccgtggctggcagccaagcggggatccttcgtctcgcagccgttgccgtttcagggtctgtccgaggaccatcggttaggcccaactgtctatggtgtagtggacggagtccaagaggccaggaggcccagggagcgaggtcctggtcgtattatcctctgccctggctgagacggtcagacccccggcttcacaactgtttcagcttcaccatgtggtgctacactacctgaacccgacggttcgacccgatcatacgcgtccagccaggcccgagactggatgacacggacgta

SEQ ID NO: 1687 - DNA, 3814 bp, Emericella nidulans
  unsure (1)..(3814): unsure at all n locations
gcagatggtttaagctccaattcgcttgttcaggtatgtagaacatatccgatagggtgtagtcctctatacccggtcgtctatacacaaccaccaaagacatcaggttggctggatagatgttgtactataggtaccagcacgcggtgcagatcgatcgaaagatgatcagaaatcgaattgaaggactaaggagcatcaccagcagttagcaacgctctgaaaaccaaggctaagccttaaagtcacttaccatcctggagctggcctgtgatgccaacactgaagacanatagcaagatgtgccgtgcaataaacccagtgcttcgacctcttgtaagaaatggctcaggattcgactcctgggagtagtcgaagcaattctattctccagcaaatggcaacggttaaaggctgctgtaatctgaggactccgcgactgcctgcagaaaggctgtctggtgtaagtgatagtactcaagcatatatggtcaaactattcttcgtactagatctgtttcaagagcagagagaagccagccaaagttaaccgcatagaagctttgcgactcaaggggactggaaacacattgccagcgaggcccaactcagaggccatatttttggcttatggcggtctctgggatttctgctcgatggaaaaagtgaatggcatagttgcagcacgcctaatcatggaggacaagcgggtcttcattatcatatcaccagatattcactcactatacaataaatatcgatgttacttttatcgtgcatagagattggggtgcgtttgataccagatttcattccagggcgccttaccattgcagtgttgttcattcaagtttgaaagcattaaacgcctttattaagactagggctcacagtgagttattaccaactgaaaatgttaatgccattgtcgcaatagcaacatttaagcagaaagaattagcagtattcatgatttccattgtcgcttgtcaccacctgaattcagtcaggagccgtcggtcaccgcgattaatcagaggtcaatcaacgaacaagcccagccccaactgaaaccatctctttccccatcacttcagcatgccaccatcttccatgctccgcctcgtccgaatcgctagcaaaacctcccgcaacaaatctcagaagctcgccaacagatacaacctacatatatcgtgcagagtgaagccgaacgcgtccggcggccgagagggcatcaccgcagtaggaaacgagacagtcgatgtatgtgtagctgccgttcctagggacggagaggcaaatctagctgtatctcaggtctttgcaaaggtaagccacattgccctgttcagatcaattctatgactggatgcgtttggcgtgagctagaaggagcccttgggagtgggtaggctgattatggtatgcaggtgttcaatgtcgcaaaatccgacgtcggagtcatccacggtctgaagtctcgcgacaaagttctctgcatcttcaatttagatattggaacagagactgaggagagattcctcgaaagagctggtaaacggctgcaagacgccgtgatcaagaaataaagcagcggcgggtgctaggatcggtatctagctagtcctggactccgcggagccttgtgcggaaatctcccacttttttcttcgacgatcgatgacgactacaacgcgatatctccaggcgaagattcgtgaaaaacacgcaatcccagcaaatatatttgttagaatcaaaatcaccgcattataaccatcgaagatggcctccacaaaacgaaaaatccccgaggactctagcgccagtatagagaccatcaacttcaccgcacgcaatcctccctggacctacctcaagcttcaactgtacgcccgcgcaccctactctccgtttctgcctactcttcggaaaaaaaaaaaaagaatagattgactaaaacttgcaggattcaccaaccgaacacctccgcagccacaaaatccgctcctctcgaccccctcacagcccgtactcatctctcttccgccctctcccaattcctgggcctctccggtagctcaatccctgtcgatattctttccgtgtcccccgatccagagtcagtctctgccttatcacagccacaatcacaatcacaatcgcgcccgcttgagaaattcatctgggttcgtgtaccgaggcaggacgcccctgctgttgttgcggccgtgagttcttggattggaggcgtgggagaagaagaaaatggtggaagcgtggcgtggagggtatgcgcgaaggggaactttttgtccgcgctagtgaatggcgacggaggggatttgttcaaggtgtagaatgggttgggatttacgtcgttatgactatcgaataccaactttccgacaggatacgttgcgattgtgcagcgcgatgcggctcttaggtccggacttgggttgcacaattgttctctagccgcttcactccgcgagagtatcgcgccctctcggtgcgctctataggcgggagccgggcgatttactcgaggtgaagcagctcgaggattcaagagatatattcgttccgacccggatgaccaagagaagacagacgagcaatgagcaagcctgcttcgaacatgccagtgattgccgcttcgactgtatggcatacaatcgcgggaggaaggacctggaaagatatatgatacgatcacagttcaacagatttcattatgatggacaacccccgagtcacaattttgtacgtatgtaaagacagacccaaataatattcacagcggacaaaagtctcgcggataacgagtgttcaatgaacagatttccaacctcaacaccaggccaaaacgacagacaagagacacacatgcttattcaaggaagacgcccgatcccatgctgcggcgcaaaaaggttcaaattccctctaaattccatgcattttttccgtttcgtgttgtgtttgcagtcgtccccaggggaagtgcttcgctatactgatgactgcttgttaagctttgtattcacctcctcaagtacggtggacgtcttggacgctgtcggcgacgtgttagcaacgactttagcgcgcagcgcagcacggatgtcctccacgctgcgctccttccattcgggctggcccgatgtgctaagtgggtataggacatagttgtcctcgcgggaggtgaattcgtcaacacttggcggcggtacagcggtgacaatatccagttcaagcgcgatctgtctgcaatatgtgtcgagaggcagatcatttacgtcgtggccgaaggggttctcgatttcgctgccaatggttgctaggccaagaataatgtacgcagcgacaatggagccagggatcgtgacccagccaagagagtcgtagagctggaaggggaggacaagaacgtaaatccaagcgatttgcgcaattgcgatgctgtaggcgactgggagcggggtgtcgaggacgcgttcagtgccggtgacgacttcgtttagttgggcgaggcaggcaacttcagaagttagcaatgttgaaaatcattagagatacgtagtacgtactagcctgggactggtggagactgatgttgagtgtttcgtttcggatgactgagtcgatataggccgaaaggtggttcagaatctccaggggtaggtgtcccaagggctttttggagcgtttgatgagcttccgagggttcgactctgcgaaagaaacgcccaagtcctcgccagtagcaagtggatcctaagcctgggtctccctatagtgagtg

SEQ ID NO: 1688 - DNA, 5154 bp, Emericella nidulans
gagcatcggtaatgcgtcggccgagcaaggggtaccagactctgagagctccataaggtcaagggggcactatgtgtccgaaacgatctaccaatcctgtcgtgaaagactcgaggcagagtcaaatcacttcgggcttgggatagatatggacagtatcccgcagctcggtgagatgcaggacctggtaaatctctacttcgatggtttccatccatcttatccctttttacgcaaaagtcagtccatttttgtcaagagctcatgctggattctgctcttggctgtggccgcaactgggtcgcgatatagtactgaggctaggcatcacaagctcggggagtctcttgttgatatggtagatcagcttgtatcgatgcggctgcaaaatcctgtattggcgggcagtgatccgacgtggaagccatgtgctgggtctgacgaggggtctctggacaccgtaaccctccaggccgcgttgctgaattctatatcccttctgcactgtggaaaggaacacggcgttcgacgtgccttgcgccggagattttactttttcgaagcctaccacgctctgaaacaggccacatccataaagaggaggtcatcgcagttacgagaaggaaccgaggaagatacctttcaacattgggtagacacagagtcgcttatcaggacgagttggatgatctgggtaggtgcctctgaaggtcggctccgcgttacgtctagtgcctcgctcacggtttgcagtttcttgattgtattgccctataccaatttcgccacgctccgctgattcaattgggagactcaaaagctcctcttccctgtcatgaggacctctgggacgtttcctcactaaccgagggtttcagcaatgcagaccatcaatcaggttcgttttattcacttggtcccttcgaacagacctataacctgtcgaaggctgactttgatatcgcattactgatagttaccttgctggaagcccttgagctgctccatatggaaaagacattacctcctaagttgggaaatttcagcactacgatcatcatctttggcatctgccgtcgtaatcaagaagccaccgtgcagcaccaaaccaacttaaccctttggttacccagcgcgcagaaacagtcgcgccctccgttgcatccgatagaagaggcatggccgccaactgtctcctccctgtccaggtggcgaagcagcgcttgcgattgccttgacatcttgcattggaacgcaaatagcatagctgcgagtgtgggtggctgggaacatccgacgattctgcacctccacctcgcgcgacttctgctgttggctccggtacagcacatcgagacacttggtagcgagtcaacgatatctcacactccccaaacttccagctcgactgcatacacgatagctcgataccacaccctccgctgggcaatccgcgatcagtataaggcgagactctgccttgttcacgcaggagccctattctggcacgttcgacgatacagcagtaatagctttctggaaccatttagcgtatatactgccacgcttgtcatttgggcatatagtatggcaatgcacaccatgcgaggccaaggccgcgaaaaggcgattctttccgaaactcatctaagcccgcgcgatcccgtgcagcaagaagcgccgtgtcttgaggagatcggtctggatgacaagagtagtgatagtgacgctgaggtgatggttatacagctcgaccgcccgtgtgatgatgagattgttcagaactttgttcgctttgggcacaccatgtccgcgcgcatgcatcgggttggggatatccaagaacaaagtgcaccacgacggatcctcaagcagggtctacggttgttaaccggcgccttatcagattctgacagagcagtccctagttggggtgtggaaaagtccttcattgattccctaaatacctttattgagctcccgatggtcacttcaaagaacgacaggttacctggatgacgagcttgacgaactatgcttattatatggtagagaatacatctctgcatatccccattaaggcaagctatttgatatcttctgcaaaattaaaattgtagctgccagttccgttaaatctgctgatcggagacgccgactcacaacgggtaacccaacggcttcatactggcacagctggcacagccgagatgggcttttatatatgtcgtatgaatatcagataccaggagccgaacctagagttttcattgtcctctgaactttcatccgctccttcacctgaaccccaaatgcaatgcagaagctgttttcctgatgcttagaaacacattagccatagtgtagtggatttttgccaggtgttgaagcacttgccgggtctatattgtagcttcatttgacagagtcgatcagctacacgccggctgactaggtctaccgcttcaagtgcagaggcattcatccaatctcgagctgacaggttcaattacaacatgcttacgggaaacgggacctagagtctgcgagggcatatctgatcccacaaataatctctcttgactcactgtttagcaagcatgacattgataattatgctcatgcttgccataatgatggccctaatgggtcttttagtgtgggtggtttgggttgacaaatctagtccgctccagggttttgtttaactgatagcgaagttgatcaagcctatcgaaaggcgcattttagctgaagagggagaggaacagacataatagaagtagtttaaaagcgactcaacaccgccggggtggccatttgtcaaggaaaacagatagtctctgacatcattatccagcatgaagcctgcctcgaactttgtatttgcgcaaatttgctgaacagcatctctgaactcatcttgaactcatctgctgtgaaaaaaagcataattgatggtggtgaaaatagttccattggtgatgatgactgcagggtaagtgtgacgcgctggctttgcttgaagatggctggagtaaacttgtcgttttgcacgtccgcattagttgacgggctgccgtaggagcagaagacagaacttgatatctttacccttcccatagaccctttcatttaccactgtattccagagttccgtacccaagtatgttattggggctccgtcaactatgatgatagtgctggagataaattccgcgcactgctagtaaggttgaagaggctgcggatatacggagtcaacttctgccacgtcttatcctcgccttcagtagtataatcttcaagcttttcccagtagctgacgaactagacaatccttctctggtccttgtaatactgctgcaggaggcgggcgagtattgttttgctgcttgctggagttccccgcacatgaacaatattctcgcggtcaacgagctcagcgagtagtcttgctgtgtccgtgcgacggctgacgtattgaaactcgggcctgtttgccagtatataccctttgctatgccatagagtaattgagacaggatctaacctctctctttgtggtacgtcgtttcctggacactttctggaacggcacggtgactagtggctgaaggtgtatttacctctccatgatcagaaagacaatgatggcagtgagggcattccagactaggcaggtcttctgcgatgagtttttgatatggagtgtcaaatcccgtataattgcaatagagtaggccgcaacttcatgcacctttgccagtcatgatgcggagcgatatggagtttcggctggactgaaaagaacagtcgcaagcgtggtttcattggaataaccaggagccatctttataatccttaccttgatggtcggccaagatgggcgttaatcaacacggaaactaggatgaggatgaggaagcgaaactcaagcaactgcctcccggaacgagaaacctttggggcccgccttgtgtcggagcatactgccctccggtactctactcccggtaccgcttgctcctgggaccgggatagctggtcattgttctttgcgataacagagttacgaaggaagatagtcccttacgcgcagcacaatgtagaggtgcttgaccaccaaggtctgaccactaatgtctcgacaggcaaggttggcagagctctgaggtaacaaaagtcggaaatattcttccctcgaacgctttattcccgcatagtcgccattagagtgtatgcatctcacttgttgagatcaaatccgagaaatgtacctcttactgagggaggttgactagaatcgttaccaaatacccgccttcgacatcagagtcagcgtgcagaaaagaagtgacgatgaatgcttacagtcttctcattgcagaatggagctgcgtcttgagcaggtaggtcatcttcactgaggcagagtcgcgagccacgcttttggtgagatcaaccatctaaacaaaagccagtccaccaggtcgtaacggatatttctgcacatggtattcccccggacagaagctaaggcttgccagatcttcaccccgtcaagaatatctcattgcttggggcacaaagcaaaagatcttagaagctcagaaagttgaagcactctttgcagcctactaggggaaagccagtcgcaacacattgaaaagtcgattggttccctaagcatattaagactccttgcaccaagtgtacactaaaagcagaagatatgagaagatatgcagccactgcaccactccagtacttacggaatcgtcgatactcggaaggctatacacgaaatgaagagactgtggaatagagtagatatgttcagtaaatctttctgggaagcctgaaaacaggacagaggacacacagagttatcaaaaggaacgctgattcgattatgtcgccgaaatctctgtccttcattaccagtatacctactcgatgccaccgcagatttagctgtcaactcattccccagtcaaggaatcacactgtttcctgatatcctcctggccttcaccataagcatcaacgtcatactgcgcaaagcgacgagcatcgaccttcttcgcgaacagaagatcgatctcctcaaatgtgcgccttctggtctccggcaggcggaagaaggtccat

SEQ ID NO: 1689 - DNA, 848 bp, Emericella nidulans
gtacagggtgcgtgactgcgtgttttcggaagctgcaaggatgggacaggcaagatatcatgaatgaatatatccgttactctcgcccaaagcagcgacttctggacgaatatttatcgatgaatttgacccctctgcactctctcatttggctcaggcttctggcgcgatgtcctgggaactctcagggacctatgccagtattacgcaagaggacaagaactcgccagagaaccttattcagccccctcggaatgggattcgcgtcgcttcatgactctggagttggaacatgttctcttcgaagcacagtgcagtcaagttctttaaaatctacagccggctttgatatgagtatgtggctttcatgacgttaggtgatatggctttagcgctgaactagacacttaaggagtcaatgtttcttttgttatggcgatctattatatgaagctctatgcacagcgcaacatttcgattctagaggattgatccgagtatctttggcttttgcttgtttcccccccaccaactcattgccgcttgtcactactttgccaacgtgcccttgagtccacaaatcaaaggttcgcggatctctatgaattcattctcttcaattcgactgctaacctggttactttcaatccgggtatctagctgctgtgaccatggcgaagactgccagccagtgtaccgtgcggttgtcctgtaccatactgtcgcttcttacctgtattccacagacagtttctacggtgtgggacaagcaggttcgttctagccgagcaatagccacagctatgattatagagcgattatatctattctggattctgactgcgcag

SEQ ID NO: 1690 - DNA, 2464 bp, Emericella nidulans
tcgcctgtcgccgcctctgccttgttcagctgcttgctcttccaaatgcaccaccatctcgccagaagacagaattttttcgtgtgtccacatcccgcaatgattattcctccaccagtttggtatcgtggttcttgggaggtaaggaaaaagtacggcgtgaaccagtgcgagatagaagacacgcagttggcaatcgcgatcaacgccgcccgtttagtccttggccgtggcacgacggttgtctcccaagagatttggatctatatcgtgtgtcagcagattgccccgtctctaccgctaatgttcaagagctcacatacattaaggccaacaaatgggccggtacagagcagaatgagactgaaatagcgggctcccacgttcagtgtggatatcatgagcactgcgccgccgagggcaaccagaatcgggacaatgatgtgccaacagtgctccagaagtcttccagatgaccaggagatagccagagttgcaaaatatgcaatcacatagggcggcgcctgcacgagataggtgacgacttcgctgaatccgggtgtctcgacaatctgatctcgttagtacggcctcgcgggcttatgaagaagaagggggtcaaagggtcttgacgcaccgaggggaaaaaatccttgaatgactgtgcaatgatcagcgagaaatggatggcggcgaaaaaccaggtaaatgggtctttggccgccagtatcactcctccccagtaatcgccctgcccttctgcgccctcgtgtattcccccggcagagatcaactgccgatactgcgccatggccgcctcctcctcagagaaccagcggcgactggtgttatccgggaaattcggcaggaaacgatatgccgccacggcgacaagcacacttactattccctcaagcagaatgaaccactgccatgaacgaagacgcgctattccatccatgttggtgaggatcgcagcggccaggagaccagagaacacattggagatgatattgcctgcatgccagatccccattcgcagtggggactccttcttcgtgtaccaggacgaggtgaggagagaaacagcagggataaaaggaccctcggtgaagccgaccaggaatcggcagagacagaacccccagccggaggtcagcgcgggcatgcagagcgtgaccgctgaccacgccagcatgattgagggcatcagaatactcggtttccccttggcgatgaagacgttggcggggacctgggagatgatgtacccgacgtaaaagagcgagatcccggctgaccaggtcgtatcagacatgtgcaggtcctcttgcatgccagccaaacgggcatttgagacgttgatgcggtcgaggtaactgtgactcgtaaggactgctacagggcacagaaagcattaggataagagggggttctcacctcataaggagcatcattgtcacacatggcagaaagtaccaatccagcctgcgcaggacggctttgttcaacagttccaactcctcgtgggacttgtcctgtaggatggggaagtggaccagcatgcggtcggcctctgaaacgtgctcaagggcttcaagcacggccttgggctcatcgtcccggtgcgctgatttgtagtctgctgctgctgacatcatgatcggttactgggcacctgggacttggtaaaacagaggcgtcttgtcgaaaaggctgccgtctctgcttctccttttatagaattttctccgcgcccagccccggatttgctccacttaaggcttcacgagggtttgataccccagatcaacggagtatgggccgatacggtcgtcgaccttggcgtgctgctcagacaagatgcctttagtaaggaacgggaaagctccgtttccccaagttctgactgcctctgccaatgcgaaattggactgattttgtcctcttgtgtccggcttggggtccggctaggctgttggcctcagggcttcgtcggaaaagttccgtctacgggcttctatgccctaattcgcccgaccttactgctggaaagttttgtatcattgctggcctgccttctgagaatgaccagaaagccctcctcgttgaggaggaattgtattgtagaaagctaagtctgtgatcctgcacggtacggaaagaaatcggtaacgaatagatagggatgcgagcactcataggcccaagacgtgatccaaggagtcaaccatatcaggaagaacgatataagccgcgaaccgtttcctcactgtcaggcggccgaatcgacttgcttgtcggcgaagtcaggtcctacactttatctagcgctgctcacttgtagtaggtcccttaatcccgctgcgagagggctgagtttaagcagcgccgtatatcttgttaattgacggtacagcgcgtggttgcctggggtttctccggggtcaagtggttatgaagt

SEQ ID NO: 1691 - DNA, 4786 bp, Emericella nidulans
tgtaaaagaataaacaacgcattctgtcaaacaagaattaatgaactcacctttgtacagtccagtgtagccctcttcctttatgattctctttaagcttccgttcaagctctccttggggccatccttgctggcaacatgcattcggcttttcacagtaatgtatgggtatgtgattgaggtcgccaaaatcttgccaagggcaccgaggtaaaaggcgtcctttggtgtcatccgacggcggcgttccactatgtttttcaactgctcgaagatggtatactgtagaataggattgatcaccaagacaagtgcaggtaggacgccagcaaagagtgcagtgggtccctccttctggagtaggtccataagtgtaccgaaagtagacggccgctgcttcttgggagctcctggcagtgactgatcatcctctgccgatttgcgtgcggtcactctggtgttgacgacccaaatcgggtttgtgagcaggacagttgcactccctgcaattgctccggctatcatcgattcgagtgttgacaatttctttgaacgacctgctttttcggcagccttctcgaaggcagacctggtccattcgtaccagtagtagtagacaaagttcgtgacgctgataccgaataatgctgactcgaggccagagtaaagtccaactattccttctctctgcacaatacgacgaatcgcatcaatagtcgaagactgcgcacgcttggattcgacttgcgctcgagttgagagtgttataagtgggtatctggttaaatcatccaggtgagtatgtgctcatgaaaggggaggactggcttcagattactcacgtcagaaccatggacagtatgccaccaccagcacccgccagagcatgggctatgttgtcgctctgttgagcagcagcagcggcggccactttctttgggtcctcgacctttgatagagacataacgagattcggaggtatctttgaagccagatgctaaaagaagggagtcgtgtcgagaaactgacaagacagaacaggaagatggggagagaatgaaagaaagtagatttcaagacaggaaaaggagtgatatacgaataacaatcggaacgaaagaaggggtggtcgaaccgcctctagagatgttttggtcggttcgataattggggcatggcgatccatctcatgacgtttaccgaatcctatacctcggctgttataactttcagccttcaaccgttttcccaagatgtacagccatacatttgtacacttttcagtatggtaaggaatcatcggtctcggaaaccggtcaacatgattcacgtgttactcgccgcgactataactgcttttcacaaacatcctggagtgtgtggtctctgttgaggcgacactcggagcgacactcggtctaatcaaaggctagcgacatgatatctgggcgcccttcccgaaaaaaccatcaggccgaagttagatccttcatctggacttaggattattcgcgagttctagtcgatttctggcgaatgaaaggtggggctggagctgttgtgtcctgcatgtgatctagttcgagggtttgtgttgtgataagatgacactggtatcatatgaacatacatgtttcctagtatcataaagaccaagagtagccgacagagcaaggatgtaactgttctcagttcaatcaaaaagatttacaacctctaatttaccacggcagcgagtacacaagtcattcatgcgttccctataactgagcctgacaagatgcgcaaggaatccaacctaagaaacatgaagagaatattgtaaagaggccagattagagtcgcaaacagagaacaaaaataatgaaagcaatgaggaacaaggtgtcggggtagggagcaagcagagaaataaggtgctgacccttaagtgttcctgtacaagacaacgagtaagagcccgactaagcatagcgagaaaagagatacactcccacgtagtcgtttccagctgattaaaaccgtcaacaccatccgtttgtaccgtgattagggatggacaaagacatcgagcttcgcagagaatatggaggtcccacggatgcttctgtgccctgtgccaaaggggcagttcggcaatactgcttttcggtcatgattcgtctaacagcagccaccggcagatccagactggacaccctgaccctggccgacttgcacagttggcttgttattcacggttgcagtgcccatgcgttccttgatctgtcgagccatggttaagaaagcttgttcaacgttcgaagcattcttggcagatgtctccaaaaatgggattccaagactatcggcgaattcctataggtagacacagaagttagagggtttccggaaataacagctgaagaagaccaccgatcgatgttgtgatgtcgtgacagggatatagcaaccaacctttgcgacagtgtattccacgacttttttgtcctccatatcgctcttgttgcccacgagaagcttgttgacaccttcagtcgcatagcggtcaatctcctgaagccactgcttcacgttgttaaaagagtccatatcggtaacatcgtatacaacgcagataccatgagcgccacggtagtaagaggacgtaatggttcggaagcgctcttggcctgcggtgtcccactatgtaagccgtcagctttatccgatgcactaaaagaaaactatcagctttccatacaatctgaagcttcacagtcttgccatcaagttcaatagtgcggattttctttcatagaggctgttagttaatccctgtccgcagaatgattgcctgacaaccgataaccgatcgacagcagggtaaacgtacaaaatccacgccgatagtggagatgtagctttctgtataggtatcatcggcgaatcgaaggagcaagcaggactttccaacgccggagtctccgataaggagaagtttaaaaaggtaatcgtatctgaccatgttagggctctggaatgggagaagtactcaaattcggggaggcgtagcatagaggactctgtgttttgaccacgttagccggctgaatagatataaagcagcagaagcgggcagaacgaagtcatctcaaagaataagagaaaccatgtcacggcaacaaaacaacagcacgattctggtggaccactgccaaactcgcaggcagacgttcaaagcacttaccactcagggttcatcttggctgctaatcggcgtggttttcttcgaatgaatgagttcgctagagaggaggtaatatccgcagcgagacaggaaagcgagattcaggtgatgtaacgtagagaagtgtcagccaggatgggcttcggcggtgttgctcagtgcaggagagcaaaggagcccagcgtgcagtagcctgtgaccgtttcacgttctgcctggggccagcctatgaccaaattaggcttagtgttccattcaaaaatagcccaagatcccattgctctgtcatgcaccacatccttgacatcagaaaaaacctagagtagcatagacatttggataggtacgggcagctttgggggtccgtaatgttaatttcaatctggactcttccatgggcgacatgggattcgaacgccacgtcaagcaaggaagccgaaggtaagttgttacacgatttaccgtccaaaagccatatgagattcgattcaagataaagactagactatggatcggcatgcatagtgttcactcccgtcattcagaagagcaagcgcgtttagaatcctcaaccttaccctcaagcataaccatgctcttttagccatttcaagacttgcttttcatccctttctttgtagttggcactggtccggatactgtcggccacaatcactagtgcgcgatcatacgcagttgtatccttgtcctggaagaatgcagcaatatcatcgccaatgctatgatcagcaaatttcgagagtcccatccgcacgaaacgctcgaaaacgacgttgtttgcggaaagacgtgcttctacggagtcccagttgttcttcatatactcccatagcaaatgacgaactttggagttggccgccaaggaaactgcaccgttatgcacgtcctgaatagcaactttatccgagaacacgaagtccagatactcattgacaagtgcagcatccttcgtacgtcccagagccccaaggcagatttccttgccatcaacagaatcggtcttgagatattcgtccttcacagagtcgtactcttctctagtaccttccgagacagcaatactgaagattgcagagcggagatttgtgtggatagcgctcttgtcctttgcggttgcccacagaccaaagcgattcttagcttcagccacaatactgagaacaattagtcacattcgaaaggaagacaaaaggtgacagaatgacagcacctctcattgcccgcaagccccgacatcgcgatcagaagcttccgcaactgcagagtgagataatcatcagtgggcttgaactcccagccgatcatattcgcggcgggggccgaaagttcacgagcaaacttcttgaggccctcagccacctcttcgttctgtgagaagacagaccgtaaattgccgacagaagacgaaatttgggaccaaaccctattgaatcagcaagtaagcagaaagaatgcaaaagcatgcaacccgagaaggggaaaagtaaagacaactcacaaatagttcgtttcatccttgaacccttctagaagaga

SEQ ID NO: 1692 - DNA, 2782 bp, Emericella nidulans
ctctcgttcccggtagatctgtttttggagattcgatactgtctctcctacccgagatttggatgcggagggcgcagtatgggacacgggttggcggggacgagaactgcgcaaagggggcgatttcttcggcggcggcgcagctatgtaggcttccagttgcggactcttttcggagagtttcacacgagagcgaccataacctatttctcgccttccgcgagttggagtcgtggtagtagttgtagagaactttgatttgccttgagacactaaatcgcgtggggattttggagatggtttaggtaggcgactcaagcctttgggaggaaagggaacttgcgtattagaacggccattgataggtgactgggcttcgggagagggcgaggactctttagatgcggaaggcgaattaaggcggtgggagtatagtggaatgcgcgacttggaatgcggactggtcgagtacgttcgcgacccgggctgcaaggggccagagaccgccatgtgaaagtcggacgggtgcgtgctcgcacccacaggcgagtttcttgggatatcgctccttgttcgtcgatggcggcccgagctttccccagtgcttactgcttccaagaatggagttcgccccaaataccacgctgttggagtcaaaggcgtttggttggacgactggtcaaactggtcaaagagcactgggttcgggctagggatacttccgtcagaacctcgacgtcgcaaatgggacggtatcccataaccctggaaatctgtgtcgacggttagcaactccccgaataggcgccgtcgcggaagcagattcgatggttggtggtcgtttaaagaactgttgctcaagcccgtggtattcgaagagggcgagatgatttgtgttgagaatacctggcctgcgtctccctccgagtcccgccgggaggctctttgtttctgtgctatcgaagtaccagtgtctcgcctgcgagacgccgttccagattgtataatatgatcgccgggggcagggctcgaagccctagaatggtctctggaagctgacgcagaggcagaagggaatgggaggacttggtcgacgttgttgttgaatttgttgactaggtctttgaacgaagtctgtttcgaacgcaccgccaagggtcgcacggaggcaggaccggttgggaaatcaaaccggccttgcagtgaggtgtcggaaactgaacgatactgtccccgttctacactcgacaaccccggcagatggacaggccctgatggcacacgttgtgttgtatatacggcccggccgtctgcggctgggttcgaggctccgggcaacgacgcactctctgctcggatcctcgtggcggtctccaaaggcaatgtaggtgaatgtgagcgatagtattcgtcagggtcgggagaagatcgctggtgacggttgggagagccgttcggaacaacggtcgcgggtaacgcgaaggattgtggccctgaggcaccttgcttggtagtatatgtggtacctgaccgggaagaactcggtcgcgacgatgggagagtcagcgaagggttgtgggagccattatcggaaagagcgtcgtagaagcattcggcggtgctggaggaggagaggcgccgagattgggaaaggccggcgtcaacgagaccagaaacgtggtcgacatcgctgccggacatttttcatacatggggcgagaccttctttttcgggttaatttctagttgatttttcttatttcctgccagagggggctcttaaacagaaatggttggcggagatcgctcctgttcaaggatgctagtctgcgatgcgttgttcacggctggtggccacagacggtgttgcagatggaccagccagaactacaaggcaatcgtcaccgggtagtactacccaaatacggcggcatattcgaaatccaggacaagatcaccaagctcccgcgggtgatctgaggtctgtgtcccggcaggcgctgagacggatcgacgtgcagcaattaggaacgatggttaaggacggcgtggagaggtcatgggatgaagaaggatgataacgcaaccagatggcagggaggaaggtgggcgggcacggcgtttgcacggcgtcgagaatgatgactggcgaaagagctaggagcgagcagggggagatgccagtccagacggggtacgggcgtgatggaggggagctggtcacaggcgggccgagaggggtctattggaggtccaagtggttggaccggaagcaggaacaatattcgcggcaatagtcgtttgagtagttggagttgggattattatttgggctattattgagagtggaagagagaaaataataaatgataataatagcgaggacgacgggagagatcggttgcgacttgagagatgggcagcccatatggaaatactaagagtacgtatgatactgcctcgtcactggcagctctcaactctggtagacaatgagtgggccaccacagcagtcctgtttgacctgcccagcaacaccagtctggcaatcccatctgtgcctaagatgcttgcctgggccgtaatcgatcgtaatcgactctgggtactcctcacgtgctgtgtatttgttgggtgggtgcctggtttcactttcaaacggcgattgcctggggacagctctataagttgggctctgcactacgacgttggaaatcattaaaattatcacctcttgttctcgattcgcgtcactacttctggtctgggactgtactgacca

SEQ ID NO: 1693 - DNA, 3192 bp, Emericella nidulans
tccctcaattcggattgccctgcttctatcacgagtattaggatcagagagtgcagtagtactcagagacgatgttcaagcttcattcttttaccgcggcattggctgcaggcctcctcacaacaatgttcaattctccttactccaccactccaaatatacctgctaatgttgtgttttgatatatagtgtttccgccgccgggttgcacgaggctgcacttgctgctggactggagtatttcggcacagcgacagataatggcgagttaacagatattccgtacgtaactcagctcaacaataccgctgactttggtcaaatcacgcccggaaacacccaaaaggtaggcagccgcatccacaatattgacccacccccaaacgtacaatacatgagaatgtcatgttgacatatgcgtgatagtgggatagcaccgagccgtcgcagggcactttcagcttcaccaagggagacgtcattgccgatctggctgacgccaatggccagtatttgcggtgccatacgctcgtctggcataatcagctgcccagctggggtaagatgttccaccgttctctgtaaaaaaggatggaaatcaaaatttaactaaaaagactaacatgagagcagtgactagcggaagctggactaataccactctaaccgccgcactacgaaaccatatcactaacgtagtgaatcattacaaggggcgctgcatacattgggacgtggtcaacgagggtaagtagagtccttactagcccgactcgtcccggttctccgtcggagtctgatcatgtctccttgattaaagcactgaacgaagatggcacatatcgcaccaacatcttctacaccaccatgggcgaagcctatatccccattgcatttgctgctgccgcagctgccgatccagacgtcaagctctactacaatgactacaacctcgaatacggcggtgccaaggcggctggtgcaagagctattgtgcaactcatcaagaacgcgggcgttaagatcgatggtgtaggctttcaggcacacttcagtgttggcactgtgccgagcaggagctccctggccagtgtgctgcagtcgttcacctcgctaggcgtcgaagtcgcgtacacggaggctgatgtccgtatccaactgccgacatctgcaacgacgctggcacagcagtcgacagactttcagaacctggcgggatcgtgtgtggacacggccgggtgtgtcggattcacaatctgggactggacggataagtacagctgggtgccgagtacgttctcgggttatggtgcagcgctaccgtgggatgagaactttgttaagaagcctgcctacgatggcttgttggtagggctcggcggcaccgtaactacaaccaccaccacaacagccacctctaccactaccagcgccacagccacaagcactgcaacctccccgcattggggtcagtgtggcggtattggctggactggcccgacattgtgtgcgagtccttggacttgcacctatgtgaacgactggtattcacagtgtctataggcggtatagtcgccagaacgtctgtgagtggttgaataatcaaaccgttggatgacgaaggtgggaaggatgaatatgggagagaatatattagcgcatccagaaatggcagaaatttgtgaatacaacactagggtgacatcaatttcgtacactctgcgtctctagtgtacaactgatcatatgtgtagttgatgtttacatctcacttgtgtatacacattgtaggtaagaccactccactgtgttccgatataccaataaaggaccacatgcacaatcgacgtcacatcttaccgccaagtgtcactctcagtagccgttgacactccacagcttgaaggcacagtgtacgagcgattagggtcactttcccaaacgatcgagccgtccgtctccttgcggatgtacttgtactcaaacgccgtcccgcccgggagattgatgtccacataccagaggttgttggaggaggtgttcttagaggcgctgagggcaacggcactgccggtatcccagtttcccagctgggagatggagcctactatgtacacattttcaccgtaggtagttgtggcgatcacattgaaagtcacggcaacggtgcttggtgttgtacaggcggtggtggtgctggtggtagtgctgctgctggtggcagtcgacgtagccatgatggtcgtggtcgcgctagccgacccgctggtcagggtgctaggccaggttgtgacggtcgcggtactgtaagttccagttgcagagcccgtggaacaagatgaggggagggtgtttgcagaggcggcgtcccatgagggagggacgacgccgttacggcgcatgctggccgtcaggagagcagcgtacgaccaggtcagatcgcgcgcggatacgcaggtgccgtatgtcttgtcgaattgttcagaaagggagccgttagccatggcgtgggccttgacgatgctcacgtagccatcggcgtacgtcttgactgcgtcgatgatggccgtgaacgcggagctccccgaggcgtaagtgcctacggcggccgagctgtagatgtccttaaaaaaagcgagagaggtgctcgtgatcgagatggacctagccttctgccactggtagatggcatcgtagagctgctcggctgcggcgagggttgtcaaaaaccaggggttaccattgtagtatgaatcttcaggatagcgaccggctgcaacagcaacgccctgtgcgatgcctgtattgagcgagtacacggagcggaacgagtcagtgtataccttgtggttggcgagggcacgagaggagcagggttggaaagtgatatcatcgcaagcagcgtcggggtcgaaggtgtgaatgctggccaggacggtgttggcgtccttgccagatcggccaccaccggtattggcattaatatatgagcctgtccagaaattctgcatgtagcagaggatctgaggggcctgtgaatcacaccatggacaggaggctcctactgtgcgggcaaaagtgctcccctcaacgagcgcactatgcgttacgacgactgtgaagaatgacattcagtctacatgttaacatagatctaattgactgaagcactgtagcacaatttatatatga

SEQ ID NO: 1694 - DNA, 3339 bp, Emericella nidulans
ggcgtccgcacgtgctagatattgagccaaccagacggcaattttcagggatatcattgccttctcaaataatcattggcttgctgggcgggtcctcaacaacagccagaagcgaattggtgatgaaaaccgactctgcgcccagagaccacgactctggagatcggctgccctatcggttgagaatcttaagactttcagggtttggcttctgactctggtatgatttgttcgccttctggttgcgaataatatcattcttttcctattttctcttggcccttatgcgatgatatggccccctgctacaacagctaatcgcgagtctccgtcctgccgacaaacacgataacgatatcgagctgaggtattgcatctgcatggtgaaggccccgggtatgtcgagacagcgctaaaccaaaagccaatttttcctcacgcccactctactctggcccacgcgatcatcggtcagaatccgctatcgctcagaacggacgccccaagcaatcgatttaaaatctacgggactccgctagttcgcactcgcttgatactatcagtaccatgctcaatcacgagccctccgcaggatgaagttcgccaagtaagtaggctctttacttaccttacctcttgcattgacgcgttgctgatctctcggcgactggcagagaattggagcacgagctggttcctgagtggcgggctaaatatctgaactacaaggtgagcgtttgccattgttgctcttaaatgttcagccagagaactgacgttagcatttctcgctcagctcggaaagaaaaaagtcaaggcgatagcgcgcgccatccagaaagcaaatcgcacgccgacccatgcttctctcagacggcctacagttggagccgagttctcggatactccagctggttctaaccgttccgcatcattttggcgggcagaaaaacgagcggaaggaggagaggcacagaacagtatagcaagcccgagtcctgcctcacggtcaacacccggtcaacgacatgagcgacaacccctgcgagtaccaggttctcggttttctgccgtgcatggaagttatggaagcattatcgcatcgcccccgcagcacccgggggtgtcagacgccgcctcgcttgaactgcccggtccggcactggatgttgacgaggattctcgatactcagacagatacatggaccgcgcggtatctcctacaaattcattcgccgtcatgccacgacacggtatgaatcgaaccgtttccagggactcaactcacctcagtccgtcggcggcaaaacagccggccccggtaaatgtcgaacccgagaaaaacgtgacttctggatcttctattcggagaaattcccgtctccttagtcgtgttctatcagcaacggaggcaacagagaatcctgtagaggaccaccgctctgaggttgagaagaagcaggatgagttctttgcttttctcgacggcgaactagcgaaaatcgaatcgttctatcatatgagggaacgggaagctactgaacgattgaaggtgcttcgggaacaattgcacaccatgagagaccaacggatacaggaagtctttcatgtcaagagacatcgaaccgaggggtttgagcagcagcagtcagaagccctaagtggtctaaatggccgccgcatcaaagctgccattacgggtcgccgaatcggaaagaactccaaggcactggcagcattggctacccctggaggcgagcaaccccaggacagtgatgttatcacaagacgcagggacttcacgcgtcacccggtggaggaccagcaactaccgaaatctgaagtcccgtatcgatcagcgaaaagaaagctgaaatatgcgctgcaggagttctatagaggcgtggagcttctgaaatcctatgcctacctcaaccggactgcttttcggaagatcaacaagaagtacgataaggtggttggtacacgtccgtcgatgagatatatggcagagaaagtcaacaaagcctggtttgtgcaaagtgaggtgactgagagcttgctagccaccgcggaagatttatatgctcgctatttcgagggcgggaagcgtaagatcgccgcctcaaagcttcgtcatacggtcaggaaagccggtgattactcgccaaacacttttcgctgtggtctccttgggatggctggcatcctatttgccattcagagtctaatatacgcgagccaccacctagatgatgatgaactaagtcgtcagacgagcttattactccaggtaagtttgcgtacgcctgtttatgctatgatttcaatcgctcacagcggccagatctatggaggatatttcctaattgttttccatttcttgctattttgtgtagactgcatgatctggaatagaactaagataaactatgttttcgtctttgaatacgacactagatccgcactggattggcgccaattggccgaggtatgtttactcaatgatacactttttcctgatattaactggcgacagataccttgcttctttctttgcatataaggcctatatatgtggctgaactgtctgacagacaatgccatgtacatttactgggctgtagtccttgcaggagccactgaggctgtgctggatctgccgttacgcgtactataccatcgaagacgaaaatggtgcgcgaattataatgttagacaacatgtacgtgatgcgctttctactgctgatatggttacgtggcgtcatctactggcagctttgtaccagtgtgagtgtcgggactcttatttggctgacatgtactggaatcagacttatgcattgagcgagagtgagtaaaccgtgaatcatgtgcccacagagcatcacccattttggaggatgatttttgcgcttggaattttgcgaagggtggggggcctgttcatccatctcattagtttacttcagaaactgggtcgtatccactcacgcgctgtattttaagatcctccgtttccggccttgaaaaccccagcccgttactcattcttgaggttggagatctgtcggggcttatttatcctttagattacgataacggataccaatcaggccctataattcgctgtaactaatatttttgtgttacaatttgatttgactcaccaaactctgttaacttgttctaagagtttttccactatatttctcattaagtctattttacataatattttgtccttcttatttaatacttattcatttttttatatttatatatatttatctattattctattctttaccttttttttatttcttctatatctctt

SEQ ID NO: 1695 - DNA, 10393 bp, Emericella nidulans
gttagtttcatccacggagcatctcatatcaccttgcatctggagaagggtctggactggcttcttagcctgggtacaatcagcgttccttctaggcgagcctgggaagtttgcaacagcatctacaatcgtctcttattcggaccgggcccccgagcgtccatgctgtcggacctgcgcgttttctcgcctgaacaggagtcgcgtagctccacgatgacttctccaaccgccatgtctccagcctatgaagcgacagaattcaacgaaggaaaggcatttggcgaaccgttcccgaaacttccgcataacatgacggtccatccttccatccagacgccctacgatgacatctcgctctacaagaacacaagttaaggcggtatgaataagtcgtggtttcattctattttaaatgtctggtagcagcctatggacaagatcattggcggctggaagcccatacgcttatcatcgcgtatgcggcccttagaatgggaaagtgaaggtttaaatcactttaacacccccaagaaagccatctccgcccaacccgaatccctgggaccagccctggggagactttctcgccttggcgatcttccagaacagcgaaccctataaggataccggggtagcttacattgtcagggtagtacagcacgcatagagcttacatcatatacaccgagtaaatcgtccttgtaaacttttccgtccttctggataagcagccacgttgtgacccattcgaagaaagcggcgccccactgcaatagcacgttagcatcgcctatgcccaagtttgatcgaagaagggatgactaaccccaaacggatctgccgcacaccggttcccgtgcatcatattaaacaattccccaaacgtcagcgctccgtcctgatctccatcgtacttggcaaacatgtcctctaaatgctgcgggataaagcggccttctgcatcaaaactaccagagtcggatccatgtttcgccttgtagatgctatccacgtaaactctgatacggggatccgggagaaacgagtgcgcgagccgtgtcgggtacgagaagttcagattgataatcagtatcggcgaggaaggagaagaggatgttgaagcccaagtcccggaagccccggtacgtatcatatgggtagatctggccgtcgcggtcgcggtcccagaagaggatatgttgttgcatgggtgtcttgctgctggttagtcgcaggctggtaaaagtgaggaagaagggagtgaggcacatacgtattcatggaaatcctttatggaggtatcagaggtagcgccatcgacaacattgcatcgagcaacgccggacttttcaattgagacatttgttgctgggaggcgcttggaggtcacggcgcagtgtttggatacgatggggatggtggtagtgtctttttcttgttcttgtttgttcctttccttgatgttcttctcagtgtctttgtcggtctcttctttcgtaggctgggaactggaactggagttcgatcgtgaggtattagggctgctatccctgatagaatcggactggaaagacgacggtgaagtcgagttcgagctgtcggtttgcttatcaccatcaccggcaccgttcactagagcctccttgaaagactttgtctccggtgccttggcctctggctccactggctcaggcacattcgagtcactgggctttgattcgggcgccttaggctccaatggctttgacttcgaagccaatggcttgacagcctttggcggtgcggtggttatatgggaactcgcaggttgggacgatggcatgttggtgatattgattggattctggttccgtcttgaattagctcttgacaattccggcgagtgcaggctgtaagggatatataccctgcctgggctagccattatgagtgacttgatttggaaagtcaggactcaggtcggtgggggccgaccaggccagccagctacgcgattatgatgatgatgtaaatacagaaggatataaacatgtgaaaactggatcagcatgtgaagaggcagacagaccctcgtatgagatcaagaatagaaactggattaacttgattggaagatgatagtcccacattgcatgatgtcatagtctatgtcatacatcatcgtgccctaattcagccaggctccgcgagcacgcaaccccatcatagaccccaaccttacccaaggacaagagagcctatcgtaactcaaataaaactagctcagtgcatgacaccctcagccaatcattggactcgtcgctgctgaggatcgttatcgtcggagttcttctccctcagtagcatggcgttcaagacatcgcaggtagatctcctgattattggcgccgggccggcagggctcatggcggcctgctgggcgagccgatatgggatgttgacgcggataatcgatgccaaagagcatcggacagagaccggccatgctgacggtgtccacagccggaccttggagatccttgatagttttgggatcatggatccgattatgcggcgaggggtccatgaggttgagatgagctattgggtgagtgtcaatggcagaggagccgtagtaggctaattggagggacggcagggcgtcaataaggagacatcgaggctcgaatgccagcaacgtgcgcgctcccagccggagggactatcacgatttggacagatgctgctgaaccagggtgaggtggagcagattttgattgattatattgagtcaaaggggcgggtcaagatcgagagacagaggcgtgcggataagatatacttcactgaccacgagagtcatccagtaaccgtggaaagcacgactcaggggacagatcgcatgacgcaggtactaagccctgaagacagaacggacgcaacagggaatgcccaagtcacagagctgatccaggcgcggtatgtcgtcggctgcgacggtgcccggagtctggttagagaacagctcaaggtgccgatggacgccgaatcgaccgactccatgtggggggttattgatattgtgcccattactgactttcgtatgcctgcaacatgttcaaaaagtgctaatctgacttttggcagctgatatccggcagtcctgcgccattcactctgaccagtacgggagtgtcatgactgccccgagagaagatcggttggttcgtttttatattcaactcaaaggggagggtgacctggataggaaggccatggacaagacggaagagtcaccccatgctttgatccaaatggctcaaaggataatgcagccttacagtctgacctacaagtattgcgactggtcgtcgatatatcctgtatgcttccatgctggccgttgagtggaatagacgctgacaatataaagatcaaacaaggccttatcaagcagtatcacgtcaacaaccggtaggatatattggtcatcgaggttacaacgctaattcattcagtgtcttcctcgccggtgatgcagcgcacacccactcgccaaaggccggtcagggaatgaacgtttctattcaagacacgtacaatctgttatggaagttgggatccgtgatcaccggcgtcttgagtcccgagatccttgagacctacgagcttgaacggcatcctgttgcgcaggagttgatgaagatggactctaagctggtccagacttacgagcaaagcaacgcgcccattagcgaggtttgcaaagtacgcagacaattttcagggtttatgtctggagtcgaggtgacttacgggccgaatgtcctgatcgcgtcaaatgagctcggcgagaggtcacagcgtgcgaggaatgtaacaatcgggagaagattggggacggttcccgtggtcaaccaggcagatgcgtccacgatagaacttgcaagagccctgccgagcaccggtgcatggagactgcttgttttcccgggagacttacgacgaaaagagaatgttaaaaagctggatatatttacagaggcattccagagtcatgcagaatgcggcaactctagcaatgtactggcagcagtcattcagcggatggtaattgagctgattctgattcataagagcccaaggacatcggtgcgcctgctggacttgccagagctgttccatccgttcgacgaaaacctggggtgggactatggcaaggtctttattgatgaagggagcgcttacgcggaatttgggattgatgaacaaattggctgtgctgttctatgccgcccagaccagcatgttgcttgggttgggggattggatgaggtctccggtttggatgcatatttctccgcactatccacgtagacttgtaaagaagacgataaaattcttaaaatgtgtaaatatgatcatcttatttgagcagggcaaaatttgcatgagaagtattggttcggcttttgcagttgcttctcgtgcccttgtagagacctccgaagctgttggccactagacttgagtcttccggtagcagacgccgtcattcccacttaagggtactctctgcggttggcacatatggcttgagaaaaaactggacaccagtatcactgtcagacaaacccgcggtgttgccagacgttgtggcaattagcgcagagtctatatgcttagagtcacggggttaacatatcctctcagattgcgaattacctccagacctgatatgaaaagtgattgtagtagctacctgtatgcctctccatttacgaaacccagactagtggtgatgtctacaaaaaaagcctaatccggccagtggaaacgccagcagtatgcaaatcatgaagataatctgtagggcaaagagggccttccagcaaatacaaatattgactaattacggatacgacctcatcagctatcacaacaactgcagcggcctgccaacgtgaacgtggaaggaggaatctgaatatatgcgcagagacagtactcaaccccttggagtcaaggattgactaaaacaactggatgggattgcataaaaaattccctacctactaagtgacacgatataacaacatagaccaccagaggcctctcacgatggtttaaagacagtactaacattctcaacctctccgaagtcagctacaccaaaaagcttctccggtaggggcggcggagtcttgaaatgaggctggatgcgctttgaggactccaaaaatcgctcacgcagctcgtcccacgatgcaccggtaggcaggtcaacgagtttgaaatccttctttttccattccccatccaccaagacatgctctatatctccggagctggcgtgtagtatcaccgctgctatggggtcgctccaacctagcatactcgggctatcgccattgaagatgacaaggtctgccttcgctccgacagtaatgacgccgatatcgtctcttcgtagagcacggcctccctgtcttgtgccaagcaggaaagcctgctccacggccatcgggctcgcctttggtatcaggccagctgcgagggtcttggtgtagttccggaaccgtaccagctgcagccaaagccgtgcctggccaacaatatccccagagaaattccagttcgtgtcaacgcccagggatgcctggtcggacacctcgtggccggtctcctggccctgcccgtagaggcattcggattcaggagtgatggagataaagacgttatgcttacgcatgaggtccttgtctgagtcggtaagaaaggatgcatgggagaaaatgatcggaagattggcctcatggatgttattgtcagcgcagactgtggtgggggatgtattcatgggaggccacggtccaccaagatggtgcatagtgagggcttgcaagcccagcttcctgctgcggttagcatcactctctagcataatgattgggaacatactcctttttctcacgaatgagatccgctccctttccatcgccgttcataacagtccatgccagcccgtccagggctagcccaggcaggacgcggggactgcttttatctttgatgagagcgccgtaagcttcccactgttcgtcactagaaaatccctccttatgcctaacatcatagcaccaccacaccctcgccccgctatcgacagccgcccggtagcccgattccattacgggttctgaccagttgctgtgcgcatgttcaacaaaggacgtaacacccgcattcagaccttcaacatacccctccacagagcttatgtaaatgtcgtctggcgtgaacgcagcctgtgtgatctccgacatgtggctaacccagccaaagtactccgccagagtcgtgtcaggtcccatggagcggtagacagtctcccacacatggacatgtgtgttgacgaaccccggggagacaatcttccccgagacatcaatggtctcggttcttgacggagcagagagatcatcgctgttctcttctatggcggtaatacggtcatcgacaatcaagatcgaagcgcgctgaagtgcctttatcgactgcgtggatgcgttataggacagcaccgtgccgtctttaagtatttttggagccatggggtgagcgctaaaaggcttgtgataagtcctggtggtataatggaactcccggcaactcgcaaaaggataaatagagtgaaattaacgagctaatcctaatgaggaaatgcactgtgttccaaattcagggtttgggtggaatcgaactatctatgctctgattaaggcaaatgttttactttatacttctgaagaacccaagaatcagccctggagtccggatataatagctcgggcccgaaaaccctcatcttgatgtccgactgggggcctaaaggattaagagagattagtaattgatacaatccagactctcatcaaactgacagccttatctgcctcgctggctggagtggtggcatcggactttgcgacggactttggaactaaagtccagagaaatctaagaaacgttctatagcagttggggacgagggcattatagccctacaggcagagctggtctaatccagggtatggtgtgtaatgtagaggatctcgtacggattatattcggctctacttcagacggtcctgatggccttggtataaatcctagtctcagcaattctggcaggatggaagtaaacactagattctgagctctcgtccatgaaagcatttttcgcggcttagaccaagcagaggggagaactggcttgagctgcctctctctctcaccctcgatctgcttgtcagaacgtctagctcttagcgggtcagagactgttttccaacaatcagatgtatacacggaaacactgggataaaatcatgctcgataggctcggcgtagctttggtcagacgagagcatcacgcaccggaccgccaaacgtcgtccgcgagcagtttcggcgagccactcatggtttattagtgtaatggttcggtaaagagaagcagcgaagcgaagtgcccgataaaccaggcttcaatcaagggagagcacaaacagccgtcagggcctgcagatgtcaatttggcattgcagatcgctggtgcagcccatcgggggctgagtgatttgagacctaggtagacttgaattgcagtgggaactagtcgttcggcttctgcagctccacgtcgacgcatatggcggatataattgacacggcttgaggatggtatctgaccttggtgcaggagagaaagtactagttgtagaagtaaagtaacaactccgtgacattactacctactacgtacggacgcacttcacataccggccaggtaaagcagatctgactcgttagtttcaggcgtcaaatggttgaggcagggtaaactcactatactcgctttcagaggcccaaaagtccaccaccttcagtccagcgctcccacataggttctttcggtcatccgcatcatacttgtggctacgaacagcgagcagcttatgccctgccggaatatccactccgtccagggagacatcggcgcgggtgatatagtactggttatgcgccccgctctcctcatcccaagcaccagtgacatcccacttgtccagatcgaaagcctcatgcccgagaatatgattcgcgcgcactaatccgttcttaacaaaccggtgattgatcccgtcaggatcattgtatgcctgcaggacctgcttctcgttcttgcatccgtctagaccgagtaagaacgacgtattcggctgcgcaaaactagccaggaactgcgccgcatccggcttctcgaaatttcccagcgtcgagccgaggtataggatcgtctttggacgtgactgcagatcaggatgctggagccatttccgaccgctgtcataggtgcccagcagcccatagcagcggacctgctggtagacgcccgccccgacggggcggagtgtgcgcttgagctcagggtaggagacgtcgagggcgaaatagtctaccggccgacctagctcctcgagcgcatccagcagaatcttcgtcttgcggaggtttctgctgaaagtcaataaaaggcatccgtagaaaacagtgaacagtgggcacgcacccgctccccagctcgaccagcatgctgcccggctggatgtgttcggcgatttgcaggctgtatttcttcaacagaccaatttcctccctcgttaaatagtacgatgggcagtaggtaacatcctcaaaatagcgcagcccctgttcatcccagaggagcagatcgggcagcgcggcgtcgtcgctgtggatgctctgctggagagacacgcgcagctcgacatccttcttgtcagagcggatatcgatgatctgagcgacagaagaggtctgggatggatgcggcttaaccgcaaaacgagggacagagacgctctcaaacatttcgatggattactgctactatagagggctaaccgatgcttgctccttatatactctaaatgctaacgtcgcgggacagagtccaccgcgttgaggtaagaatgatccggaatgcaaggccgacgggatgctattccaggccggatcattggatctagagggtggaagtaaccttaaaatgatggatgagatcatgatcgtggactgatgacaggtggtgccggcccgtggctgacgtcaagattgccctatccgtgccctgaatctatacatagcttacgtacattcttgccaagtttctccaggaacaacgttcaatcaatgcccctcgcttaaagcctgtttccgggacttggatcgacggtccaagaacggcgcttcccccagactgcatacccgatcaccagttcgggtctccgcatagtcatacgtcgcgcagtgccaggtcgaccggttatcccagatcgccatatcattcttccgccatttgaagcggacctgtgcatcgtggttctgtgtgacaagctagttgaaacagtcttagcactgagttggcgataaacgctgtcttactcacattgaagagatactgcagaagcacatccgactcgtccttggtcactccgttgatgcgcttggtaaagcctttgttaacatagactgatttccacccggtaaccgctaaaaacggtcagcgatgggctagtgattcttgtaaaggggatacgtacggttggttcgaatgactggatgaaccgccgtaagctcctcgccgtggttcagcggcgaccctcgaatccctttccgcaggggattgcccagccgtcgcgcctcatcatggaagaaagtagcatcatgggtcgctgtcaggcgctctagaaaggccgccatctcaggcgacagacggtcgtagacctcgtaccctgatgcccatagcgtatcgccgccggtctcggggagagtatggatcttgagcatggcgtagtcggacggaactcgctcgaagctgatatcgctgtgccagccagcagaagcaaaccgactgacatcgctcagctggtgcgtgaggccgccgcctttcttctgcttctcgctgctgatgacgctgatctgatcgcccagttcactgccctcctccgtcagcgggtggacatgaagtccggacgattctggctgtagaaaagtctcagctgggagcaaaaaagcgcaaatgggggagtgaagctcacgcagcctgccaattgggtcaatctctccgcaaactcccgcatctgctgaggcgtcacatcctggttccggaggaagactactccgcgtgtcgagactaccagaattagtatgacaccggcggtccgtaggaccagagagctcttactagtaacagccaggtcctgaatcagctggtcgcgttttggcgaccgcagaatttcgacgatctggagcccttcatact

SEQ ID NO: 1696 - DNA, 2352 bp, Emericella nidulans
tgataacgaaagtagatggcggagtaggtatgtgttttcaaggcccgtgcgaggaacagagaattttgtggaagaagggcaggcgctgtcgtaggcatctctgtatgtgagagggtctgacgaaagagaccaccgaaatggctcgttatccacgcggcacgcggcgcgatacaattcggaacagttagctgtgcgccattgaccagcaagggacaggtccattacggcgcaacgagtgtcatcggattcggcagagtcgaggtcgtgggagggggctgcgggttcgcccagggcccatgcccaagaggatgacagggagagattgcggtacgggaccgggtcctcgtccgcagtgttgccgaagagggtatcgttaagcgtaaaggccattccacatgccgtgaggtttactaccaggtctgagatggaccggagggactcctcgctggacttggaggggacggggatgtggctagacattgcccaggatgagttgacttttgagatgtccgtcgtacctgggttgtatagacacccggaatccagactcccgttgtcacctgcgtcgaccgatatagatgaagtcaggtagttgggaggaaatataacgtcgttttctgcagagagatcgtggtcgctcagctgcgaaccaaccgagccatactcaataagcagccgtcggtcagctgctagctgtatgaaatttgcgcttggccatccatctggcgtggtttgtataccctccgggccctcctcaatggtgaagtactgagtaattggtttgttcgattcatctaccgcataccacgaaacattcaggttacggcggtcctcgagaagcctggaggggccgtagatgtatgacccaagcttatcattcaggatatagccgactcgttctgatacggccggaagctgttcgcccgtgacagtcgatggtgactcctcggctgaagtgggatcagcagcaacatggagattgagcgacagatatctcgtatatatcaccagatttgtgttggtatactgaaagtaatcactaaagatatctatcaagtcctgcagatccaagttatccgagcatttatacgagccaagatcatacagcagcgtatccgacgagtcgagctccgctgtgacagtaccttgtgcaaccgaagcagtagcagtggatgtagcgtccggggatacggtcacgacatgcaggcccttaggaatcgaaacagggcataggatccaacgacggagctcggttgaccagtatagatcgatgttgaagcgccggtagccgatagccagcaaattggagatgcatctctcggctgcattccgggcaaacttgttgtcgccaaagcatgctgcccgcagcgagatagcggatgtggtgacgaaatttattgggacttgtccggctacatctctttcgctctacatggtaatcagcttgacatcccgacatcgcagctgcggagggaagaataaccagaaggacggtagcccaggtagcattcaaaagagaatcatccggattaaatttcagggacatgaagatgtagaatattcgatatgcaaaggagcaagtatcatatgcattgcaaaaagccccgttgccctccgtcgataaagatacggtacgcgatcgtcgaggtggagagcattctgcagttcgcgctcaagggtctcgcggagtcaaaagccgtgagagggctctgatcgctcttatctggccacttccttatttccaatctcacaatcagccagtctcccctagactccgtcctacaatccagcccgtttattcgatttttactttcattaattgaccactttctccataatggccacccccggccagcctaccccccagcagctagccgctatgcagcagcagttcgctgctgaggcggccaaacgaggactgacccccgaagagttcgctaaacagcaacgtgagcagctgaatgccgaagctgcgaagcacggcatgacaaccgagcaatatgtcacccagttgagaatgcgtgcaatggctgctcagcagaaggccgccgaggtccagcgacaactccaggccaacggccagagccagggacccccacgaccaggacagcccggccagcctggtcaaccgcagacacacacgcagcaggttcctgttaacccaaacagtcccaaagaccccaaagcgttcgcagtcgcgcaattcctaagatcgcagaacttgaagccgaagacgtgcatttggatgggcaaaggaaggacatgtcaaggggttggtaatcatcctctgtggactctgggtgccttagctaatctgggtaccgtctagttaaacgtgcaattcgtgccctc

SEQ ID NO: 1697 - DNA, 3980 bp, Emericella nidulans
actttgagctcatgttgctttctactatttttattccgtattaccgctccaaacaaaacagacctgttttctaccgctcctttgcaaacaggtagagattttccccccttgatctttaggactctcggaagtggcgactcatcccactgaatggccgaggtatgactacccatcgccctcgtgtgagtcgagcccttgtgttgaccggtccgctcattccggactgggccatcagcttcgaataaaccctgcttagcggtggtaatgtatgcagtgctgtgccgcaatgcaatgttgatataactgagagaagctcgcggcttggggtacgatttgtggttacaggtcagccggggtactggtttcgctccaattttgtcaaccggcgaacgctcctccttactaatcaatatccagcaccttgctcgtccaatcatatgatgcgatcgcaccgccataggcggactacaactatctatatgaactgaactatctacagttatcgagaatcttcttctctgaagctcttgagaagctataaattgcctatatagatcgtagttgagagatcaggaccttcaatataatcgttcgttacagatattgattacataaccagattgacgctagtaaccacacctccataacccacagatttccaccatctgggcttggcgatcctgacaatctcgcgatccgccaatcactgctcggtgtttgtagggccgttccgaaccctgcctgcaaatgcaggcgtgctgtgctgcaacaggtctggcccagtccgttcttcgtgcaataagactttgtggggctgggtcaggctctcaatgcccaggggcaagcgagggatctgagttcttcccatggcaatgtaggtggaaccaaaaacttcgcctttttttggtctagtgacaggagtaatatgattaattttgtttggccgacaatgagaccgcagacgctctcatactagctttacagatttttgcaaacagtctaaagttcatatcaataaatgctcccctggatctgggtttcctaaatttcttctttaacgtgcaccttcattatggaagcaacctcggccaccagatatggcaaatgcaggggttcacccgttctgagtgcggaggaaagcttaacagaggattgtagagtaatctccgttagtgggctgtctcaactcacccattcttgtttatcccgttgcttcgcaggtactgaccggggtagatactgcctcggcgcatccttggtctcggctgcacgcagtttctcctgtttaggataatgaacccagtgactcgacctgaaggatagccaatttctgccgctggctggtgattgtgctcgcggcgaaagtatttgtggctgctgttagaacttcaggctaattttctccactgttgcgattatcggcgtccctaagaagggtggatctgggaactgcgcggatcacaggcgagccgagccgttgtgcatagatctgatgcattctccaggcttgggcacgaacattcctccgacggcatcactgtttcttatggtagtgttcatgtctaatgtgtgaatgggtatagattcagggtaaactgatgcaatgtatgctgataggtttacttcaatgtgaggagaacccctgatcaccccgctgctctgttctgctggattgaggtcagaagactccgcgggcaagggaacggccaggagtctctacacacttaggcccttgcagttggacagaaacgggattttttttgggcacccacgcgagtgtggcgcttccatggtggatagctagctcgatccgaacgcaggcacgtctggcggcgcgcacctgcagtcagggtctgcgccgcacactctcggcaaccaacaagtcttccaggtttgcgagcctgattcgctggtctttactagcctcgtgccagtgtaggcattatatcctagaactgcatgcaaaccccttgggacttctcggactaaccggaggagacacagggcaggtcctgatgggactgcgcttctgaatgttacgccccccatctgagacatgcatgagagctgccatcgaaggatcgccaccttgtaagtcaatctgacttgtcggcggtgtcggccgggtgctgtaataagttgtcctaaatgtgatatctccagaaattggtataaaaagctccttgggtgatcggatcaaggagtggccggagagagcaatcaactgatacaatccaagacctcttcttcccgtcgtggctcagttattccaaagcaataatggtaccgaaccctgtcttcctcttgacactggccctgagcctggcaaagacctcgctcgcggtccgcggttactcgcgtcgagtcgacacgccgcagctgccgtttgaccccaataccactccgtactgtacgtggtggattgacaatgatgggtcaagctcgtgctcggacatcctctccgactggattatctccctcgatgactttaggcgctgggtgggtgctcccctccaccgatatgggggccttcgattggcctaactcctctctagaatccatccattactgctggttgcggcgggttagagacaggaaagtcctactgtgtagaggcgtggggagagcccgtgcctacgactagtacttctctgacaactacggctgtccccataacgacgactactaccaccaagaccggaaacgcccctggccccacccagtcgggtcaggtcgagacgtgcaaccgctgggaccttgtccaggacggtgatacctgcagcgtgtaccttgaaaaataccccggtctgtcgttggcgaagctggtggagtggaatcctgctattgggagtcagtgccagaacctgtgggttgagacatatgtaagaaacttccatgcgtccccgtacgcggaagaagacatacgttgctaacgagcatatctagctctgcacaggcatcgagggatggtctgcacctacgaccaccacagctacgactactacctctccgccgggtaacgggatcccaaccccaacgcctacgcaaccaggcatgatcgcggactgcaacgcgttccatgaagtgaaatctggcgacacgtgcgcgaacatcgcccagagtgcaggcatctcggtctcgcagtttacagcgtggaactccggcgtcgggacgggctgcacctcgctgtggctcgggtactttgtctgtgtctcgcgagtgggtgctacggcgacaatgactacgacaaccacaagcgcgggtaacgggatcgccacgccaaccccaacactccccgggatggtggcgaactgcgatgctttctacctagtgagatcaggtgacgggtgtgccgcgatagccagcagcaagggaataagccttgcgcagctttacgcgtggaacacgaatctcgggaccagctgcacgggcttgtgggccgagtactacgtctgcgtgtccatcgtaggtgtgtctcccactacaacgacgaaaacaaccacacggacggctacgactacgagaaccaccacaacgcagggcaatggggtggctacgcccacgcctatccaaccgggcatgacgacgtcgtgcaagaagttccacaaggttgtctcgggagaccagtgcggaacgattgcctccaaggcgggcattacacttgtcaactttctgcggtggaatccaggtgttggcgggtcagcttgttcctcgttgtggcttgggtattatgtttgcattgctgtgctgtgattcattgcaatgtttttctttcagttggtggggtaatgtttgtacctatatatatactagcaggggggaggggctgggcatcgcatactatacgcacagcgtggttgcacacctcttaagccgaatccgaatactccctactcgcctacgtaaaaaacagaatgcgacagggtactgccgatggtccatgtagtaatgaaattggcgccttcctgccgaccggcgtt

SEQ ID NO: 1698 - DNA, 4384 bp, Emericella nidulans
gcccacagtcactccaagtatcaagacaaaaccaggaggactatgattcaacttccggagaaaaatagtcgacagacaacaagacgaggatgcagagaatgacgcggggtggcggggtcaagagtggacaagagtgcgggatttcaacaacgataataatgattttcaataatgaatgatggagaagaggtgagtgagaaaatcggagaacgaggagctaaggaagtttgcgggaggggacagtcggagtgcacgacccgatcgggttcggcgggctgcactgggctggagagatcgaggaggggtcgattctcgattctcgatggcgaattggctggattggtcaatgtgcgtctcaagaagaatccatggcagaagatatactttggtgcagattcagatgtatagagagttccaataaaaggtgatcagagcaactaacttgtgaaccacgaaggggatctggaactcaataagaactgtgccggtgggcggcaggaggcaaacagtcagacaggaacacagcagaaccacagagaatccatgaaccaaacagtgggaaatcgaaatcaaagagacgagaagaggacgagtggcgtttttaagaccagagagctgactgactgtgtcgactggcgcacttgtgctgaaggcgttggcctcacagttggcctcactacgtcgtgaaatttacttttgagttatggcattgtatccttgcggcgggagaattgcgacagtaaaaatagtacggcatccagcggtcagcgcgtctttggatcgtcttttcttactcagaggccgtctcttgtatgtcgaatgtcgattcagcccgtgcaaggatcccagattattgggaatgcgaaccggctagaggaaatcggcatgttggaagatgatccacggtcgacgccgaagctgtggagatcctaccacaccctcgacttcctctcggacgacggaggagaggaaccagcgatgccatctacgaacgtctactgagttcaggccggtgtctcaccatctacctcgtctacattgtctaattgtcgacttcttcgacttctgatataggtagtcagaagacagtcgtgtccgggtgatagcaggaatgtgaccgcgccagatcccccgatcacacttaaggtcttaaccttgtggcacacgcggctgcaacaaactatatctgatcctggtcttctccccggttgctcgttaccggtgatactcgatccatcgagggttctgcagagtcttgactcatcggtgatgccgggacattggcttgttcaatgctcggtggcacagagtactcgaacgagacgtgatcaattctgtgaagatgatacagtgcatccttttcagcttggccctcagccatccatagctccccacgctaatcgtcgacagctgcatggcttcggagtacgcagcgcttttccaccacctcctcattttgtctgtatagaggaaggcggggtatggtccaccgctacgcctaccaccaactggccgttttatgagacttacggacagagcgaaatctacagcctgactcaatgcaactagtgcaactagggcaaatggccttgtcctactcgacgcggctttttccgtccactgacacttgtcgctcgggttgttgctcaaagctgagcccgaactgcagaatagatgtgggttctgagtggtcggaacttctatgcgcccagagactttttcgcaaaaggaatctcgcgacttgacatacggcggcttaccgctctttggaggctcctgattcgagaagacagtgatacccctcgctctatgtggactatggaggctccataaaggcgggaggcatactaagtttagatgatcagactctttgcgtcttcttgtcttctacactttctgcctgatgaattgtaacagcaacgctactgccaatgcctgatctatccgctccttcagactacaattcttgctcagtcaagcgtggtggttgcaccactgccaggtcaccttaccccaacaagggagaccaagatgggctgggcaaggtttaggttatgctttctggaataataatccttctgcaattattgctggctcaaattcagggccgtgcaccaagaagctagcgaccttgttctttgtgtagtacagagcttcaattctagaacgctatacagtaataatttccatggaataagcaaagtagtccacttttgatgtaacttgacgcattatgatgacctcctgcatggacggatgatgtgcagaggttctcctcggggaaataatgataagggtgaggggttcgtctgaaactcgaccccttcacatgtgaatttaaaaactcagcatcatacgtcaccaatctctgtgaatcccttcgtcggtataggtcggttcccagcttggaagatttttcctagtcttcagggttttctagtcgaaagggtaggatcggaagaacgttttagtagaccgttctcagcgggagcacgccagccacggtcagtcgatggtgtggtaataagcatcaaagaatttagatgacgtcattcagttcttttctgtagatccacatagggcttagggtagagcactaaagcacgtggctgaattatcacatgacttgcattttggaaaaatgaatttccgtgacggagattccggcgcggaaggaaagaggcagggcgttcatcaagcgtttgttactggcctggaggcggtaatactattccttaatccagtctcaaccccagccttcaccatgcctagaaagctacgagcagctgcacaggcagctgcgcaatcaatgagtgagtcaatttgctacgagttaactcctttatctctcagctcgccctttttcccctctgttattcaattctagttcggacgaggatagacacgactaatcgtttcatagagaatgtcgcgcctccacttggagatgggtcagatgaagaaatgattgaagcgcctccgtcgcgtgaatcgtccgctcccgtagtaccagacgaagcagaagatgaggaagacgcgaaggagggagagaacgcaggaaaagaagaacaagaaggagcttcttcatcgaaggcggaagaacccgataccccagcgcaacctgcgttagcacagggcgaaggagaggaagccgcagcaacacccgcacaggactctaatccgccgtcacgacccgataccccgacacacctcgaggctggccgcgtctcggccatccctcgaaaacgacgcattggccgtccgccaaagaaccgccctccggactgggatgcgccggctgacggatcgccacaaatccatgtgagcactccagttaagaggagacgtggccgtccggctgcgagtggagggcgatggggtcgaggccgcgggccgtcgcacgtcacgcaggtcccgatcgataaagaagggaatatgatggatgtcatcgatgatgaagtggctgttcccggcgacccagaaggtgacacgaaggtcgataagaatggtatactgcagggtggacgtgagtacagggttcggacgttcacaattctcaaccgtggtgagcgacagtacatgttgtctacggaaccggcgaggtgtattgggtttagggactcgtatcttttcttccaaaaacacaagctactgtacaagatcattatcgacgacgatgccaagcgcgatttgatcgagagagacattatcccccactcctacaaaggtcgcgctattggtgtggtgaccgctcggtctgtgttccgggaatttggggctaaaatcatcgtcggtggccggaaagttattgatgattatcaagctcaagctgccagagaacgtggcgatgtggagggtgagctcgctgtgccggaggacaagctccccccgccaggagaaccctacaacaagaaccaatatgtggcatggcatggtgctagtagcgtttatcataccagcacgcctgctgttcctatacctggtactggaaaggtggtggattccaagaaacggagggttactgttacaggagacaactggatgttggaacacgctcgggaagctgcgtaagtcaatttattcccaattctatccagaacggtttactaattatatacagcaacttcaatgccgtcctatcacatacacgccagcagaacctcggaggcgtctatgacattcacacgaacattatacactatcccaagattatgcaaccaacgcacgctcgttgggagagagtacctccttccgacgctcggggcgccaataaacttacgaaagaaatgtcaacgctcacgttgtcgaacggcgttgtcgaacaggagaacgctccggcagaaccagaaacggaaatccaggacagcaagccggccggagagac

SEQ ID NO: 1699 - DNA, 5020 bp, Emericella nidulans
ggtcctgttttagggagacactcaacggcagctaaggattgtattgaggtcgagaactcgccagcagcctttgttcagtccttttcgctgagctacaactgtatcgatggccttcatcaacgacttcagttgattctcaagcgcatccaggtaaatctttcggtcgtgaaaccactttaacatggttagcataatctcacgaatacgggatctgggatgctcacgtcgtcatgctcgatgaattttccgcctccacccacgctgattccaaacgagctaaacatacccttgctttgacccagatctggctccctgttctccttgttcttgatgtccacgttgaaagcctcactctcaaggaagattttgaggtcgccatcatgttggagtataggatgagcggcaattttattaagcatgcgctccagggctgctcttcgcgattccacgaagttggtatcaaatcggcccaccgcttgcttttcgggcggaggaggcacaaccacgccgggattgttactgtgcaaggagttatagagccacaggaaatcgcggtatcgccggctcacggtaaattcaggctgccgataagctttcgaagttgtctgcgacaaagtcagcgccgcgtctcctagatccctaactggagacaacagcctaccttggtcctaacctggtacacgatgtgactactggtcaaatcgccaaccttgtgcggatcaccgacggagatttcaaaagtcgggtgggcagctttctccacgctgacgctcggctgctgttgtctcttcgaggcttctacatcacttggcggctgcactggtggagggttccgaaagcccgtaccatcctcttccagattcactgaatccatcattccagccccgctggatgtttggcatgtggtggatgccgggcgcacatttcggcttgcaaaagcctccttctggggtggtacgggggcttgttcaaggcctgtcgggcttgttttcagcaggcttatctccgagaggacctagcggatcaatcgtgtcgtcaaccgcttcaagttttgtaacttgtgccgcgattttgcccctgcctcggggccctcgtcgtacgttcgaacggggtgtctcctactgtgttgattggtcttgggctgcgcagcgtgggagttagcatgagcccgcacatcagagttagactcggtgggaatgcacctgttccctcagtttccgactgagactcagcgaggttgttagtcgattgcgagggcacatctgcatgccatgtccggttagctatgatgatgcgactgtacggtgactgcttcgtactaaccgccccatggagagtcaccgccgtccaagtccatgactgactggaactggtaattcgaatggtatatagtacaaatctaattaatcaagaactcaaccaactgtatgatcaggataggaagcgattggaagctgtgcgggatggaagttggagagtcggagattccaagcaggccagattggttcaacaccgcccgcactgaagctagcaggcttccccgcttagctttaaggcatcatcatttctacattctactcggcgaaacgcaatactgaatcagatttaggttcctgtatatatttgtaaacgtcgtttttaagaaaacggcgaaacttatatttaagcacaggattcttaattgtatcaggtgctcaatctggtctcgagctgtatatatttatcgcggcgcatagctatgcttgaaacatgatatcatcagcccctggaactctatataatcactacagaatgaccgcaacaaccatcttcgcctcatagctccatgaaagttctgctaaggtggtagatccttccccatctatttgacccatggaataccaagcttatgcatctctacagcaagctgaaacagataatccagactctcacattgggtcttcgccttcgccacattgtcaccccatacgtagctataagcacattagcatatttaacacgaatgtggtttgggaggaactcacattccatgtcttctcacgagcacagcataggtatctgggtaggcatccatggccttctccaggcttcccgtaaggtcctcctcaaaagcagtgttgtcaatgatcggaatcctaagggtatcaaagtaccctagcattcccttgcctgggcccttgggtatacccttgatctgctcgatgttgctgatctcaaagcagccctcgggtcccttctcgcgctcaaccaggagggtcaccaggaccgcccactgggaatgtgtgtgaatgcagcagccagcgccgcgctcaaatgcggcgaggaacagcggggtacaagcggagggtttcagatcgagaggcttacggatgtacttgcgctcggagggggggtatttgggcgtggggtactgcaaaacgaagatgttgtgtggttgcatcaattccttctgtacaccagaaggggcgataaaaatatgctctccgcggcgaatggaggtctgggtaaaatagtcagtgaggtgtattggaaaagaagccggggcgcattcgaaatgcgacaggcacttacaccaccgccagttcccgtaacccagccccagttgtagaatttacggcagagctcagggatgaggttagccgggtgctctgggtcgtccgattggaccaggtggtcgttgttctgttgctgaagtccctgggacatggtgatgcgaggccgattggtgcgggtatagtgagatgctgacgatttgatatggctgtacgtcgcagggaaattcgcaaaagaacaagctggccttctaccctggcaggtgctgactctgatgagggaactgtttgaggatgtgacgaggtgagtgaggggtggaggggttatacagagtgccactacaaaaattgtcggcgattgcaaatctggaccccacttgtcgccttaacatcatcaagctgaccaattgcagtgctcaattcgtccacctttcttgcttgccgaaggttagtaaagcatatcgctctaataaattagctgcagtttgctttatgattcaaatcctcctatgctaaataaccgcaagagaacaactatgatcatttgacttgctaggtttagcggtctaactgcagtagggtctccttacgggcgaagcaattgaagggaaacagtatcgaccatacaatctctggggttcattaacaaacccatagaccagtcttgcggtttgagattcccccatggtttatttactccgtaaacttccccggattcagcgcaccagccgttcaataaccatattccaacaactggttgacaaaattaggtatcttttatcctaaagtatatagaaataataatctgtgacatcggtggacttcggactaatttcgctggagagtaaataacaaatgtctgatctgccgagccgacagaacattggagaagctgcactaacccgattgagcagcgggcagcggaagaggccaccttgaacttaacagcttcactgctttatattaaccaactgtgattctttctccaacctctctcccttttccctgctgtcctcttctgcactaccccggcttgacctgaagctgctcctgcttttcctccacggagggccaattgcctgaacgcttgcttgtttctttctcgctttcaccatgcgtctcaacacagctcttacctccgctttggtctcttcggcctccctcatgggctacgcccatgccgaagacgactcaaccgccgatgctacatcggtcgttgagagacctactttcacggtcagtccgatcgtatttgccctctgtatgtcccttatttgctgacttcaatttatttagcccaccagccttgaagctcccttcctggaacagttcacggacgactgggaatcgaggtggactccttcgcacgccaagaaggaagactccaagtcggaggaggattgggcttatgtcggcgaatggtccgttgaggaacccaccgtctacaagggtattgacggagacaagggtctggttgttaagaatgtcgcggcccaccacgccatctctgccaagttcccgaagaagatcgataacaagggcaagactcttgttgtccagtatgaggtcaagccgcaaagtgagtaattctccttgttggaactgacgcatggtgttgataacctctttcagactcccttgtttgtggtggtgcctacatgaagctgctccaggataacaagaaggctcttgcggacgatttctccaacaccaccccctacgtgatcatgtttggtcccgacaagtgcggtgccactaacaaggtatgaccagccgctaaagttttatccatggcatccacttactttctgcaggttcacttcatcttccgccacaagaaccccaagactggtgaatatgaggagaagcacctgaaggctcctcctgctgctcgcaccagcaagctgagctccctttacaccctcatcgtccgccctgaccagtccttccaaattctcattgacggcgccgctgtcaagaacggcactctcctcgaggacttcaaccctcccgtcaaccccgagaaggagatcgacgaccccaaggacaagaaacccgacgactgggtcgatgaggccaagatccctgaccccgacgctaccaagcctgatgactgggatgaagacgccccctacgagattgttgatgagtctgccgagaagcctgacgattggctagaggatgagccgaacagcattcctgaccctgaggccgagaagcctgaagactgtccttgtatctacgtcttctaatgccggatctccgtacatgggcagtcggcaacagtcaatcccgcggactcgtcccttatctgttgcccgtccggatgcgggccataacagccaggtttcgcttccaccgccgcctccgctaccgcatggagcaccggcgtctaggtcatcgtctcacagccgggctgatgcgtaccatgagcaatctttcaacagcggatctccccatatgtaatg

SEQ ID NO: 1700 - DNA, 1051 bp, Emericella nidulans
gtgaataacaaaagcttctaggctccttcctgctctctcgtgacattccattgtgttatggaatagcttctcctggtccggtgttatgcccattgtttacgcgaacattctttacgcggcgatcagagccaacgagctgccgtcccagatggacacgccatggcattcagcgtccctgctgaagaaggtttacagcataccagtggtccagggctgtttatttaagatgctgttctctacgactccggctgcgcggcaccggcatcttcttgctcttctggggatctggactatacagaagcagtgttatcacacctcttctctgtaccgagaccgtctgtgtccattgagcccattaaacattgtcactccttagggctattcatctttgttatacattcaagtgcacaccagatattgtcacagtcggatctgcagtataaaggacttcagattcaacccgggcctctaacctgacttctccagttagctcagatcttgcttctagttcacagcctggtgcttccaatcgttcagacaaagcagcttcgtttcgaatctcaacacgttatcaagatgaagaacttccttctgactgccgccctgctggcctcgtccgcctacggacacattcaaatgtccaagccgtaccctatccgcagccctctcaaccaggcagccaccggtgaaaaagattactcgtacaccaatcctttgtctacctccggctctgactacccttgcaagggctatgccaacgaccccttcaactccgtcgccacctacagcccgggctcaacctacgacctcgagctctccggcagtgcgtgcacggcggcggctcatgccagatcgcactctcctacgacaagggcgagacgttccaagtcattcactccatgctcggcggctgccccatcaccaagagctacaagttcacgattcccgcagacgccacttccggtgaggctcttctggcctggagctggttcaacaaaatcggaaaccgcgagatgtacatgaactgcgcccaagtcactgttggcagtag

SEQ ID NO: 1701 - DNA, 4019 bp, Emericella nidulans
taaagttcaaaactatggccgaggttaatcgccacgaacgcctgagtcagctccatcggggcaatctgcagaaagacgaagtcgtcgccaaagctacgaacaagctcatcaaacacggcatcatcccccaaccgcccgaatacagagaccgcgcgcgcgaggctcgccaggcattcggtcgttccaagaacgccacggccaaacccgctccgccgccagagcgtgaaccatccccgccggttcagacaacgtccaagggcgcttcgcttctcagcaaaatgggctggtcggctggcactgggctgggtgctcaaggtacaggaatgacagcgcccataacaacagaagtctacgcgcagggcgttggattaggagcccaaggcgggaaactcggcgaagccagcgaggaagcggcccgcaacacccgcaaccgatacgacgagtttttggaaaagacacgacaaacagcgcgggagcggtacgaacagctggggaagtgataggagtgtataatagccagccagaaaacagcaacccaatatcgtacaatatcttcgttcatttccagcaatagaaccttacgtagaccccttcggctcactcaaatccttcaacttcccattctcgatcctcttccccaaatacttcatcacccactcctcaacctccttctccatctccttgtcagtttgactaagctctcggtcacccgcagccatccttttcttcacatatgcccgaatatcctcaaccgagttgacgcccatcgcccacagcacgcccccgctcgccatcatcgaaaagctgagtacattgatcgttgccaagtgcaaggcttcaaatgcttccattccgccatttacttcgggcttatggtagactgaggaggtatagtacggtgggattgtggctttgaagcgtcggactagcgcacggcgcgtcgtgagcagtgaaagcgcgaaaaagactgcgccgccgaagaaaagcttcttgtttgtggacggcgtccagagcttgggaagatcgtctgtgccggctgtgggtttgacaagtggtgcttccgtcagggtcggttcgactgatgtaggtgttaaatgttgaagtggcgattctggttctaccgaggaggagggggaggtggtggtggtaggtgtttgattcgagcgaaaccacgagaagaccattttgctgcgtcaaaggtgctttcaggtgttcagtttgacctttcacttggtaagtccaagccgcctgtcgcgcctagtggaggcggagtttggctggcgttgactgtttgcgagaatcagagtaggtgaagcaattgactgcaccgaccgtattgtcaattgcacagaacgattgaagaagatacggagctaatccagggccagggacggactgcaagactgacagggtactttgggatgcggagatttaggtcacgtgcttgatttgtcggagataacggtaggcccgaggggtcagcaaacaaaccatggaagcagtcggtgccccgtatcatccagaagtttcatggtccaattagcagattgaagtagtcattaaagcatattacatcagcaggtaaatccagaagtatatatatcctgcacccgccgcacctgtcccctcgcccactccactaggtcctcaggcaggttctccatagagcaaagcgtatccagcgccggcctaatgaaccatccgcctattagcggcgcttgttggcgtgaatgtttcggttctgccgccggatactcaactcgactatcagtgatccgcatcgagcctgtctggcttccaaggtaaaacggcacgctggcgcagatatccgtcgccaatgcacgggtcgttcggagagtggactcgatctcgtccgtgcggttgggcagaagggataaacagcggtatatgaggttttgaacggagagccggaatatgcggtagttattccatgtctcagcgatccagacgtccgtgtagcagtcgcagcggccctcgtaggctcctgcgtcccggacggattgcgggaagaacgcggcaggcatggggtaccagtgtttagggagggagtaggtccagccaaggaatcggtcgtcgaaggtgcgggcttccgagaggatcgcctcagtctcctcaatatttgcagtgtcggcgcgagcaaagaatttcatccagcgctcccgcagtttgacgaacggggttgcgatcatcatcagccgtgaagaagccagctctggaataccctctgagagcggccagctctttggtgtttgaagcagcgggcatctttcatcgacggcggaatatacctaaccagtcagatcagaccagatgcagaagtgaaatcattccaagcttacaatctctccctgtatcgcattggtcaatgtatctgacaagggcaacttccggcgttcagggctacagcagttaattagagcaaccgcaccacgcaaatgatgcttcggtgagggcttgttctctttgatcgaaatgaattcctgtcaccattagtttaggtattcatatggcgcaagagtcccgtactcacctcataaagataaagaagcatcaacgtcatgaggatattgtcatagtcacgttcaatatcaccttgtagcgcacttcgcgtgcgagcaagtgccatcccaaagcactgttgcgcacgccaaactaaattctcctggcgagtccaggcagccacgcagaagaaagcgacagctagcgcgctcaggcgcaaatgtgaatcaaagggagcggccgcgtatagttgggggaggtattccattgaaccgggccggattaatggatcacggggcgtgtaaatgtacgagttgaaaaaaaatgcagtgacagtatcttccatggggagatataggccaccagggacctgcggaaaagtggtagatcctgatgttacgggtaaacagggaagtggacgtaatccacaagatctcgacttgtctgcctttgtgtctatgtcattgtctgttgtagagcgctgagccaccatagctgggttcttgcgattgaatgctttctggggccgcagcacgatgtccagagggtgcggatagccagggcattctctacccgagcgcacacaggcattacaatgagggcgtgtttcatcgcactgataggcatcatgattagtcttaatctctggacggtggaggcagaggtgattaggtactttgatgcgtctggtgcggcatgtctggcagccgctgcttggtcgcccggggtagaccatattagtaccattaaagttgactataatatattatcgacggagccagcccatcatcggagcccatgtcaactggaagacgggtctttgaatctctggaaaagaatggctgattcgtttggaggcgcagcactgggtcacgtgtaacacgtgtggaaagaacgtgattgggccagccctaagtaaaaagaagcagcctaaggataatactgtattgagaggaaacgaagtattgcagagtataataacgccatgctatgcatattcttgacatggtttgggacaatgctcgtatcagagatacaccataagcgcaaatctttatcacatatttcattatcattaggcgcgtgacatgctcatgatcacttcataaaggtacgttacttcatcgaattcgtcgtaataagcatatcggcccgacccggtcgactgtaccgatcaataccgagatgctctctgccatcacgacccacgtaaataccaaaaccgtacgtgggataatccttgttccctggcggcgcgataactaaccgggtgacaaggtcggtcttgctgcgtggctcccgcaagagcttgtccgaaagcagagggctctggtataggaaactgatttgatcagctagggtgctgatgctgtgaggcagatagcgacggcgtccgggccagacagccagaaaagaaaccgtataaatggcacagaacgccacgatggcgtaaaaagcagacattagcggcgtgatttaatcgtgttctcgggtggtct

SEQ ID NO: 1702 - DNA, 6048 bp, Emericella nidulans
cactcttgtcgagctgtacgctggcctcgacggaccctgccagacgtgagcctacgtctccgacggtaccgtaggactaggccgaacagacgcggccaccatgcaggaggtgttcgacgacatgaccgcgttctacgagcagtacccggggtatctggggcagagtctgttccagcgatacgcgaacaacaacacgctcaaaacgcctgcgcacacggccgtgtatccctggcgcgacacgaagatgttttggctgcacgagaatatattcttgaatccggaactggaggctccaacgaacgagctgctggtctcactgcgcgaaaagctccatgccaccagcgggtttcctgctgaccagccacatatctacgtcaattatgcatttggtgatgaggggccggaggcgtggtggagcaaggagaatctgccaaagctgtcgtatctcaagagaaagtgggatcccaagggggtctttgggaaggggacacctattccgaggttctagggtggatagccgtatctccctccaggccggccattatgaaaagctggggcgtcgtctagcgaaggctacaagtgttgacctggctaaggctgtttccgacttatgcctgagcacgcaatttgtccatatgtgagggtaaacttctgtctgctcagctttgttccgagatatatagttctgagaaacataataatgccaattaagactttatttatctcttatttcctggtaggctgctactaggataccagatagtgcaaaggaatctacactgcaaaactccactaagaagttagaagaactgagcccagacccggtttggtcctggcaagatagatactcggatgcagctggcaggccttctcccagacaagaacagattcagcttctcagttttaggtccttgagcacaaaatccgggcatggttcagtatctttcatttatcctaccaactgtcctccgcttcaggatcaactatatcaaaaaaaaaagcccagtcggtctaccacgatgccattatacctcaacgccccaaagacaacagggtacttttatcttcttccctgccccgcatcaccgccaggtgcggccgaatgagatccgcctgcagatccggcacccgagtccgcgtggccggaagcagtggccgaggactgggaattgacccagcagtcccggcagacagggcgcgcgaggcgaatcctccaagagacatgtcccctccgcttttagcctgtgtgcattcaagcagattagcggggcggaatggtattagcaaatgtcctgatgctcttacctgcgaggactggattcgttccgagtctgacttggtcatctcgtgttgaggcattttgtcgctgcttgctagagttactacaaggccacttgatctttgtttagtctcgtcaggagatcttggaggggaatcgatggttttacatctcggatggaagttttagggctgactttataccagtcatcgccctggccttactcgccagccatcagatactatcaaattgctcagaatcagactaccagatattgacaccatgagagcacatcatacataagctgaggttaaccagtcatccaaatcaaaggtacaagtcgaaaacagggtccagactcgagctactccttaactgtaagcttcccatacgcttcaggattgcgaacaaactggtgagtttctgtccaagcgatagacagtgttagcggctttcccccccgcccgagaaagtaaagaaaagaaccaaataaaaggaccagtgacagataatggtgttagcctcatgcacaagacagccatgtagggcttatatttacatgatgtagcagcacgtgactaaggactaggtctcgagcttcccactgagccagaaagggcaattctaacatactctagaaagaaaagctctgagtaatatagttgttatcactaataaatttagcgggtctgacatatgggttcatatcatcacttctcgcttgactttcaagtcgtagtagttaggtcgagtcgatagagcttgtataggatctagatacatagccaggcagacaacatcattctaaaaacaaattgattaaattgaaagacatttaactgataatatgttcttataacatgccaaatgctagtatgaagaagtacccatcaacatcataacaaaactccagacaactccagacaactccagacacccagagcaaactacaaaccttgcttcaactctatagaagaacaacatgaccgatgcagctcaagcaacaacgacagttcccgtggcacttccctcgaaatgcgcactcttttcgaccaccatccccgccagcgccgcaaggctcacactctgcaggatactaaagatactcacatcacacgccgcctggagcaccagcatattcctcagctcgacagcaaccaacgagtcgaccccgtacgcacttggcggcttggtcagatcgatatcggccacagggaccatgaagatgtctgcgagcttggtggcaattgcacccccgacatagttcgccgccgcatcgggggaatcggctgacttgagcttggatgaaaggggctcttcgccgtcgccgctggaagatgtctgagcggacttcgtagatgcgggcttacggtagcggagaggtgcgaagcgggcgtcacgccccatctggctgtcgctggaagggtcccagtggctgcctgggccggagttcaggcccaggaggagctggggccggccgaatgggtgcaagaccgccgttgccagggtctggaggatcgactcttcagagaggcggagggactggccaactttgcgcagccggtctgagactgaccgcgactcggcgacgtagccgacatctttgattacgcccatatcgagggatacggcaggcagacccttggagcagcgccagcgcgccagcgcatcctggtacgttccgccagccgcgtaggaggcctgactggcccaacccaggatcgcggatagggaagagagcatgacgaagaagtcgaggctgttgcgctgggagaagcggtcatggaggttgcgtgtcccggcaaccttgggcttgattgccgcattccagtctgcaatgctcatctgctcaatgatcgagtcttgcaagaccatcgcgccctggatgacgccgcggacatgcgggaaccccaactctgaggcggccgcgatcgcgcggtcgaggtcggccctgtcggcgacgtcgcaggagattgcggcgacgcggcatcctgcgtcccgtaggccattaacgaatgcgctgctgtcctgcttgcctgcactccgcgagaggaggataaggtgttttgcgccgtgttcgaccatccagctggcgagggagcggccgagacctcccacgccgccgacaaggaggtaagatgcatcggcgcgcaatttgggcgtggccggccggggaagaactctaacctcttcgtcaggctcggtggacagtaccagcttgccgagatgcttccccgtctgcagcagacggaaggccttgtcaacctggcgcattgggtatacggacacagggtggacgggcttgacgatcccctggccggccagccgggcgagctcgctcaggacgcggtgcgcctcgtcgccgcgctggcggaggagggtcatcatgtcgagcgaagtgaaggagacagcgcgcgtgaaggtggccatctcgagcaggctgttctgctcgagatcgcgcttgccgatctcgacaaagtggccaaagggcgcgagaacctcgaagctggcttggaggagggcgccacctagcgagttaaggacgcagtccacgccccgtccggctgttgcggccagggcagccggtgcaaaggaactgtcgcgagagttgaagatgtggtcgtcggggattccgtactccttgatcagtaggtctcgcttctcctgcgagcccacggttgcaaagacttctgctccgagatattccttggccagtatcacggctgcttgccctacacctcctgcagcggcgtgaataagcactgtctgcccctgcgacagtcgcgctgcttgcacgagagcgacgtacgccgtggtgaagatcatcgggatagaggcagcatctgcaaaccccatccccgcgggcatactggcgactccgtgccagctcacccgtgcacgagagctgaacgggcccagcagcagggccatgacccggtcacccacggcgaagccttgcgccgcagcttcagcgccgacgcgcgtgatgacgcctgcgcactctagacccatgacgcgctctttgagctggcccatggccaccatgacgtcgcggaagttgaggccataagcgcgaggctctatctcgaccatctcgtcgggcatgggcccggcggcgtccagcgcgtcggggttcgtcgccgaaggcgagtgtatcgagcagaccagggatcccaacctcgagtttaagcggccgcttggcttggaagaagggggcttcgggaatactctctggagaggcccagtcggggacctcaggctccagcagtgcattccagacaacgtctttgtaaaggcgcggcacaaggaggaggccgtctcgcagagcgaactcgctgtcggccggggccgctgtctcaacggccggctgtaggcgcgaggagaggaggtgcacaatgactgagatatcagacgcaggcgaatgggctgctgggtccaggtcgagagtcaagaagcgccggccgagatactcggtgcgcagaacgcggacgaacccagatgcaagcgcagagtcggggtccgtacactcaaccgcgccgccgcgggtgacccagagaagacctttgcaggcgagggccatggtcttgattccctcgagctctgtggagtcaagagacgccagaacgggtctgtcaagctcgccgacgaagacgaccagccgggactggaaggcctctgccccgagcgagggagactcgagggatataatctctggaagggcatcgctaccggagtcctgagcaatggctgcctgcagtcccctgacccaatcgtcctgaaagcccgtcttgttgcccgtcacgatcaccacctgggcggcatccaccttctcagggctcgaacccgccgtgccgacagccgtgctcatgatattgctgatgccgtacagatcactctcagcatcaacgttcacatctctcaggtcaatctcgactcccgtaaagccggcccccttgagcacccgatcccacatgtcaatgctcaggctggggctcgcgtggcgctcaggctcttcgctcagccaccaacccggcaggagaccaaagatgaactgcaagtcaatctggtcctgtgtcgtctccataaggagcagcgtgctcgccgggtttcatcagggaccggacattggtcatagtccggtgcatgctcttcgtggcgtgcagaacctggcaggcgaccacgacatcgtaagaaccgagcttgaacccctgcgcttcggggtcctgctcgatatccagcttattaaactccagcaggccgccccaggtggcgaattcagcgcggattgcctcgaagaacccggaggagatgtcagtaaagtgccagctctcgcagcgaggaccgccatcctcatcagtccctagggtcttgagcgcgtgtcgtgtggcagcgccggtgccggctccgatctcgagaaccctggcacgagggttcttatgcaggatcgcgcccagcaatgacttgagctgctcgaaggcgggctccagccggtatgcgttggcgtagtacttgtacagcaggcgtccctccatcataacctccagcggcgctcgttccccgcgaaggaccggcagcagcaatgggcctagctggcagatcagctctccgtccaccgtctgcgacccagcaagggaaatgtacttttcccgtacggcgggactgtcatgaatccaggtgtcgctgtcggcactccagcggcgcgcgagtgccaggttgacggtatcctgcatccacttgtagaacttgacatggtggaatcgagatttgca

SEQ ID NO: 1703 - DNA, 2395 bp, Emericella nidulans
gcatccacaccacgctctcaaggcactcttcacctctctttcatcagaccctcgtatccaagaccccatccttgttcttgatggtggagaatcgccctctgggctcatagcctcgctcatatcttaaatccacgcgcaatacttaagtccactggtgccctcgggttcctggggaacggatttggatataccctaggcgcgctatcgcagcaccaaggaccaaagttataaatgtgcagggtgacgggtctgccggatttcatcttatggagctagatacgtatgcaaggctgggtgttgaggttattactgttgtgatgaataatcattgctggggaatgagcagtaatggacagcagctggtttatggggacttaaacccgaaaaggccggtcagtaccctgtccgccgttacagagtatgcagacgtctcgaggggcttagggaataggggtttcaaggcacagcgagttgaggaggttcttgatgctgcccacgagcttctggaacgggaaggcccggcgtgtctggagttgattgtggactcaaagcccatccacccggttacggagatgatggttgggaagacggaggatccggacttggtggttgttccttactatgacaatatccctagggcttattacaaagtctagagtaggtagctattataccgcgacgccgcggttgatactttcatgcttcggcgtagcgaggatcttgatatgatcgtttggcttgatgagttccttgaatcccttttcgacgatgtcctccagtaggaggcggctggttatcatcttctcgacgccctggaagcggcctacttggtccggcccaccgttaatatccagattcagactgctgatgagggcaaagagaggactcaccggctacgaacgcgttgaccacatccttaaaatcatcctggttatacgccagcgagcacttgtacattatatccttccacatgaatggggcgagggggagcgtcatctacctcatatcagcccgtcactgtactccttagaaggcgtggaaaacctacaggcccctttggcaccgcaaggttgatataaacacccctaaacctcagactctgacagccggcatcaaagcctgcctgggcaccagcgcagtcaaacacaacacccacaccatcccctgtcaacaacctgaccttcttcggcacatcaacttgaccagaatcaaaaacctccgtgacgatctccatgccacgtaacgtctcccttctcgcttgagacacctcagagacatagatcgtctttgcgccacgggcttgcaggacatagcttattgctataccgaccggtccagcaccgataacaaggatgggaacggtgctgagatctacctcgttttggtgagccgcttggcaaggcgagatagacaggaagaggttaagagcatgccacgcgacacgaagtggctagatcagggctgcggctgcgagatccatgtacgcagaaccgtcctcagagagaacatgcacagcctccggtctgacagcgacaaattctgaaaggccgccgccacctccagagagccccatgaagccgatcttttcgcagctgtttgtggccgtatgcaagcagggcgtgcaagaggagcaatagtagcgcgggtcgacgacgactgcctgccccttcttgaggtgggagatggactctggaacatacttaatgcgtcctgtgaactcgtgccccatcgtcacagggagcagagcgtttgtgagcgggtgtggtccagattgaagggagggaatcgcgaaaggccctatcgtccttgtcagcatggctcaccaagcggatcataagacgactgtcataccgaacatgtactcattgagatcacttccacatatcccgcaccattcgacctcaatcaggactctgtcatcactagcttgcggaactgggacatcttcaacacgtacgtcgccggcggcgtagaattgggctgctcgcatcgttgtctgaataatgtgatatagttcctacaattgtattactataagcggaccattaatcatataaatgaggggcagttccccgagctcatcggccctcggctgtccttaattactccgcgtcgttattagccaatgccatgaacattgcggagaacgagtaaatcttcctattggggatgttgtaggttgtatagcagtttcaaagtcattgtccacattacatacacccctatagtaatgttagctagtgaattagcatgatgagttgacccagtggctcttgagtctctgcttccatcatatattgcaatattactgacagaggcttactgcttttgaatctggcttgcgatgagtccttgtatctgccttgaggttgatctatgcttcagtcctgtgggt

SEQ ID NO: 1704 - DNA, 4516 bp, Emericella nidulans
tatcctcggttggggcccccctctggaaaaacggtcgggaacgggaccggaaactcgtagtcaacatccgcaacttcgcgagcgccgcaagaagaagaagaaggcaggcgtagccgatgatgaccaggatgatgacgatggccacaacccaggacatccgacaagaacgccaaatccttcggaaacgccttcgataaggccgtctacgactcggccttctacgacaccggcgatcactccagtgtaatcagcgttgactaggaaggcactacgccatgtccagagtaagggcggtcgcaaggcccaagacctaaaaggtaaacagagcgagcagtacattcgcgatctctcccctgaagataaaccgcttgatctcctcgcccccgacgccctcgccaacatctccaccacaaaacctagcgtgcgcttccttaacacaggaccgggttctcgccgcaaacacgctgccaaggtcggtcctgacggccgtctgcttctaggcggtgatgacgacgccgaggacatcgatatggctggcggagacggcgataacggcgagacggaatcaacgcgtatgtacaggccgttgctggacctgatgccatccgccgcggccagcgcggaaagatcaagatggcacaggcgcagaagaaaaagtcccagcgggacgacgagatggatgttgatgatggcaatgaaaacagtgccaacacaaaccgacaatcttcctctcaagctgggaggggaggtccaggtcgtggcagtagtcgcggaggcagcaatcctcctggtcgtcggggtctgggaatgcccaagacccacggtcccagtgggatccagaagcgtcggaatccgcgcggaggacggagcgggcgaggtggcattcgtgttggaagagaaagagggcggaggtaacggatttaatggaatggtcattgattatgccatatgatattggagtctacagatgaaatgaccgatcaaaaagattcaacgcaacggctagaaaaatgttatgaacatgcactgattccagtcatctcatctttccttgttatttatgaatactcatcttcgtgttattaggttagtctaggctggtatctgtataccctctatccattcactattttcagtcctgcatttcatatcaattccttgattgtgcccaattccaaactcgaggttggatctggtgagtgcataccgtgctcctgttgagtatcccacaaatatgcatcgatgacttctgttctcctccagatcattgtcgtacaattacatacgcacgtagcgcaggtgccttgattaacctgctgataactgggctctggagcgactcccgcgttctcatattcgtccttggtatctaggctacaacagtatagaactctaggcagcctgacccctgtcttcaattatctgacctaatgccaaccccatgccaaggccatttgcgaaaaaagcaccattcagttgagagcacaactatcagaagtcatcacgcagctggaggatcgacagctaggtatgcatgcagccaaccttgcagatcgctcttacataatgagattctgaaattggaatccaaagtgaggaggtttacggggcatctgtgggcggtaatacctacgtagatagtaactgggcgactgtacagggctgttcaaggacgatctgcagtatggtttgtttcttggcgttattgcgttggcgacactggcagtactgacccgaagagggtaagggtccttggacttatcaggttgctatggttagggcgggttctgatcatcggcttggaagatagtaggatacggctacaagaaacaacaaagctagttatgacagactaaaaaagttgaagaagccagaccggcccgggtatcaattcttgagaggtgtaggctgatagagtacaagcatggactgaatgaactaaactgaactgaaatgcaaggccttctaactacgggccccaatgcccgtagtgcccgtaatgcccgttcccagggacaactataataatgaaaagataaatggcgtactttcgtattccaattcgaaaaggaaatgaaagcccacgcgccgttgcaaccagaactccgactccaaatcaaatgtgccgctgtcgaggtagtataaagaaatgtaccgaaggagaaaaataagcgcccagttatcgttccacatatcccaacattggtatcatgctgcattaaacggtttaatcggaaatcaaggctcgtgcacgctggacaagaaggtgtgaatgacatgaaatgagcagttaatcagagtcacccagagggcgaacgggctttgctaagccagatttgccaccatctggaaacgcccaatacagctgctcggccgtcgtcctttcgttccgtcccgtcagggttaccaagcatcatggcgaaaacccagaagaatgctgcgatccatgcgagaaggagcaggccaaacgacatgaacgacgatagcaaaagcaccattattagaccaccgactgagtagccttcgccgatttcaccgacagatgattgttcgccgtcattatagactgatggcggcctgaggcggctcaaccgctcatggatgtgtaattgcgggaccaagaggtcgcacaattgtgtacgtaacgaagtcttccgcaaatacggcacgcaggaacagagccgaagaggcaaggtgaaaagagtaaatagttgtccgaagacagtatagatagaggcgagagatgagaaaacgggaataggaagagacatccggaactgcggccccggcgattagtcccgcacgctaagacgccaatgacaaagaacaggattgatgcaactcaccagcatcagcacggcatcctcgccgtcatctgacaaaaaatcaccaccatgggtttgtcgtttctgagcacgagcaacattgggattacgctcgtctcccgacatgtatgatgaatgatcggtccagctccctcggatacggtcctctttgcgcgcggctccgttaccgtaggaggataaaatgggatttccctcgagatatgccgaggatacggaagccactggagccgcagtgggttcgagatcgggacgggatacaggtttcacagacggctggatggaatggcgattagattgcgggtaagaggagtcccacgaatcggagggatacggtctcgaggtggcagtgtgaacggaggctcgttccgacgaggggaactcagcaatcccgttgtggtcggcgccgctgtgtcgctgtgacgaggactgcgtctccgccgggagataagctgtgggaggagcggccgggtgaccttcagcaccggaaaggtacgcggtcacaatctggggctcgttctgagagtagacgtgcgactgggacatgtccggttgtctcatagcgggcagtcaaggtcgatgaaggagatgtagggacagtcgagagtcggtggagcaaacaagggcgcaacggagatctgccctttaaaaaatgcgacggcacgccaggtggtacaagcagtgcacagcgagagcaccctgaagaagttcactgcatggttctaggcgcaagggagaataattttccttcgcctgataatcgataaacctgactgctggcgggcgtgagtctggagacgacgaggtggagagcgaaggcgtcggcaagggagctggtgaggtggaggaaccgggagggatggagaagggagcggaggacagagaggagacgcgaagagaaagagcagatttataaggccatgagagtcagccagggaggttacagaaaacccaagagaaggacgagaaaaccaagagaagacccagacaagagcgtcgtttgtcgagagcaatatgggactctgccaagatgcgccgagccttggctgggaatcgaccctttctcggtcggaggccgccagcagcaacggcgagacaagggaagattgaagaccaaagcggagctggcgagtgcttgcatggatggtgctccgtatagatcggagcatgctgtgctggcctgcaggcattttgctagaagaaaatcgctgccagagtcttgttgcggcagtgcgagtcgctcccgtgccaagtctctgtggacatcgccctccatacagattggccgctttctaggctgggctcttggcatccgcgtgaccccggcagttgaggatcccgatcagatcgcactgttttccgtctggatattattatagctcagtggccgacgaactttttagctgacctagatccagaagactggcgtccatatttcatccttgttctgtagggggaaaccgtttaggctgacctttgctacatcgtacgccgtagatctcaacctccctaaacccacagcccgtgattggtcgcgcgcttgcaaatcccacgggacagtctccaccttggttttcgtgagttgtacttcgtacacacttcatctcgaatctcttttctgcaccctttctcaacccgctagacgcttacttctcaggccgtgtcaacggtct

SEQ ID NO: 1705 - DNA, 3829 bp, Emericella nidulans
ctggggttgacacgttgaacgatgaggtgggcgtttcgagagagcccttagccaatagcgaccccggtgatggactactcggggtgctcgggctctccgacgggctctgcgttacaacggcgaccatcgggcgtcgaggtcgtttgctcagtattgttcgcttgcgagtcggcatagcggagtcgggacccgccgccaaatctaagctaccggagcttctaggcgatgaggtctgtggagcagagtcctcgccctggagggaccgtagccgcgcagttttcgaggaaggggaggtagaacggtttggagagctcgacatccagggcttccgcgcaaaactaaccagccttccagacattgaacgagccttggaggggcgagcaacgggtgacggggctctggtctcggggacctttggtgggggctcttgggcctctgaggggggcgcatcagccagatcttcggtcgagacggtgaaacgggagactgcgacggtcgatttgtccttggagcgacggagggaagtccgccttaagatgtctttcccggctgcaacatcttcctttgaaggcgactcggcctgtttctgaaacgtcaaatcggagaatgtccttcgaagaccaggggagcctggttcggacgcggccaggtcggggagattgttgtagctcgcggcacgggataattggctgttttggtcatcctggtgggtggtagcgatctcaagagcgggaggagacatggtcaggaacagcggatgctgtctgcagatttgcggcaagctgtgctggagaggtgtagctcacccccccggccgggggtggacagtagctgttgctgacttcgacagaaccaactcctccatgtaaagtgttcgatgacagacaagttatggcatatgcaggcgtgcaccgtcggaaaccattgaaacgctacacttggtgacagcagaacgggaactcgaaaaaagggctcgaaagggtggtcgctggagggatggcggtgcagaacaggcgcggcgcggatagaaccagttagtacgaccgacgaataaagagggcaagcacttggcgataacgaggggctgaagccgattcctggggtagtgagacacggagcttcagaaaatggcaagctgtttgcaggctagggacggagagggttagctaggctaatgttggaggcttggagcgaaggtagtagtgtaggaggcgtgcggttgatcgacggcggaggaacgatgaattgattaacgagcagggggtgaggttaaagaaaggatttcttcccttccttcctctatgaaccccttttcccttaaggccaggagctaaacgaatggaatgaagtcgccggagaagggaacctggaaagggacgatggggactccatagaagctagagcgcttggtattgatgggcggtattaccaatactccacatacctgtagggtgctttgccgtctcagccgctgaatcttgacctgggcttccagaaacaagagtgacgaaaatttagggagcagggaacatttcaaggtctgcctagtataaatagatgctgggaagccacgagttaagcgacttgcctggcgtgttatttattgttccagactggagaggatctaaatcctagactctagaggtcaccgccactgggctgagtgcttgccgaacataagctattaatgtcaaactggccctgtggagaggctcccaccttgtcttagagatgaaatctctgaggatcagagaatccccttcaggttcattatgatcatcgcagcattcgatcgcgctactcttaacaactttgagtgtgctagtagcacgtatttgtaatttcctgtatttggaatatggcgtaccggagctagggagctcagctgtattacttcggtacgttgacaattgactcgacgagaatgaagtcgaaatctcgattcgaagactcagacatggctagctgcaaggatcataataagagtacagcctttcttgcatggtgagtgtaactactacttaacctgcagatatccacttacgatcccgaaaaatcagcctacagacgtttgagctgaccctgcgcagcagtacctcctaatgcttctcgcggtacttggggacggcactctttggctgcttcagtacaatctgtcatcctgcctttctcaaattacatattagaattggcgctcaattcgcagaaaaatcgcatcgcttgtccttgatatgcagccgcttcgtatagcctaatgagcatctcagcttgcgccgtttctgacggatcacacgtcttgtcaccaaactactaaatttcggctccctagtctctacaatatgattacgactcagtagccaggccccttccgagaatgttgtacgggcgcccgggtgcatgactacatatcatctgttgtgtacagagcgaccagcaactttggaacattccatcaacaaaccgcccctttcgcacaaatatacgacgccttttgctggacctgatagataagcctgaacggctgggagtttctcgacggacgccccgagtcttaaagggctctgtcccagctccaacttgtcctggggcaattcagtgcttgcaagccagcaatgcgattttattgcggctgggtccaacgaggtcgcgtagactacacatgcatcattgcgcaggaatgcggagtgagtaccccaaccacgcaagcagactgatgggatagatcacagagactgccgatgcctggcggtccacagagtagctctggagctgtcgtaactcgcttacttgacttcatccttgatcatataagaaatccggagtctaacccaataataccaatgtctggaagtgaagcaggaatgctctttttctatttatggctgtcggtcctcggacactggggttacagatctccggtacgagcggcgagatgactacgtggtgtagcacagtcaagtcatcactttgattcgcaccctataatcacacccttgccaaatcaatcgggcgcttctcgcgcgtggtaagtcaggcaatggactggttaatcagatctcacagtctcgattcgtttctcccagcccatgccggcatcaggattatgtcctactctgatcctgaggattgatgaatattgacaactcaagggaatttcataagctccaaatatgtttaatttacagagtgtcttcagaactcaacaagagacatcgccgagtctcaacccttctctatcggttccgcctttccggaccgtgctttctagcagtatgaaagatgcttagtgagcggcaggggtctcatcctcgtcctcctcaaaccagctctcctcagcaggggcggcctcgccagcagcggcttggccctcgacctcgacctcctgggactcgtaagagctcagctcattggcgaggttggcttcttcgggagacttgggggcagcaggagcgctaaacttctggacgtgggcatcagcgtcgccgggcttgacgggcgtaggcttgtaggcacgaagctcgcgaaggtagagttcctggacagggtcggctgtaggatgttagaatttgtggacacggctgcggatttctcaattgcaccaaaagacacaataaagtcgactgagtcgaacatgtagaaataaggttacataccgcggcggacagcggaggtcaagaaggtgcggcgagcgacagagggggcctgctgccgggcgacacgggcaaagagggaggactacgagaggggttagcaacacggactgggcgacaaaaccggagtctgcagttcagtaaagacgtaccgaagccctgagagactgagacatccg

SEQ ID NO: 1706 - DNA, 1358 bp, Emericella nidulans
gtggccagcataacggcgcgctggtccagagtcatgccggtgaccgaggcactctggtccagttcttggggggacttgctggctgctgagtccatccgtagagcgtagacacccgtatccgtgaagatctcccgagcaaatcccacaaagtcacggttaacagagccgatcaatcggctgttagcggaacgtaaagaaaaatcccaggataagaagggctcgtcgacgtacgcgaattggttgtattcgccgaaatcttggttcgctcccaacgcatgagttagttgcgtttgctgagcatttgatagcccggtttgtgctaaaggtatctgctgagttcccatgtcggttgcagaatttggcgagtgatgatatgtgaaaagattgtattttcttcgcagtggtgcccattgttgttgcgcttctccaatgactcgcatttggtcaagtccaagctgggatatccgggcgttggtcggatctgcggcctgagcaagagcaccggggctttggggttggaggttgttcgaggggaggtaaggactatgggtggcttcgacgggatcgtagactcgaatccgtgaattgatccatgagaatggtcgatggaactgcgcacgtcagtgggttcgccaaagtattactagcacaataacttacacggagtacttcattttcgtgtctgtcaaacacatgtgtcacgaagctccgatgtgtacggaaccattgtcgcgccatcatactagctatgcccttctcttgctctgccatatacccgacatgattccctgcggcatctagtattacgtacttattggcttgctcgaagcctctggtcaagtcagccgtatatctccataaacagacatttccgactcacatcatcacattcatcaactcgagctgccgctgcacgacaagcccggaattcgcgagaatcccggtggcgggatgagactccttgagtaccccatgcgggtcttcagggagatagacaggggagagcagggtgttcttagcgggatcgtagttttcgacaggcgcgcctgtgttcggtgtatctgagggtgctgggcttcttcgaattggtggtggtcttcgaatggaatttctgggaccgcgagaggacggagcgggcgtggcccgtcttctcgcaaaggaactagcggaagccctaggaccctgaacacggcgcgcgacgggaattcgtaatctggacctccacatgtcaagaacagtagtagagcattagatttgtagaggagctatatggaaagggatgttggtaggaggagagagaaggagctatatgtcaaaatcccgagtgacgaaggtgcggatttagcggcgataagagg

SEQ ID NO: 1707 - DNA, 3989 bp, Emericella nidulans
gccgaaaagatgcgttgctttatacatacctgaaccctgatgggattatggggtatcccgggactgtgaaactgagggtttattacgtcggtagtgaagaggtggaaggtgggctgccgcggtcgattcttaacatcgagtacaaggctaagttggtgggtgatgaggttgagaagacggtcatcaacatcacgaaccacaggtatgtatccctcgttctgtacctgcagacaatcgctgacggtacgcagctacttcaacctcagcggcgccgcctccgccgcagaaggcgttaccgcaaaactgacgactcgcgactacctcccccttgagaacggcattccattagggcagatctctcctcactcgatagacacaacgcagcctttcgagttcggtcctgacaaagccaccttcgacgactgtttcgtcgtcgaccgcgatctgagcggggtgtccctcgacacccgcaaccgaccacttaaactcctcgccgagttccggcacgccgatactcgcatgaacctgcaggtgcacagcactgatccagccttccagttctacacgggcgccgggattgacgtgcaaaaggccgatgaggaaaatccggctcgaggaccctgggccggcttctgcattgagcccagtcggtacgtgaatgcaattaacgaggagaagtggcggcataccgtcgtcttgaagaagggagagaagtatggaagtcggatcatgtacaaggcttggaggggctagtctggtcaatgctcctacaacgaactttggatgatgagcacaaagactggactccattaaaaatgtcgccacaacacaaaacatgccgattgtaccgacttcccgactgattccttgtgctcagtccgtagattcctgtcatctgatcaagcgggccagtgcccgattgacggtccaccggaaaattcttaaaagcctcacttcagcatgtcaatatcagcggcagcgtccttgagtcagcagaaacagatccacatcctttgcggggaccgtgtcttcgcttgatagtagttccataccaagcccttaggcctcactatgagtaggcgtcaataagtggtagtacgtatgtggctctggttcctgagcgccaagacttctcgaaacgggcgatcgttctagcttggagccggctaacttccaaaaaaaacatgttctcctagtgtaaattactccaatacaaacaacccggatcggatcctcgcctgcggtataatacggaatatttgtgcatgcattacggcgatctctcggtgttcacctggcgctggagctcagaacggagccgtgaacttccagagtccggattgtccactcgaccacagtcgtctacaagggtaacattcactagtacaggatccttctcatattgagtgcttggcactactactgggcagtttcgtaagtcatattgcgttgggcttacgggataagactggggtcaccggtcctggtcattcccagcccgcaatacttagggaagatgctgacggggctgagctaatagcatctccagctgccggtcttttacgcattccaaacatccttcttcaccttctcctcttggatcgcgggcatgaattcgagtaccagcgtatagaggacgttaattgtttcattctcaactatggaaagcgacatgctcttactccaccatcgacatcttcccttagctaaaggctatatcatgagacaaacattctctcaacatctctttaggatcgtcggatacaggtctatatccgcttaagtcctttctgtccctggtcccctgttatgcacggggtccctttagcagcgggcttcgtgaaatgtcatgcccgctgccacgggagtaactaaccgggtccccgacagtccgagagaataaaaagaagccgctaacccgtgccagataaaggtcacaagatcatccatacctccaatgcacagccgttatgcacagctccgtcttaggggatttgcaagcgctcagccggggttggcggtttgggctccaggttgtttaccccgctcgcatcttgtactctacatgtttctttgacatgaagagcagtcaccgagtgatggagagttttgcgagtctgtcactaccaataatcgacggctactgtacatgtctcgtcacctgcttttggctgacggtgagaactttcttgcacagccaactttacaacgtcaagaggtcacaggagctgtcaaagtccactatcgttccaaagtattatacttggcccagccccgtttctgagctcagacagaacgaagctgcctgcagcacgacacaaaagacaactcgcaacggggctgtgtcgtgtcttgtacttggcgtttagcggaaagaaccgtgtttacccacccaaaaacgtagtactcgtatattagtctcgaactgacatcggtgtctcggacaagactcttggggcatggccgagaaggccgagctggttggcagctcagcctagcccagcttcatccctgagctcagatcaacgctgacttcattgtcccgatcgtattcgtaccgaaccttgttgcctaaaccttgacttaatgcggtttttcggtttcgtattcgcttcgaagactcatattatattggtgtcgtcgatacttggtttactgcgtgcgccgtaattgcaatctttaacaacctgttttcactattcgtgccgtacgcgatacaattaaatgtaatgctggtttttggatactgagagtagtgttactattctgacaagacagcttctgagcttttatgccccctttgtggctctaccaagtatatatatcgcaaaacagccgccacgtgatttcaagttacgccggaagcacccgagcaaccccgcgtagaagcggggagtagctggaacttcccctctatgatcgtcgtcagacgttcaacatctttgattcatttgagctcccatatacttgaataaaaacaatggcatcagcacacggcgacctccgccatcttctcccagccacatataagcgccttatatccgattggcttgaagaggactgccccagcttcgactacggcggtttcgtcgttggcgagtcagaaggcgaagcgaagctactggggaagagtgaagtatgtcactgattcaatgcttcgtacttgttgggtagcttgactgggacttgactgctgacatgtgcggaagggcataatcgctggagtacccttcttcgacgaagtcttttcccagctcggatgctcgtacgtcgcctccaacctattcctacctgaacagccggactaacgcagctcgaagagtcgaatggcatcatcatgaggggtcaagccttcctgccaaccaaaaaacccatgttgcaactgtccgcggcccaatccgcaagatcctgcttggcgagcgcgtcgccctaaacatcctcgcccgggtgctcggaattgcaacaaagacctcatccctcctacaaatacttcgcttcccaggaatgaaaaggaactctagctgggacacgaaagacaacgccggggttcagggttgttgagaagtacggcattcttgttggaggagcggacccgcatagacatgatttgagtagtatgacaatgctcaaggataaccatgtctgggcttgtgcgaataacgcttcctcatcgacggcaacgacggctgcaaacggggagcaggatattgccgctgcaatcccgaaggctgttcaggctgccaaggctgtcggggggttcgcgacaaaggtcgaggttgaggttaggagtttggatgaggcaaatgcggcgattgaggcaggtgccgatgtggttatgctggataacttcacgtcggaaggagtgcgtcagaatgctaagcagttgaaggaggagtggactgcaaagggtaagtcgaggggctcgttcctgattgaagtcagtggcggtctgaatgaggtaaacgcgttgcagtatgtctgtgatgatg

SEQ ID NO: 1708 - DNA, 2626 bp, Emericella nidulans
cattgtcggcgtgacgtttgctgttggtcggtataaggtttgcactgtaagcgtctggcccacggaggggtcgccgtctgcagctgttgcgggcttcttgccagccgcatttgacgactttcctgcgccttcgactgcattcttgttcgggagcctgtacggagtgaagttgacgactcggcggtcgtcaaagtccacgtcaagaataacggtttcctgcccgctgcggtcctttgacttcactagaacctgcttgtcgaggtacttgatgaacttcttcacgttcttccagcttgttttcttgatttggtaatactgagcttgctgtgcggtgtatacagggagatacggggtgatcatgtttgccatgaatgctgacggcgagatagggagagacaggccatggttgggtgttgatgggttgtcctgctttagtttgtatagagaataaagaaaggccttttcgaatgcatcatcgatttctgctcctattagtattttgagtctggtagcaacggcaaccgtacctttcgttgtaggctctttctcggcaatcggctcttccgccgcttcatgagcaggctctgcagcgtctgcttcgacttcctgaccatctttatcttccaactctagcccttgaaccttttcctcaataccagcttctctctcttcctccacctcatcccacccctccagatactctggagcaggaacaccaggtctcgaggacgggctccacgcccacaactcatccccctcccaatgaataccccgtacagcatgtccctttgtcccctgaacctccccaagagcagaaacatcaatttcgcaaacccccacaaacaacggcacagccaccctatccaagctcgccaccgcgacaactgctcccttgactgcgcgctcatcaaacggaggctcatttgccaggcccggagtcatcaggtccgcgccagaccggagcttccccataacaaactctggtgtgtggagcaatggcacgatgtttgcattatgccagagcatgtacacggtggggtatagacgtttttcagcgccgggcccttgatcgatcttgaaccagaggactcgctcgtcgccgtcgctgtgggtgccaacgtatacggtgccttggacttcgcgtaaatcaggaccggcggtcgttgtgaagcgtgcagagaggcagttttcggggaggagggcattgcgtatggatgtgagggttggttgtgcgggatttgttggagtgacgtcgctagcctcaccgggcgtcgatggtatcgcaatcctgtagtcgctgataatctgatcagctaatttgcgccggtccgaggatcgcagtggagagaggtttttgatctgtgatacgaatatgagataactgttcttcgttgttttcgcagatggaggagcttgcgatgcggggtagcacttacggttggcttcttcttgaacatgatgccagcagaaagctttactgtatgccaatctaggtatgaactcagatagatgctctgttgatctagctacctgcaaagcccgagtgaggtgatgtgttaagaaggggtaggagggagttaagtatttgatggtcagaaaggctggattttcaaccccgcaacaacaatcgcccgcgagtccccgcttgagctccaggccgacaaaccgggactacaaactgtttcctaggcaggatgactcagaaacctgcaggtataggtatgattcatcaaccgccatcttctgcatgcttgttcgtgcaaccggctgtccgtgatttcatatgactcagtgtttcttgggcaaagtgtggcgtcgcacacaaagtactatgatgcaggatgattcaaagagtccttacacggaaaagtatgaagtaacctgattatgctttccgaagggctcggagtgggcattccccatgcaagaggctgcgcgcttagggggctaatcatggaggtttccctagtacgtgagagagtagaggctatcacgaacaactctttgtccctcaatcacaccctgtaccaactaggtaccgccgcaaacataaattcataacattcaaagaaatatcggataacgctaggcacctcaatgttagttcctgtggtccttgacaagcttaaaggacgatttacccaagcgcaaccactgtattgtcttgcaagacaacatgtctaccagtcctcacagtcgtgcccatcgtacccatcgtatccaccggccgcatcttcgccgtagtcagcctcattactccagccggcctgaccaaatgcctattcgtcatacgaaaacgcgggataaccttcgaactacggctcatgcacaccccattcggaatgactgtatactgcatggagacgacatccttcctcgccggaagcagcatcggcgtcgccatcatcatcatcatcatcttcttgtgcttgttctctagtctgataacaaccgaggaatactcggattggaggatctgagtgcgagtacgaatcgtaggcttctgacgttggcctcggctggcttgtcattctccaaagattgatgggtgatgtaagacgtattgtccgcacaggtgctgtcgtactcttcgtagcgacggaggaggttccctccaagttggaat

SEQ ID NO: 1709 - DNA, 5983 bp, Emericella nidulans
agaaccaccgcctctgataacgcctcgaggctcggctcagctatcttcaacgcattttttacttcgggaagagttcggattgcctcaaggagtggtcttatctctgggcttctttgacttttcgttaagtaagaagcgagttggtcgagtgtctctgcagtgggagggattgtttgcgagccgcagatgatcaaggacgggattgaggaggacatattgcatataatgtacgattaccatttagatactcgataatgcttctgacagaaaaatgtcaccggcaagaacacacaataccaagttagactaatgtctgttctgccaggttttaagtaaagggtttttcttcagctcgatctctaactgcaatgtctaccgcagtaggcgtacccagcaccagccccaaccccaactctagctcgcggagtcgccgagcaacgcagagtattggaaattacgaaaagtcagcatagttccttttgcaacctggtgcagcggctatactcccctttacccgtcggttaatataattcgatagtgtgcagacctggagacgttcaaggaggaaggcttgcagggcgtcctgcagcacgtacttagtacttctcgcaagtagcagtagcattttaaataccgcatgcattccattccttcattagtacactatactgatatctttgttattacaaggctcatacgtatccctgtcacagccccagcgtacaagtacggccgacgggcttacagtacgttgtcagtacatcaagaataagatccttcaaacagttagaactagacagcaaggctgacattgctatcttaaaaaacatgcttcaatctctccttcagaacaacttcgtggccgtactcggtcttctcatcgtctttgggacagcaacaagcctaacatggaccgccttcacaattctttcaccttacctccgcgtcaagggtgcgaagatattcaacgacagaaccggatctgagatcctctggacgaacgcgcggaagcgtttccagcgtggtgcgcgcgagctctttaaggccgcattcgcgcagcacccgaacgcgttttatatcatgacagatacggacgttgaactcatactcgactccaagtacgcgcctgaggtgcgtaacgatagacgcttcgatatcggcaagtataatgaggatatgttccatgggacaattgccgggtttgagatgttcgagaatgaccatgtccttgagcgggtctttgtcgagactgtgcggaataagctgactagggctattggtaggtactatgctcatttcttttctatacctctgatagagtgataatggctaatgtgacaaggcaaattcgtcaagcccatctctctagaagccgctgatggcctgcgggaatactggaccgacgacacaggtatccccgccccaacccgaaatcactcctggtgagattatggaagctgatacagatagaatggcactcgcttccccttcaccaaagcgtcctccgcacaatcgcgaagcaatcttcgcgagtcttccaagggcccccgctctgctacaacccagactggctccgcatcacagtgaaccatacagtgaccttcttcgaagcagccgagtcattaaaagtatggccgcacccactgcgaccactcgcagccaagttcctgccactgtgcaagaagctccgtgccgaggcgcaagaggcaaggcgcatcatcacccctattttagaggagagactgaagcgcgcacaagccagaatggcagaaaagaataatctgccagaaaagaagacagaagtgaaagaagagggagacagcgatggcaatatgatcgagtgggccgaagaaacagccaacggggccatctacgacgctgcgctccttcagatgaaagtctcgcttgcgtccatccacacaacctcagacctcgttagccagacgctcttcaatctatgcagtcggcctgagctagtgaatgatctccgtaaacaggtcatccaggtgattggccagcagggctgggtcaagccggctctgtatcagctaaaattgatggacagcgtgctgaaggagactcagcggctgaagccgatttcaataggtagccttctccccaaagacgatataatgattccagtctctcatctaacaaaatcttgattcaggcacaatggtccgcaccacaacatcccccgtaacattcagcgacggtcttcaagtgcccgccaacacacgaacgctagtatcgtgccacaacatgtggacagagtccgtgcatgagaacccagaggtattcgacggatatagattcctcaagctgcggcagctccccggccaagaaaactggacccagctcgtttcaacgagtaacaatcatctgggcttcggacacgggatgcatgcatgtccagggcgattcttcgctgcgactacggctaaagtgctgattgcccatgtggtactaaagtacgatttgaaactactggacggtcagaagccggttattattgagcatggggcagcccagtatgccaatgtttggtgtccgatcggggtcaggagaaggagggaggagattgacctttctgatctctagttaattggttagattagtttagctggcttatcttgcctggaagacgcggactcaggtccggtattgaaggattcaatgttacctcacagctccagctcagactatacttggaagcaataagtccaccatacacgtgtaaagatagagatcatagcgcacgatgcttcctattcagcaatcaggaccgtgcggggtgggcgtccggcccgtgcctaaatgttaaaagaaattaaataaatagcctaaagctccaacgaggcccagaacaagtgcaggcacagccacacctgcagtcagcataagccctaagtagcccagactcctcctgcgattctcttcccaccagggccccgaccgtagcgatggggccaaaaatctcaactgttcccctcctactatcagcttcgacgctgaatcggccggtaagtccccggaatacgggaggtaataccggccaacaagtcgcaggaggaaactctctcgcgcttgcagacggacgactaggcgggcggacttgtaaatttcctgtatccgagccagccgggttttactgacggattggagaagaaagtgaacttctgcttgagatgagtggtagtcgtgtttgatggccatgctgatggcattggcaagtgctgcggcgtcttcgattgcgcagttggctccttgtcctgtgttgggtgccatcttcccaaccctgttagctgaaccataaccattatgtggagtgatgtaggtaccttatgcatgctatcaccaatacagacaacacggccgcagtgccatgtggaaaagacaccttcttcgaggttcgtcataccaaccacctgtctccgcttccagagatcgccgaattgaaccccattccagatatgatcggctgcaaacagctcagcaattttctctatgtctgtcgatgaccatcgcggtgcagaaatataggggtattgcttgttgagctttcggaggaagaaccaaaacactcggccgtcttttccgggaaatgtgaggaatgatcttccgttgtgcagactcgctacttgctctcctgggaggagatttggaaatgagtctgatataccgaaaatgcaggcgtagtcgactttcaaacctaccaccaacttagcagttacactcttgagatcaaggggcttagaggacagactattcttctctcgtgctgtgacaagacccggctgctcaagttcagcaagacgccacatctcacgacgtactcgactatgcactccatccgccccgacgacaaggtcaccatggtatttggatccatcatgcgtccggacagtcatgctgttcctaccatcatactcctgctctacagaaacgacgcgtttttcaagaagcacacgcgaagtatccggtagagatgtatacagaatatccaacagcttgcgccgttctagaaacgccaggggcaacccaaacctttccatccacagaatcagtaaattctctgtcaagaagcaacttaagacacgacctaggtagttaggtatggaggagagacctaccgctcaagaagcactgtgggcgaccgattggtatggcgaaacccatcagggtacgaaacatgcgctgtagtcagcggctcaacatgtctctgaatctcttcaaaaaggcccaattggtctaagatgcgtccgccgtgtggcaagataccgatcgaggcaccctcctggggagcaatttccgctctcttttccaaaatgacgaagtccacgttcgggagcttggcgaggcagtgggcgagcgtgaggcctgcgatcgagccaccgacgattattacgttgaagttgaccttggccttgcgtgatggtgagggtgagggtgagggtgagggcttcatggtgcgggcagcttccgttctctttccttttctcgttctcgggatagggactatacttcgagctcggctggctttgtttgtctgttttgggatgtggatatgagatggatctccccatgctggagtttcaacctggtctgtacgtcaactatcaatcgaatccttctgtctcttactctggagacacggcccgtgttccctggtgacgtgatatggatgttacagtgcagtagtcctcctcggataaacaagtagatatctatatcgtcttcgtatggtattccggtaatttgcattacaattctgcctttaacttatccggtgggctgcagaactggaacagggggtgcctgcacctaggctctcctaccctgcgcgtggggtccaaaaatacaaaagttggagtgcaattttggcataattacatggtttgtgtctagtcttccatgtttaggtgaccaactgattaggtaggacttgtctctatgttgtgctaccaggcgcttatattatgtaccgctgactattcctggatgattcacaggctggcactactaaaacaaatccgacaatggctctatacgacgttttctctacttccttgactgatcctcttcatctgactctgggcatcctgtccatctccctccccttactttggtatctgcgacgaggcaagcagactcaggagcaagctcagagcaatgctccccgttcctggccctttaacccggctagcttagatcgtaaggaggtatttcctcccatttctagctatacacgccttcttgtgaaaacgaaaatacagattaattgacaatatatcctgctttaactagtctgaaagcccgattctcactttcggaaactcgattatcctccctaatcgctacgctcacgagatacgaaacaatgaccttctcagcttccgggatggcttggagaaggtgcgtgtttccaaaaacggcagcaaaatgagcaactgattgatgcctggctaggatttcctaaccacagtccccggcctggaagccatgttcaccggaacattccataaccatatagtctgggacacggcatccgcattttcgcgtaaactgggtgctctaattgagcccttaactacagagacgggaattttcctgcgagaaaattggtctgatgatacaggtgcgtctcccaccccccttacctccacctcattttcagaccctaagtccagagttaattgtggctagaatggcacgccatctccttaaacgagaccatgaacctcctcatcgcccagctgacagcgcgcatcttcatcggcgaggaactttgccgcaaccgcgactggatccagaatgccattagctacaccgcgcaccgcacagctgcaatgaaggaattgcattggtatggccggctcattccgctagcacactggtttctcccgtcctgcagggcgcttcgggggtgtgtgagggctggaagaccgtttgttgaacgtgttttggaagctcgtaggaccac

SEQ ID NO: 1710 - DNA, 2978 bp, Emericella nidulans
agctttggccgatcttcttgcggatccggacaagcgagacacagagggattggtatccgaggggcatatttgggccaggatccattacctatgcggctgagcatgggcgcaacaagaccataattgacgacgtacctgttctgatgctggtggcgtcttgacaaggccgctctcatccccaacggcgcagggatatccaaacctaatggccatttcatggtcgagcgtgtagatcgtccaccacaaccgcctggctctctcgcgctctaccgagctactcttacgcggagagatattcctatgcaagccgagcgagaaccctatccggactgctgtgcccaggtgcaggtacgccccgacgctatagcacattgcatgcatcccgagactctaagcaagcgtcagtagaactcgaaataatagtcgatgatagcagcataccaacaggccgaaagccttgacactttctgtatctgcctcttcgctcacttcagggaccagatccttggccaaggcaaggtagtccgctgcccgcttatcgtctccttccgcatcttttcctgcgcgagcgatctgattatccggcgccatactcccgatggcaaagatcgagtacagcgaacacagccacgacgcgctcgccttagccccgtggtcctccagcgtctcctccagtgccccgtagaactgctcgagggagtagaaccagtacaagcaatggacttcctggaagaaaaaacccgcgtagcgcatggccatcgcagccggcggcaggtagactcccgcaccgcgcgcactcccagtcagactttcgggcgttctgggtggaagaagacccgttttgagcggtgcgatgaccttcggatctgtattagacgtcgcgtgctgtgccatgcgcgccgcgtggttccagcggatggaagagtctgcgccgacgtagcggtattttccgagtgaatccaacaccatgcaacctcgttcttcttggagggcagggtgctcgtctggctccatgaccccctcttcagcctccgcctctgcgccaacgctttccggctgctcctcgattgccgcaactgagcttctcccttcgttcgccccggcctgagatcgcggcgacgatcctagtgcagcagcagccgcggacagttctgttggactctgcgagtgggaatgtgaatgtggatttgcatctattcgctccttgtcgtgagaggggtcatctagcttggacagaacgccctgaataccctcaacagtaagctcgggcagctcttcttcagacacaaagcgacgcagcagggcaatcgacgattcataggccgcctcggagatgcgatagaaaggacgcttccgagccttgaggttcacctgacacaagagtccgagctgtgtgcagtactggcatgtaccgttttctatctttctttaataaacaaagacgcaatacaatcattattcaaagtgcctacctaagccaacacactaaataatcaaccgagttagctgatacaccaatgctcatcgttccaaattgatgacagctcaccttcgtctttcgtgccttgcaagtctcgcagctctggcgggctctcttccgccgctgctggtcggccgggttgtcgccgggtcgcttctgagggttgaatgtgccgatcggatccatgtcgagaatgtgattcttgctgcaggtaatatcggcaacaagggcctcccctagtcttaagagatcagcgagtggagattggaggccgcagactggggaagcgtgtgcgggggattggagaaagctggggtaccggctgcccggctacttgtcggctaactgcacccagagacggtttgggctgtgattgagttagatactggctattggatataactggtgctaaggcccactttatttgttcgtataacgcattctactgctaatgctagagtcggaagacttgcctaagtgcctggaggtacgattgacaccgccgttaatggtatggataaagtggaaagtaaataagtcaagattgaagtaagatcgaaatttaattgaacttcagattaggactgctctacttgatcatcggaggttttctcaataagcactgatttattcgctttagttgacattgtcagcccaatgacctcctgtcgtccgctatgccttaatgctcttgaaaagccatgcggttagcgacataattgaaaagagagcttaaaatcaaatacgatgcgtctctctatcatgttagtacttaaggcctagcgagtaattgcgggtgtaacaatatttgaagagatgtagtctagacaggtaacagaatcgtgacattattctgcgccagaatactacaatatcattgagcgtaaatagcccattggctcattgcagtaggcagaaaaacgaggctattcgcgcttgcacgacctaaactttcataggaatcagccatggagagtcgatcacgggcagttaattagtgatctgctttgcaaacatgaagttctctattgtcctcaaaatctgcaatttagggcattattcaccatttacgcccaggaatggtgtgtatcgctgggtctaaagaaaagcactaatgaaggggaaaattattgttcctaaagggtttggtattgatatggcttaacacttaagttgaagtgccgttctccaatttggggctttatagatgaccctgatttccattttgtgtttgtacttaggcctggatggttttcaacaagtccctttttttttttttggcaaattcttgccacctggtttccacggtaatatcggcctatagctttaagcctccacctctgaatttatagcttggaacgacttctttgaagccctgagggccattatacggaaattttttctctggggaaccactcttctcttttctcttgtatataactcattcattttaacttttctcatttacacacttcctcattatcattcttgcttttac

SEQ ID NO: 1711 - DNA, 3739 bp, Emericella nidulans
gacacgcaaagaccagggctaatcaaatcctttgcactggctactgtttgcgtcagcggtgcagcggtttccctgtatcttggcaaaagcatgtatgcttcctggtcgggactctcagggcttcacggcctcaaaaaatcgctccacctgccaagctcgcttttcaatgcagggctcggggggttctatacaggctttgccgtagcaactggaatatccagcatcgtcggctcggtggtcgcatcgaagctgtctgctatgacacagatccagtccggcttcacgaagtacccaccgcacatcaagagccgcaagcctcctcgagtcaaccctcatctcttgaaaggattcctcgatcccaaggaatacaagagtttgccacttgttcagaaaaagacgcttgcgccaaacgtttacaagtttgtcttccagctgcccggtcgacaagacgttataggccttcccatcgggcagcatgtagccatcaaggcgaacatcgaaggcaaaacagtatcgagatcctacaccccgacgtcgaataatatagaccgcggtgttttggaactggttatcaagtgctatcccgacggtctcctaacgggaaaataccttgcaaacctgcaagttggagacaaggtcgagttccgcggtcccaagggcgcaatgaagtacaccaagggcctctgcaagaagattgggatgattgcaggtggcactggaataacgcccatgtaccaacttattcgggcaatctgtgaggatcccactgatactacggagatcagtctgatctatgccaaccgcagtgaagaggacattctgatgcgaagtgagctggaggagtttgcgagaaatttccccaaaaaccttaagatttggtacatgttagatacaccgccagagaagtggtcttttgggacagggtacatcacagctgagatcatgagggagcatctgcccatggccgacaaggataccaaaatcatgctctgcggtccaccgggaatgctgatgcgtgtaagaagggtttggtggcattggggtatgaggctccaggagctgtcgcgaagatggatgaccagattttctgtttctaattgtaaatttagatagtaggtctccgaataatggactgattgcagccgtcgtaatctgccctttgctattgccacgcaggggaatgttgcaacttgtttagcaatagtcaagagaggaagaagttaaggaggccagcacatgaccgtaagaggcacgcgagctagattacaaaattttgccagcggccattctcagtcagggactcatatgcgacctgagtaacactttaaccttgcttctcaacacaactcccaaaaatcatcgattccacaagatacaccgtctctcagacgacatttttatgacgagcgcacccaaagaatcccaataaccgcgatattgctacggattgactcgaggccagcagctctaatgcttctgacaaattccgcgccattctactcatcaactgacaagttaggaatatgaatattacattttcatcggaagttggcattacaacacgatctactggagttgaagcaaagacgctcatctccaagacgcgtctgacactgtgcttgaggtctaaattggtccacgttgctcactcttggggccgggcacaaccagattactctcgtccttgggcaatatctcgttgacaagtgagacacgttcgatgatgagacaaggtgtctgtcgccgaatttggaacttcctcgctgcctgagaattagaatcgacctttgagcgcgccgtccacccctgtgacctgcgatgtagagactacttaccatttcgctccccggtctgaatgataatattcacggatgccgatattgcgccgaaagctgatggtgaaagaacgggcgcacccgaccgggagtgctgcagaccgatatccggaatattatgggtatttcagagccttgaccatctttctgaggcaacttctcagaatggattgagaatctgaaagccttctggtacaactgggagttgacggagatgcgacgaagagacttctatttcattgttcagtactacctcacgcaggaaggtcttcagtataaccggaagcaaaggttataaatactattgctaggcagctcccgccctctagttgttctcgaatgcaactttgcatccctattctgatggtatgggcattgatggctgtcaaactgagtggatactcttgacgcgtcaaattcaaccctaactcggcaccgtcaatcccgcggcttgtttcggatcggcgagccgattgcctcacttaccgcttccgaggtttatctaccgcggcatctcttccttctgtaacatctcgacaatgtccactcgccgctatcgatcgactgtggcatgccactcatgtcgctcacgcaaggtccgttgcagtattaatgttactggcattccctgcattcgttgctcgcaggattgcgctgaatgtgtggtagatagtggaaatgagacgtatgacatccacatatagtatggagatatcacactcttaacatgaaatcttagttctcgagcaagtcgtcgccacggcttggtgagacagcgattgcgagcggccacaagcagtccacctaatcgaacagagacgaataccagaaacggaacctcagcgtctccaaaacacactacagattcaccggcgcaggcgattagctcaaaatttaccagccagcatgatatacaagatgaagagcgtaatggtctcgaaattgccgctgctgctttaggagaccctaaacgagctggccatgttcctttctataccggtgagtcaatgtcgctctctggcaagcggtgcctaacatctctactaggggacaagaccggaatcacatcgacgctgtctcttctctcctctggagagtctctgccacagcatctttttataccatctcgacactctacgtctctttccgaagaggaccggaactacctagcaagtaagggcgttttagatctacccagcagcgtcgcttgtcaatgccttcttcaagcatatttccgtcatgttcacactatcatgccgatcattgaggcagatcagatactgcactttttccaggccgggagactgcaagagtataacttgcttctggtgtggagcgtgtttttcgttgctgtaaacgtaaggtttggtaaaagatgatggtatgttcgaaagctaatagctcatagtttatcccgtcgaatatatgcgagcgagaaggatatgagtctaagaaagtaatgaaagcggccatatactcccgcgccaaggtaaggaatccttcaagtcttactgcaccacggccaacgagaaagaaaaacagtgcctatacaataatagtggtgagcgggacaagattgttctcctccaagcctctcttcttttgggcttctggcactccgaagccgatgagcattcgcaaccatggtattggagcggtatctctgtcagtctttgccagatgctgggactgcatcgcaatcccgacacaccgcgatacaacacagccatcatggaccgtcagcgtcatttgtggcgtcgcctctggtggacgtgcttcctgcgtgaccggtggttgagccttactttagggcgaccgctacgtattgatctggacgattgcgatgttccgatgccatcagtctcagatatcatatacgacttcagggatgtcgaccctacggt

SEQ ID NO: 1712 - DNA, 3093 bp, Emericella nidulans
  unsure (1)..(3093): unsure at all n locations
tggggcatttggatatcctataccagatgcaacattagcaattgtcgacccggaaactaatttgttgtgtacacccaatgttatcggcgaaatctggatcgattctccctctctttccggtggattctgggcgctacccaaacataccgaagctattttccacgcgcggccctataagtttgaggaggccaatcccacccctattctggttgagccggaattcctcagaactggccttctcggttgcgtaattgagggcaagattttcgtgctaggtctctatgaggatcgaatccgccaaaaggtcgaatgggttgaacatggacagccggccgcagaacatcgctacttcttcgttcaacatctagtggtcagcactttaaaaaacatccccaagatacatgactgtacggcttttgacgtgtttgtcaacgaagaacatcttccgattgtcgtactagagtcgtacgcagcgtcgacggcgccgacgacctcagggggtcctccacggcagctggactcagcacttcttgaatctctcgcggaaagatgtatggaggttttgtaccaggagcaccatctgaggatctactgcgtgatgcttacagcgccgaacacacntcccgcgtgttactaaaaatggaagacaggaaatcggcaacatgctatgccgtaaggaatttgacgccgggaccctaccctgtgttcatgtcaaattcggcgttgaacgctccgtaatgaaccttcccattggtgttgatccggttgggggtatctggtcacctctagccttagaaactaggcaagcaatgttggaggtgccagaaaaacaatactccggagtggactaccgtgatgtcgttatggacgatcgcacctccacgcctctcaataacttcacctctattgtcgatctactgcaatggcgggtatcccgacaagcagaggagctatcatactgttccattgacggccgtgggaaggaaggaaagggcataacgtggaagaagtttgacctcaaggttgctgccgtcgcaatctatctgcggaacaaagtcaaactccgtccaggcgaccatgtgattctgatgtacacgcattcggaagactatgtctatgccgtccatgcctgcttctgtttgggcgtggtggtaattcctcttgcgcctattgatcagaaccggctttcggaggatgcccctgcattcctccacgtcattagtgatttcaacgtaaaggcgatcatcgttaataacgatgttgaccatgtgatgcgacagaaacttgtctcgcagcatatcaagcagtctgcgcaggtgctcagaatcggagtgccggccatctacaataccaccaaaccgtcaaagcagtcacacgggtgtaaggaacttggacttacaatgaaagagacgtggctgcagggaaaccaaccagctatggtctggacatactggaccccagaccaacgtaggatctctgtctcaattggacatgatacaatattgggcatgtgcaaggtgcagaaagagacgtgccagatgaccagttctcgacctgttctaggcagtgtgcgaagcactctgggtcttggctttcttcatacctgcttgatgggcatctatgttggtaagtgctctattccagaatatcaggcccaaggaggctaacttgaccttaggagctccgacgtatctggtttcgcctgttgattttgcccaaaatccaatgacgttattccttgctctctccaggtacaagattaaagatacatacgccaccagccaaatgttggactatgctatcagtgcgatgcccgggaaaggtttccagcttcaagagctgaagaacttaatgatatctgctgaaggacgaccccgcgtggacatctgtagggcaaccgaaccatgatccttcgcagagtgctaatattctcgcagaccaaaaagtacgcctgcactttgccggtgctaacttggaccggacggcaatcaacatagtttattcgcatgtcctcaaccccatgattgtcactaggtcatacatgtgtattgagcctgtggagctgtggttggatctccgtgctttgcgccgtgggctcgtggtgccagtggaccctgatacagacccaacggcactcgcgttgcaggactcaggcatggtgccagtaaacacacagattgcaatagtcaacccggaaacttgcaccctctctcaagtcggagaatacggagagatctggattcagtcagatgcgtgtgccaaatcattctatggttcgaagcaagatttcgatctagagcgttttgatggccgaatcgaggatggagatcctaatgtgtctttcgtgcgcactggcgatctgggcttccttcacactgttacaaggcctattggacctggaggccagccggtcgagatgcaagtgctgttcgtacttggaggcattggagagactttcgaggtcaacgggttgaaccacttccctatggacattgaaaactctgtagaaaaatgccaccgtaatatcgtgaatggtggatggtgagtaacactgccctcctataagactttcgtctgacatttacagtgctgttttccaagctggcggaatgatagtggttgttgtcgaagtgacgagaaaggcttatctagcatctctggttccggtcattgtgaacgctatcctcaacgaacatcaggttgtcgctgacattgtagcgttcgtctcgtacggagactttccccgctctcgactaggcgagaagcagcgtgggaaggtgctggcatcgtgggtgacgaggaaactgcggacgattgcacaatttagcatccgcgagacagaagacagcaacttcggaattccccagcaccgtatgagcaagagttccaaggccggcagcatcatgggccacagcgctcggagatctacgattgtgcccgaggagcctgtgcctcgctctccggctatgcctgccgtccgcctttgttggaaaacccagcagagccgtcaccaacgctggtgaacagctccgcggcgaccatccccgaagtgccgcagattgcagaacccctagctccggttccgcctcagcc

SEQ ID NO: 1713 - DNA, 3005 bp, Emericella nidulans
tgaagtcctttgggtcgtcgagccgggggtactcggcgctcatactactcatggccctggggttctctccgcgtcgggcttgagcagttgaattagcacactcacgatatatatccaccatcatcattgtggcattgttacatcgttaggcaagtaacaaagtaatatctccatgacggcaagtgcatgttctcaccggagcttccggtatcgagattctatagcatccacgacagcaggagactagaccatagatcacaaatgtcgccggaaacataaactcttctagaacgtatcaagccatcattagtattcatgatccatataattctaattccaggcaagaagtgcctgaagttatcagtatcctacaattgaagataataaatatatagcattcaattcatatacagcaccataaagcgccaccgaatataactagtggttggtacggcgagtcaagtaggcttttgcccgaccacaacattgaacctgctgtcaactgtattcccttcggcgtagaacagctccagacctcgaaaaagctccggagccatttggcttgccgccgcctgatcggctacatatccggttttgagcagtatcaagtgtgccacgctcttgtagaactgcatttgccaattctgcagcctttctagcagatccccccgcttcgaagggaggaaagcccgattgacaatgtttaagagcccagcatcctggtaggccttctgtatcgctttaggagcacattggctcaagttgttgatcgtacagtacttcagccacaaatcacacgccgtcgcagcccttgggtcgtcggtcgccgttcggtaaaagtccatgtcgccccattgtaggtatccccctggctctatacgggtatcaagttagcgtaaatccagagtgtacagccagagttccttactcagaatggtgatcagattctgcacaaccttttcatagtccgattccgtgatggcaccgaccagtagcctgatattcaccaagtcgtatcgattgtggtgctcgaccgggaacggcttcaagatatcatggacggtaaagtcgatgccctcggcggctggtgggaactgggctggggaaatgtcaaagccgtgaaagtaccgcggggactctcccgcacggtcaacgagcagctcccgggcatcccatagccatatcctaccatatagcggttagcagatagttgccgttgcctgcttgattggggcgctatcttacccagtcccagtagcgacatcggcaaccgcagtaatcttctccaatggtacagatttatctatcagcccttcagtaaagtctatcagaagcttgtgctgttcgttaagtctgttattgtcagtatattgttcgatacggaggccttggggcattcaccggcgagattcggcctcatcgcggccgagcggatagatctctgcagcgtcagccatggtcatggagtttattaggaggtttgaaggcttgttcgggtgggactggggtcaggcggcacggccatgaatatatatggattttcgcagggggccttaagctaacgctaagcgccttgtctgacttcgtccaatagagacttttcgtcttccgtgtctttgtaggttcgaaagtctgctcgttcaatagcgcatgctgagtggtggctagctgaagaaagccgaaatgtagggtctcatgcgagctctctgcacgaccccgaacagtggatatcagctggagccaatgaagcgcatacaacgcattggtggcattctgataagcagtgccagttcactaggatagccaaagcactgacgacttgctagcatactattttataagcggttggcagtggcaatttgcacagttgagactgagtgaagagtagaaggattgtagccatactggcagagcatatatggtaatcaaaactaaaacccgtgctgactttgactttccaaaatcaataaaataccataagcggagactctgcaggaaagaatggcagcgcagatatatatacatggacagaaacatccgggccaatggagtaatgaacccccaatcgaatgctacattccggaacaatactcgtgtctagacggctgcaattctcactgaagcgaaatgaaaactattagcagtactgagtggagaagctgacatgatgactgcaacaaagtctcgaccaacttggagcccttaagagagcctaccaggctccgttcggagatcgggtcactgcggccttagcccgaaagaaggctaaccgcaaatggttagtgcaggttctgccaccggccgtggacctcgttggccaattttgaaggaagcaagactctccagctctctctccttctcctccgcagctgatttttggccatgtctccttaataatgaagccgttacagctagctttacgaagaagaagcatattcattcttctgcttgcgactcccaagtctgcgccatgaccgacaccaaccgcggacacccagaagccgagaatgacgtcaccgcatcccaggtcgctgccgtttgcttgatccaggtacagttttcctatgtttccacgggcactgcttgctcgattacttaccgcgattagcgtgtatatcggggataccgcacgcggagagagcttcagggacgacacttgaccgcgacaaatcgctggatcgatgtaaggcctcgcattggacgtggtttcgacagtaagctgaccgcgcagatcgtcgcggagacgcaatcgcaggcccgccatcgctcagctgcatccacagcaggctcaccggccgcccaagcccatcgtaactggagccatgccgtccatgtggctaagctggctcgcggtgatagtcacgctcggcagcgcgagacatcccttcaacccaccaaaccggctccggcaacgataagcaaggccatggatctacagtacttcctcgagatgatggatccaagtcatcgtcacgggagcaacctgcgaaagtatcacgagtact

SEQ ID NO: 1714 - DNA, 4938 bp, Emericella nidulans
tttttgccaatgtggagaccctagttaccgaaactctcccttaagggtttggcttgagggaaatttttcaggttgcacccggaagttaggtctgcaatttcccccgcaggggaactccatgtaaaaggcatcctgggtttatccagtgccttagaacagctctcgtgtgggctcttgtaagctgaccaaaacggcaatcttctcccaccaggggggtttaagctaaaattaatctttagttaacatttttctcccgttaaggcaagggatacatacgtcggtgcagcagggcattctctattgagaacggctcgaccatcagagcgcaattcttcaccctctcatatcccgcaagtttgttctttttcgctacacgctcgagatccctcaaaacagccttcttgatcttgttgtcctgcaataccgctttgatgcctgcgacgtcagtagggtcaatggttcgaccaagcaccttgctagcaaacgaagcgaacaactcggcctggacaccaaagatagcaaccaagaatgtctgcatgctatcaccgtgcacataaacttgcgctaagtagcccagctcagaggagatgataccctccaggcgttcgggtgagatatactctccctgtgctaatttcagaacattcttccggcgatcgataatgatgatgcgacccatatcgtcaatcttagcgacgtctcctgttcggaaccacccgtcttcagtgatagctttggatgtctcctccggattcttcaaatactctttgaaaacattggggccacgaacaagaagttcaccgcgagggaaaggcttgtcatcaaccgagtactccatgtccggtagggacagcagacacacctccgtgcagggggcgacgcgtccacagttgccagacgtaacatccttgggagactgtgcgcatgccatagcataagtctcggttagaccgtagccctgagaaaagtctgcgccaatggctactcgcaagaagtcgtgcaaagaaggatctagaggcgcagaccccgaaatcaactgcttcgcattttctaaaccaacggccgcagcgactttcttagcccaaattcgatcatacaaagcatgcttcacggtagctttgctaggatcggggttcttcaagtttgcgctcttggctgcaacaatgtgtttagacaaagtacctcggaaaccaggggcttcgatggttgcagcacgaatagcagttccgaagcggctgtaaaggcgtggaacggaaacaaatccagtgggcttgagcaccttgaggtcgtcaactagctcgagaatatttccatggaaatagccgatgcgcgcaccagaccagagcgcggcatgctccgtcaggcgctcatagatatgggcgagaggaaggtaggacgggaatgtatcaccccgtgcttgagaaacggagacgagcgcgccagaagtagctgcaacagcgttctcatgggtgaggaccacgcccttgggagcacctgtggtaccggaagtatagttgatagtgacaatgtcagaaggttttggagggttcagggggcggttggaggcggcccccagggcttcgacctgatccatgctgtagatggtaaggtcatggccagcagccatagattctaagagagcgcgcttagagtggccggctggttcacccgcttcgagtgagtctaagctgacgataatcttcaaattaggcaaaacaggcttcagcttgatcagtgtcggaatgtgaggcaatgaggccacaacgcagcttagctcggcgtgattaatgatatactgggttgcatccgaggcgagaacatcgtaaatcgaaaccgaatataggctttgggacatgcatgccaggtctgaaactcagcactatccggtatactgaaggaagagctacgtacctgtgatctgccactctggacgattctgacaccagagaccaataccgtactgcccgggtcgagcacagttatgcttgtgatgtagctccaccaacccggcaccgaaatcggtacgccgtttttggactgtaccatagcttatccattggtattgaccccaggtcttcttcactgggtcgtaaggacgccatccaagacaatcggccttcggggtatcattcgcggttgactcaaaaatctcatgggcagtggtgacctaaaatggttaactccatccagcctctcagcaaataataaaataaccaagctttatacgtactttaggatccagcgttttaaccagctccttctgtgtccaccaggaacggtagattgggctccgtccatccttctcggtgccaggtatagcaacagagtaaggcttgcctttcggaggctcctgagtaagctccgccgcacgggcatagtgagcacgttcttgggtgaagaacatggctgaagcagaacagatatgaacggggatccagtcctaattaaccgtatagcgagatcaataggtactccagacgggaacggaggggtggcggagttaaaccaaaggagcaactctcgactgttagcggcgacgtgccgtgagaatataatgacctcaatatgagcgttcaggttgaggacagagcaagagagagaagggggaaggaagagggagagagagaaagatcttttggaagtaggagccgagaatcgaccatcaaccacgagtcgcgcacgaaacggggatgtcggcagtcccgaaatttagcagtatacccaatcggaggtgagtgggcctgccgtttacggaaaaagcctcggtattttgccaactccaggtttcgataagaagcagaaagagttgttgacctggagccgaggccataactcgagttcacgtaaatgggaatatatcgtttgctcctccgaacttgctcagaagtggtaaatcagtgcggttctgtgtttgcttgctcacatgccttgtttacacaaagcagcgacgtacatcacagcccgtccccagacactaaagctgcaacccttgccaagaatccgaaggttaaataaatggtctaagaacgctgcatgtgaactgtgaatccattatgtccagtcgtgtctggccactcatattgcacaccccacgaacggggtaccccgtgtactgatttgactgctagtggtcggtggcgaccacggccgcacataggcagtgacatcgactttggtaagagcctagacatgcggaagcggtactaggttatagcatttacgacacaaattcgatcaaattttccaccttctatactataaattagtatgcgaagttgggaattttggaatcataattcacgaataacttcagggttggtctagacttgaaatctatagcaaatgaagattggttcatcatgattgtgaaacagtcaactcaattcacccaactccatgcgatgcaaacaccaaatatgtaaagtcataatgtacaaaacggagatggccaggaagataggaacatcgtaactgattgctctccaatgtgcagggttatagacagtaaggacacggatctatgaaaaaactgatcgataggcccgcttataccacttctcgtcggagattgtagtctcccagtactcattttccagcgcaatacggccagtgtcgatgtctgcctcgatagggcgaatgaacgatggtcgatagacaatcttgtggccaaggtacagaacgacgaagagaatcaagctaatgtatgcgacgaagaaatcggtcacgctgaattctgggatccaggcagtgaatccctgggtaatgatgataagaacgttgaagaaaaggccgtaccatgagaaccatggctgccacaacgccttgtaagggagaaggtcgcgagaaatgttgcgagcttttagagcacgcatgaacgctaaatgacaccctaagatggacgcccatgaaatcaaaccagccacactggagatgttcagaaaccagttgaacaccgtggcacctgaattggaaacgttcatgaatcctagcagaccaaacgccgaggcgaatgccacactgtaatagggcacaccagccttcgaggttttcttgaagaaacggggggcgaagccttcttgggcaagaccgatcagtatgcgactggcgctgtagacgttggaattggcggcagagagcaccacagtcagcagaactgcgttgatgatatccggcaggacggcgactcctgcatttctggccactatgacgaacggagaggcattcgcatcagtggaagaattcaaaagctgcttgtcgtcactgcgcacaaggatgccgataaaaaagatcgtcaaaacgaaaaaaaacaggatacggaaaaacgtcttgcggatggccgagggcactgttttgcggggattctcggtttcaccggcagcaataccaactaattccgttccttggtaagagaatgcagcctggatgaggacagcccaaaaaccaacaaatttggcggtcgaatcaggtgaaatattatcgtaggccacaaatggccccggatgcacccaggtgtcgaatcccatatagccttgttttccggcaccagcgttaatgcatataccgaagatcatgaatcctgcaaatggttagttaaagtaatattgggctattagcggcatccctacctatgacagtgaggactttgatgctagagaaccagaactccagttcaccaaagaaactgactggaagcatgttgaatagagtaatgaagacccagaagacaccaatgaagattgctatgttaagatcctggttccaaaactggataatcaatccagttgccgtcagctcaagggcaaaggtgatggcccaggagaaccagtatatccagcccatagcaaaacccagactagggtcaatcaatcgagtagcgtaggacgtaaaggcacctgggatgggcaagtatgtggcaacctctcccaatgctgtcatgac

SEQ ID NO: 1715 - DNA, 960 bp, Emericella nidulans
ctggcagggagttaaggttaggttaggtcaggttagtttagcagacgtcgaacctagtgaatatacgagagtttgtagaagacacgacttcatggccgatcgttcctatatcttccgcttggccatacggcgtagatctttagctaaggtacctacagggatagatcctccaatgcggctccgcatgggtcgaaccttgaaaccacgtcagatgtgcgggccgatctcttggaggacccagtatggatctgtccgcatacctaaagctttccccgcatttatattattctgattcgaagctggggtagactagcccctttatggttcaccaaaagggggtggattgacgctgctaatgtagatttccgtctgccgcatttgacaaccccagagttcctcccctgcgcagccctacacttaagagcaaccgccctctttctgagtgccaggtcttgtaggtcttcctgccttccacggacgcttctcctctcctttgagataccaaagcattgagcccagaaacagcagaaatgactaccgagatcagtaacggtgaggccaagggccatcatctctccacgataccgtcctctatcaccctctctgcggagcaattcgaaaagctgtatctgtccccaatgatgcgccagcagcccagcctggctaggaaagtcggcaatccaactccattgtgagcattctgcatgtccccagacactcactcggtgaactaacgcacgagtttccattcttcagggcactagggggctttgtcattaccactacccccctctcctgctgcctgatggcctggaggggctcgagcggtaacggaattgctttcatgtaagtatggtccagatactcaatgcatagccttgtatgttacaaggcgatacagctaacgagaacagtgggccgattatcttccttggcggacttctactgctcatcacgagt

SEQ ID NO: 1716 - DNA, 2146 bp, Emericella nidulans
atctaccaccttcttactcgaatctgaatcaatattgtctcacgggccaagtcgatctcaacatcggtatcccagtcactcaatgatgtattcagacacttggagaagactaccgagctcaagtgtgaagggtacagatcgaggagaacgcggatgccatcgttactaatgcatcagattttgtgaagcaagattgagccaaccaagttcgaagcataagatctggctggagcatggctggagcatggctggcttaggcccttcccctggttctcgtcctgattcacaccatgagactgaggcaggattgtgcgccgcatgggatatttgactttgctgtccattcctttgcggtgctcgtttggtccttgcttgacttcgctctcggagcattctgtctatggctctgttgttggtattgacgattttgtgcagttgtcgttgccggcttattctacccaaagcactaaaggcattgattttcttgtattcgagattgatcggcttactctgctgagcatgagtgctgcctatatattcataatcgtcccatttggatattgctgcagcccagctactttccagcggagaatacgtgagagtactttactcgtcatgctgattacgttggccggtacatagccgcagtctctcgtcggggagatgtgaatctatctcagtccagcatcacagacctctacagctattgacgtagacggggctggtgtcacggttgggtcacgcataggtcacgcataggtaggatcacacgctttaagagaacatgggaagggctctggtatagttcgacagttggtctggcagatccatagcttctgggatcctgcatgccgatgcggaataccaggccacgagacatggtttggattttttaaaaagcttttatgttattgggcgaattagttttgtctttgattataagtgcatgcaatttccatgatgcggcaatgcgcctcaaggcaacggcgtctggcgaagctcccccgttcctgttcttttagcctgatgtcgattgagtgactgtataggagcaaagagcggggaaatgatatgccctgcatatggtttcgtcaacatctgccagattgaggcgctcgccacaccatacaattaataaacttagcccggcgcgggctcttgctcatccgagtaaatattcagcaaggtactgggtgaggtgagattctagctgtcgtattttgatgcttttccatacgtctactactcttacagagtacatatattaaacggtaggcggagagcaaatgaggtagtgggaacaaagccaggtactgagcagacttggccggaagtattctaaacggtgtatccgttctactcgtatactaatagcagcatcttggtaacactcttctagttcaccagacagcctcagccaagttccattatcttatactaagacacaaacgcccgaaaatgaataccaaacgtctcttatctgctcctgtccgccgattgcaccgccaccgagtaaggaggcggcgcatcctcaacctcattcctaaccccatcaccaaccccatgccgttccccgggcctaactacaacaggtggaatctgctgcatatgaatcagcgtctctccagctccagctccactgccatgaggattggactgctgctcctgctcctgctccttcgctagagtccgagccggttccgggctccacgtttcacggcaaagcaccagatcccagccatcaagacaacgccggttataaggggaagcagcacgatgacagccgttgggaagctgtggctcgaggagctatctgtgctcgagtcggagagaaaatgctcgaagtctggaaggttcgagtcggatgatgacatggttagctcgggactggctgctgttcggtgccgagtagatcagtgtgggagttctggagtgtagtaggctgttggaattgaagctgaagctgatgttgaaattgctgatgctgttgttattggttcgtgagcaggatgatagtgatagggctttgccgtagatatagctagtgcagcttcccgcgtgcctcgccgagtgtctcaccaagtgcaaagaacgacgcagacttcgcccctggtaacatcaaggattttaagacgttgaaaaagta

SEQ ID NO: 1717 - DNA, 2306 bp, Emericella nidulans
aaaaaaagggatagttaaagacaaagatcccttacccacccgaactgtaattggatcccaccaccccagcgaatcttttgtaggttttggcaaaacaaagaggccaatttttaaaatgccctccttggagagaagatcgtatctagaattggcctgatatagggccgaaagaacccgtagctgaacctcagagcaatatgggaaaagggcagtccttgaaacatgtttccaaggtctcgtccacttcccgtctgaatttccggtaataaggcctaaagtccgaaaaaacgttaaataaccgttcaaagagtggccctgtcacgttcccagggtatcccctccaacactaagccttctcagaaaaagaccagtctgcaaaagtggatagctctaggttataaaaatcggaacttcaagccggcgaagcattctttcgagtcgaaccgtttccctaacaacataacttgacggaaggattggggtctgggttcctcagggtttgattatggttcatgggctaaaaaggaaagccttgctgctcaagatcggcgccgtcgtcaattcctcaatcgagattggcgacgtgattccttggaaagtccgaaacatgtcaacaccaagtctgattatcatggcagcatcgatgaggatcttgacctcgtaggaggctggcatgatttgcatttgtaggcgaggctacaccctggtttctaagcaatatcatcgcgcgccttgtctccgttctcagcctttcgtgtcatgttgtgtctgtttcatgcgctcgaagccaaagtcggttcttctcacattcgatatctcccatccttacaaaattcaaatttttttttgcacaaagaacctggtgtttgtcaactcttatctcgcgtttcttttctctcatagaccatgccttttactatcaccaagcgctgttcgcttctgctctcctgtataatataatggcgcgaaatatcgaaaagtggttttgggaggcgatccttgtttgagattgacaccattttcctcttcatcaaggatatcgatatgttgacgtctttcgcctcacgcatgttcttttaattacagtatcaacatcacgagcggatgatgaatggacactgggaacgatgattttgcagtattatcaactctactcaaaggaaagaaatgttacgggaaaagcgtgtttttgattctacccagcaggagacagtcctggcctggcattggactggtttcgatgtaatctagttctactgggtagccacggaggatacctctataattcaaaagtgactcgtacagcatttattcttttatatttgtaattagtaagaaatacctattttaattataatcagttcggaataccgctggacagtaggctacggaatatcttctccgaacaatagtggtaagccaccggacaaatttgccttggtccctgttagactctacatcccacaaaggacggagcgccaagcggtgaggatctgaacttatcttaggtctttttaaagcccacctttgctgtcctcgagtaccgttgtcactccttttcttgtattatattcctattccttgtaaatcatcgactacgtttctagatattgccgagatatttcctccgaatacagtccctagtacctagcttggctatcgccacctggccaaaaaggcacccgcggcgcgaaactacaattacagaacaaaggttgtcagacggtcaaccccacagaaaccgataagggcttccgactcttactctaacactcaggcccacttatcttttcagtcggagaagggtagtcttcttatatcccgatagactatgttcgcgcaatgagtccagtctgaaccgagcttcgcgttgacaatgctggcaccccggtggcttacgacggcgattttcgtgttgacctatattcaaaaatccggcggtgactctcagaaacaacccgtatgccttgcaagggactggagggaagccgtagttcctctgaaatggcccacctgtgttgaaacgcgttgggatcgatggccgaacggtgaactgacgacgacaccgacaccagcatctcataataacctgaaatctaccagcggatcaagctcggtctcggtctccataacggtagagccaggtccagcgtcctcgttggcggatcatgaattggataccgagtcaccgctcgacaacgtgaactttctctcttttgaagactggaaaaaacaaaatctcgctagggcaggacagtcggcggagaatatcggcggcaaccggcgggcagggaccgcagagaagt

SEQ ID NO: 1718 - DNA, 4114 bp, Emericella nidulans
aagagatggcgcgactttgagaaaggtatgtctatgctcactgtgctacatgatgcgcggactgctaacgatatctactagatcgtcgcttaagaatgcaagctgggtggcagctgccggtcggtgggcatccgccaatgccatatgaaccgtatccggaatactagtatctgcgatctacctcttgcattcccttcatgtcatgacatattgtacattgcgatttgatttctttctggatatagctggtagtgttcttgtgtctatagtatagtggcctttaagagcgggatcccatgttaacttcgggattctgtgaaaaataataccaaagcctcatgcttaacccgatgtatattttgtcttaaccaaaggaggataaagaagtgcctgactattgtcgaaatactcgatagttatgcatggtcccgacgtcttgcatgtaccttttctagaagaccttgccacagcgacgagcgcgtagcgccagggttgggttgcagtagatatgcaaatgacgagcgaagaggcttaagcgttgtaattattgatttcttgcaggttgtgatcatgtaattcatatcttacctcagagaatgagtacttatcgtcgagcactctaagaggattttcttgctcactgcaatgagactgtggtgtggtctgactaagaccgtcgggcccaagttcaatgaggcgacctcagctcgccttctccaactccacgatcttcctattcccttctcagactggccagcatatcagcgaccgctgcgtgtgactccttgagacgcacgttgtcctcgccgtgcagtagtattttatccgtatcggtccctcattcttccaggtggcctgctgctcccctcctttcctgcaccgtgagcgccgctagcagttcgctgggcgttgtcagactactctgtactatctcgtcgacactgacagtgcagtaactcctctttttgttcagtgcggtacatcaccatttactccgcttttttgcacccctctgacaccccaggctgcgcctcagtctcacatcttacgtacatccgttccaacccctcgtcgcggtcatccgacaattattggaatctgcctcttcgacgacgcctccaaatccagtcgcaaaatcgcaagcttgtgcagtcttcaacagaatatatttctagctccattattgctcgaccctacggagtagtgtggggtggtaatggaagacaggctgcggggtggacaacggttgttgcatgaccaagatccctgatcccaaacgaggcaacgtggacgaccctcggtgccaatcacgccttgtctcctgcccagctcgtgtacccttttcctgccttatcattcggacgccacctcgcttctcgctttccccgcggattgtgctgggcttcgaggtagttcattccttttgtcggcagcagccaagcactgcgctcggcggccggaatgcctagtcagtgtgagcgtgagcattcttttctgccttctacgtccgcatcccaccttttgtcaccgtcaccttccaggcatttggaccaacattcgcacgatcaaacggcgtcattagcggattcgccaccatgcgatacgccgggtttgccgcgtgagcctgaagtcttgccatttggggaatcttcgcggtttcgttcacaagacatggcgccggatgatgatgcgcatcctgcgggcgcccatgcggccaacctgccagagcagcgtttagagcggcctgtggatgggttggattccatcgcgacctctcttcaagacccctattccgatgaggcgctctccgctttcatgtcggtacctcattatccggaggcaaccagtcacaggacgagcattccagtgtccgaaatcgttaatgcggttattgaaccaggagacttctttcgtcgccagagcacgtctagccagagaatttcaggatcccagatctctccgccaatggaactgtatgtgtccgattcggagatgactgatacactgtcggaggcgggcggcgtgcctttagaccaatatcacatagaacaaatgaggctggccgagtttgccagccggttcgtccatgaggcgattgctcagaacaaccacgccgcagtgtcagaaacaaccgaagaagccagcgcaacggattcggtgatgcaatacgagcttcatacgtctgggcaagagccaatatcattctcaacggcggaggacgacgatgacacgcggaagttctacctggactatggcgatgatgactacgagaccaattcccagtcttcctctagcggtgacggccactcgcatgtttcaaacgtcgatttggacgatttttatcgaccgccgggttacacgtatggctcccaaatgtctggattcgaccctgcttccagccatgaggatcataccaacttcttttccgacgccgaggacgcaaatactgacccagccgcggaccctcactttgcagagtccgtcatacatcatggaaccagtgagtatccaacatgttcgtgtctcagcctgattgctaatctggcgacagcccaagagagaaactatgatattgaccagtttatttcgcaatggctctaccaatcgtctactgcgtcgataccaatgctgtcactatcgccgcaggtatttcttcagagtactttatccaacatcatgcgatggcagccaccggcgaagatcacgcggccgagcggttatactggagacttctacgacatccaacagatcccctggtgggagaggttgcgggtgaggcgagctgatgcgcgccggttgcgagaccagacgtatgaatcgtaccaaaatcttccacaatacagccagcgacggacagggaggaggctgcctgaggaagagttttatttccagggaaaatcgatgtacacggctcacaaagccacgatcgaacacttccagctccgcaacctgatgtccgttcccgcgtacaacactgtacactttgcgcacgaatccaagttgtattcgtgggttccggcatatgacgacttgcaatgtctgatcgacctgtccgtacctaatgctgagtccggttttcagggcccggtcaagatttcgaccatgaaaacggctgtaggtgtatctattgccggcggcttcttcggagaatatgccgtgcgggctatggggactgaaaccaagggagtggaaggatacgttacaaaagaccccaacggaatcaccaaccacatcgatatcatcccaagtcgcacgaatcggtcgccaatcgggatttttgcttctaatgatcgccatgtgcggacactagattgcgaaactaacacctttcttactgatcatgaactcacgcatgcggtcaactgtacatctacttcacctgatggtcggctccgtatcgttgtcggcgactcccccgatgcctgggtcgttgaagcggagacaggccgaccggtttaccctctgcgtggacataaggatttcggcttcgcctgcgcctggtccccggatatgatgcaggtcgccactagcaatcaagacaagtcagcgataatctgggatgcacggacatggcgcatgctggagaagatcgagtccgacgtagcgggctaccggtctctacgattctctccagtcggcggaggtccgcgcaccctgctgctctgcgaaccggcagaccggatagtgattgtcaatgcacaaacataccgatcgcgccaggtccacgacttctttggtgaagttggaggagcagactactcgcctgatggaagcacaatatgggcagccaacacggacgagcggtttggtgggtttatggagtacgatcggcggcagtgggggcagcagtatggcttgcagcagtcaccgaatgaatgggtcaaggaggcagatcttgacgaagatgagcgctgtatactcagcgaacgagaacgacagtcgaggcacttgtggaatttatgcgacgaggggcacgaggagttgctgctgtgctagccatcagaccttttcctttgttgtaagttatattacgttggtttatgccggttgtttgggtaacagcatttcagcggagataccacatcatacccatgtacactggagggtattaact

SEQ ID NO: 1719 - DNA, 3765 bp, Emericella nidulans
  unsure (1)..(3765): unsure at all n locations
tcgaacaggtaaaagaaaagctagatgacaaggttgaggagaaacccaagaacaaatccgatacaaaggcagtcgaggacgccgacgataaagagctgactccgcccgcctatgaagcaccgacggtcaatgctgaacaggaaactgaatcatcggagccaatgcctaccacgcagtgaagattatcctcagcagtgcggattttgggtacaccacagactaggaaacctacacttcatgatacatagatggcttgatctgcaaactctttcttctttgtcattatctacggattttggttttccggcagccggtttccttcgtatttccttggacgaggcgtgggatgtatgcttagcttggcttcatgttttcgctgacatgttctcataccccacccctgatgctcgttatggctcacgaatgatgtattttgctttactttgcttctctagctcgctgttaaaatcatgaatatgaactttctcagaataacgtgctccgctggtgggtagcgtgtgtccaaggcaacctcggtaaggcagagatagttgaaacctaaggcacaaacacatatcaaacccatcaaacactttaagactaattatttccagctctcccactgcatttccggcctttccaccttgaaaagtactgaccctaccactaccacagcagcagaagctgatccaaaaaccacactatctcggcgcgaagcgcctcaatattgcaccccttttttgacttccgcatctgcgagcaatcaagctcgatcaaccgcaatggcgacctccgcagcttctccgatccccagctcacattcaacatccaccacaacccccaacccgaacccaaagcctcagccttcacaacccccggtctcaattctctccacaccatttgcgggtgtttacgctctggcccacccagctctcctcctttccctcgtcgcctaccgattcagctctgtcatcgagaaccccgttgctgagctcttaggcaacataccctacctcgtcggactccaagttgtctacgtcatgggctgtctcccgcccgccgggagcgaaaaagatacctctggagccggtaacaatgaggagactaaggccttgaggaaagtcgctagcacgggtgcgctccgtcgccgcggcaaatcttcgcctggtacaacaagctggtcctccggattagtcctcgttgcgtggaagttaaccgtatgcccatgtcgacccgacccatggcttccagttcagcattaagctaactctgaatagcccgccctgctctccctaacgctcacagctctcctcgcaactcctgtccttgcattcttgcttgtcctcttcggtgccccgctaacgacccaccacgcgctgaccttcctctgcgcggcacatatggccgtcctctcaactttcccgcttatctacacacacggcgttgatggccccgtgtggagagagatctggggagcggcgagaccatttgatactgtgtggggtggcgctctgggaacttgtttgggtgcctggcttggggcagtgccgattccgttggattggtatgtctagcatgatttttctccccattttttcttttccttcaagcgtggatggctgacttgttatttgtgtgtgtgtagggatcgtccgtggcaggcgtatccgattaccattttaacaggggcgtatgcggggtttgcgctcgggatgcttgtggggagggtcaaaggtgtgtttgggaagaggattgagtttgcgccggtgccagaggtggtggaaccggtgcagggagatatgaagaagtctgagtagcgggttgacccattcaatagggccctagctcaaccacggtgtattttgcctttatggtgcattgttaaggcgagtatcatctacccatcctatacattattctatcttacaccatgcaatataatgtatttgtactttagatttttataccgatgatcatgaaaatgaatgtattctagcaaccaggctatgccaatgcaagtagatgtgaatgatatataggaatgacatggggaatcaacaggagatggacatcaacttagatcaccaggacactcaaaaaagtgtacaaagaagagaagaatggcgtgtggtatctcaaattactcaccgaatgctgaaaatagtctatatctaccatgcgccgaaatatttcgcttcctaatgggaaaacgataacgatgtgggcggtcaaatcatattagcgacttcaacccgacgagtcgcttgccaggtacgaaaccggtcgtctctgggtttcgcttcagtgtgatctcgcgagtaactagactcggggtcgcttttgtaacgagactgagaggagagcttgtctggcgtttgtcgaggcgagctactaggggagtcatctggacgtatgcgcatgtactcttcagactcgaaactgcggattgggtacattgttccgacgccgatagagtcgcgggccatctgggtgagtcgttcgatatcttctcgaaggctcgagacttgttgctcaaggttccgacgggctgtttgttcgcggcggaggagcatgactaacgcactgtattgctggacagatatggcgccggagtcactgttcaaagaaaccattgaaggtgcttgcagggcgcgggcacgttgaatgtcactcgggcttgggcggatggtgctcgtgcttaaaggacggtcggtggatggaatgtgctctgctgttgttgaagagtcatcgcgagttgacggtggagaatgaccgggtgactttgcggaggactttgccgatgacttctgacgtttatgacgagaaggttccgagcctcttcgcttcggcgcatcagctgctggcgtgtctatacggccactttgcatccgagcaattgcaaactctaggtcgatcagttttacttccagtgtggtcatccgttgctctagtgaagcgttgtcgtcggtttgcatggagctgatgagctctcccacattgggaggtaagctcggaggtggaatgggctcagtttctgattcctctccgaaagccgacgtatctgcggaaggtttgaatgtagaagcagttgctacggtggaccgagtaggcggacgagaagaatcactatcaggcccaatgccgcacgtggttgacgcgagaaattcagactctacgctccgccgtctcttccactgtatcggagacatgcggtggtgctcctgtgccaggacgcgaagagcacccgcacttcgcgagcgccggtttgcgttccgcatccggcgtcgtcgtatctcctccgggtcgctacacgcatgaggactgagctttaggttgctagatttcctctcagggtgcacaaccgcctcaagggcctgtcgagattcatcatcagagaatattaagctgggcaaagtggctcgcctttgcctgggttcggtgtctagctgtttcaatacgacatccagcgtcgttaaggtttcagtgggttgttgaactaaagcgccttggcgagggctccctgagtttgaagtatctggagacttatgtcgatgacttgtcggaaatgtattgtcattaaagttgaagtccgctatgggatcgtccagctcgtctgtccggcttcgcgtntatcgtgtaaagatcttcttcatcacggtcttcagcgtacttcccgtccggcggtgattaccatccctccttgaatcgaggttagattctgcggatacggtaaccgtggatgtccaacttgatgtcggcgtgtgg

SEQ ID NO: 1720 - DNA, 3624 bp, Emericella nidulans
tagcacatatttgttaaccctcactcttaggtttgatttataattcggttatagcttcgctacgagcccattcgtctcgttcatggcccgttccttttgcctctccctctccaaccgctgttcgctcgtctcaaacaaacttggcagtccagtctccgtatactgagcaccctgcaccaccatcctcgcaaccccctctgcagccaggaaaacctgaggcattccatggcccgtcaagcctgcaagaatccactgattttgctccccgggaacacggccgaggtgtgggagattatcagatgaatatcccattactgtacctaagtaagcacgttagcaaccagtccattccacacgcttcttcgcctcctgaaactccaagcctgaaggggtggggatcatactgcctgtccaaacaatttccgtcactgccctagaactctcccaaccgacaaaatgtttctgcatatacccgtcaaaatacctttttgcagcatcaaggacaacgctatcatctgtaacattataccaactggtctggccatggatgaatgctggtcttgcgccgccgacaactatggacccgtcgcttcgagggacaggtagtcgtagtttacggtgttgtgccggatcatgtaggaggttgtcagcttcggcgggaggatatagtcagatgcagatcgagaggatgcagaaggggggatgacaatccggccgcatgtcccgcgaacaggaacgatgctatctctgtaccgtgggatgagagatgctgtgtagctgttcgttgccaggatgagtttcttagctgtcagggtgccccggggtgtttgtagtgtataccccgagccagactcggcaggagagagagacagaacaggcgtatgagtctggagattgacatccttgtctactgccctttgcaagaggtgcatgatgagcttatatggccatagatgaccagctctatatgtgaagcacgcctttgcgccctttatgccggagacctgcaatctcttcagtagcctcgtcgacagtgcttttcaaaggtattgagcacgaacatcttccgcttcctgcggtccgaattacctcgtctgctttattggcttgacacccccggcgaccaacttatcatccccgcgccaaaggacgtccgcgtggtcctcgccgagcattacatcaatggcttccgtaacgacgaggtagcaatcactattgttctttttgacaagagacccaatggcatcgatgtgtcgtgcctcgaattcggcgactttggatgcggcggacaggccgtactggctagccagggtgaagacgcggttgaaagggccgggtttgaggtgcccgcctgtgtgcagcttgttagcgagtagagacgaagtgattgtgatgatgagactgagggcaaaagggagctcggggttctataccattcctccccgtcgcaccagaacaggcctgtcttctctctagaatgacgatactgggccggtctgagcaatcagttaactcgaggatatgatgtgcaaatgaagcgcctgcatatccagcaccaattatcacgatatcgcattgatctggcagaaagtgtgcactgcggtggtcgtcgagggggtggcttggtgcgccagaagggcgttgttggtttggctattgggtagggattggccattgtgagattggcttatctgtaggagtccaaagccaagatctcagggtacgatagattttttaatctctttatgagtaagtagcaagccgaccgggtcttcgccggtgttgggcgtatctacaggccgggccttaagccggcgtgccggtgacttggagtaataaggaccctgcagactgttatattttttctttattcggtctatctttatttcttcttcttagttggagaagatagtaggttgtccaatccgttccttactggatagccttgggtattctgcgggcagcgtctgatatcaagttggagtaattgatgatactgtacgtgaatttggagactggcgatcagtgtccaaaatgcgtatacatggcaaatatgcatgcaaagaatcaattcgcattaattctcaagtatagtaactaagcaccagcctggcttgcaataattctgtccgccatcccgggcagcgtctcatctacaacgtccatctccccaaacagctccgtcagcggctccttcccccaaaaagacgtataagctcctttaaatctgcccaagatttaattagcattaccatagtatcctatcattagaatgtagtgggatctactcagctctcctcgcggctgagacatcccacatatgccctgcggcaaaccaaggcactctccctccgtgctcaggcttcagtctctccagcaagggacgatacgcttccaaatccggctttcccacgatcaaatcacctgtcggcatctccacgccctcgttctcaatgtacccggaaacacgcttcgcatcgccagctgtaaaacaccataccttgaacccggcatcccgcaatttctggacgcactcctttgcacctgggcgcagattcaggccggcgtattcagtcatgatgtagttgagatcggcctctgacgcgaactggcttcttgataccggccatccagaacatccggtagaagagtgcgcgaaagacatcggcgaagacagtatatctgccgctcatgctgaggtaggtgtactcgcgttcagcgatttcgatccatgtatacgccagcaaggacagcttgattccgtgttcgggcagccggtcaccgagccggtcgtcgatcgcctggaagaggtggtcgtagctaatgagtgtgccgacgacgtcgaagacaacgtttttggaggacaggatgaggcttgcttgttcgcaggtgatcttgcgtgtgaatctatgattaacaatgaaatgagggagtctggtagtaacatgtatagattggcgtgaagagaggggttccctcctccccaactcttccacttatactccaacatctccaactctctaacgccggcggatcaggttggtaccaggatgataggagtgagataacactaagcgagcagatagtcattgctgattctgagtccggacgctccctgacgatgccgttcccggacctctccatctcctggcccgctcaagatggcccacgaagctctcatacggacggtatccggtattgagccagaaagaaaaagctccctggaacgcgaatgagactgacatcgaacgtaccgcgacctcgtcgttcgaggccaatggctcgtctaccgcaatcaaccccgacaatgtcggataccaccgctccctcacgcggcgcaaggtcatgatgacgacctttggagccggggttgggactgagctgtgggttggcgccgggcaggcgttgcactatggtatttttagtctcttgagctggaggccttcttactatgcgtacggtgctgatccatctatagctggtccagccggcctcgcggtcacctataccctaactgcttacgtctgcttacagtctagcataaacatggtcaaggggggaagtactgatagctctgcaacaggataatcgtctacgcacaatacagctccattggcgagatga

SEQ ID NO: 1721 - DNA, 3817 bp, Emericella nidulans
  unsure (1)..(3817): unsure at all n locations
gcgcaggttcgcattgacggccgcggcggcatagcggattttgcatggtggtcaaacggtaagggtcttacggcagtgaacctcaatggcgaggtgtccgagtgggacgctcaactcaaccgcatcgtcgcgcgctggaaggacgcgggtggcgttggtacaaccgtccttcgtctcggcggctcaacggagaatgactctcttggtggagaccgctacgtcgctattggcagtaaatcgggtattgtcaatatttacgaccgcgtgcagtgggcggtaaattacgcctccctcctctcgaagggagacacatcaaccgctatttctcgcaatcctgaacctctgcgtgctctcgatcagcttgtcacatctatcagccacatcgagtttgcgccagacgggcagttccttgccatggcgagcgaaatcaagaaggatgcgctgcgtctggtacatctgccggactgcactgtgtaccggaattggccgacgcaaagcacgccgctgggacgggttacgtctgtggctatctcgccaaactcggagtaccttgctgttgggaatgatcgggggaggatcaggttgtggcagatccaggggtagactgctgtactctttactcttgcactgtggctggtcttatcatggtgctctgagctctagtacatagatgaattagaataacagttatttccatagaaggttattttagggaaatatgtaatatgtctaacgtgtccagccatgtctatgaccaacttgtctgcgttcagctgctgaatcatgaagcctgggagtgtcccggcactgtatatctacctgagacccaaatatgtcattctaaacccgcccctcgctatcaatcaaacacccgtattatgccataactaactgaccaatccaaaattcaaccagcgccaaagtgcgagtgcacgcatatgcctagcacatagccagcatggcctgcgcatcacgaataccggccgtgttgccagccttgacacgcttcagggtcaaggcggcgatgagagccgcacccacaccagacccatcctcggcagcatggatggtgaccttgtccttctcactgggggcccagtcgaggatctcacgcagagcctgagcaccgcgggccttgaagtgggggtattttgtgaataccgagccgtcggccccgacgtggcaagactcgatgttcttcttcttgcagattgcggcaacaccacaggcggataggcgagcagcgcgagtaccgatcagctcggcaagccggcgcatcagttcgagctctgagcgtgttgcttttatcttgagcatgttttggacgagttcggcggtctcgataaggttttcgtaagggtcttcttcgatagctgcggggaaggatgaatccagaaggtatgggatccgcagctgcgaggtatcctgatccttgaagattagacccggctgtgtgtccaaaatatctaccaaggccaagcggaagatttcgcccagatacagaccagccgtcatcttctcaaaagcttgctggccgggacgaggtgaatcgcggtcgatgatgtggtcgtacttggtgagcgggaggacaatatgttcgttgtcaaaggcaccgtattcgcaattgatggcgacgggcatgtccggaggcagattcatgtgggccagctttggaatagagccagcattctccatgtatgctgcattcacaccggtgccgaaaatgcagccgatcttcatagcggggtcggtgtaagaagaagcaatgaagggtcccgttgtgtcgttgtcaaggcagcgaccttgatgggcaggccctacaacaggaaaggtaagcagacgcaggcacatgcgcagggatcagattgttccatacccgttccttgaagaccttctcaagaggcgggactacgtctttaccttcgacaccatcaatgtcgaaacccttggtccagcgctggagaactccgtggtcgatgtagtcctgagtagcagggtaggagaacgtgaatcccagcggcaatttagataggttctcgttctcgtggtggaactgaataaactgctcgacgcagtcgacgatatattgccacaactcctctgcctcgccggtcttgagctcctcgggcattcggtatttggattggatgatatcgaatccacctttctcctcggtcagggtaatttcacaaacccgcaggttgggtgccgcccatatcgagggccaggaacgtgcccgtttcttttccgtcggggaatccaagaacccatgtgacgttcatgggctataccgttagatagtcgatgcgaatggcgatttcgaagacttacaatgttgccgccctcaacagagagacctaaatgtcccaatttaagtatcgttttcaaaaatttaagttccaaaccacttacccttcgtcagctcgttgacgaaatggtcaacgatctttttaagcgtggcagtatcaacagtgaagatctcctcaaagtgcttaatatgctccaggagattttggggcacgtctgacatggaacctgcaatacgagcgtgcgattaagaatcaattcgagcactgggttggaaggggtgacatacccttgcgagagggagggcgtttgggaccgactccgaccattgtggcttagaataatagtagacaaatatgattagaacgagctggatgacagaggagaaaagcgactaaagatagtgtgtgaagggcaggggtaagataaatagagtcggatgacggtgaggtcaagttggaagtgggggggtctggatccaaaatccagcacaccaaccccacactcaccggtcgccagatacacactcggagtatcttttctagactgatctatttctttctgagtcacttatcgctatcgcctacttcttttattttctgttgctcgccaaacggctactgggatggattctctacaccggattgatcgtcattcagtcattggtatactacgctctgacatcatgggcgaactttggacggagctgtcagtccggagccaagcatgatcgccctggtaattatatcatttctcataccactcgttatcaacgatctctacagctgctctgcgcaattgatcccaaagcccatcctggataactttcgtgactgaattccggcaaactatacttcttcctcacccatggagaggacatccgaaatgcatatatatatggggcttcatgtagccttctgccccgcatcttatcatacatcaatacctcttcaatagctatcgatcggtgtcgccctttgaaatgaatttcgtctacctctttcttctggcattttcagccatcgtctctgccgagatctctatcgaggcctccattctgaaccgcctccttcaattggacattggcttgtatggaaccttcatcctcctagacagattcgacgatggagcaaacgtcactctaagtgtacggttcagtgactctgttcgcattcaattcgtttactgacagtataagtaggatattgtcgtcttctacaacaccgtgacagctccaggccaaagctcgatccagccgttctccagtccctgtgacgaagcgatccagttcagtatttgccaggcatatcattcggtttgcttgcccgcgctttgataggtttaccatgattggcgtactgacaaccggtagtttgccctaacaagtatcaaactgtataacgagtttgccgacggcgccgatgacttcgataagggcttgaggaataacctacgggagggattcaatcgcatatacattgaagattcngtatgtgtacctcttgtccca

SEQ ID NO: 1722 - DNA, 3556 bp, Emericella nidulans
tatgtccatggctgctctcgctgaaatcgatgcgctcttcctcaaggtcttgaaatttctaaatcgctattagtgacaaaccaatcaaggagtttctgcgcagggcttacatcacaggcagctttccattccttgttccagcgttcggtggtatcagcaagcactttaactgcggcatcatactcactgctgctagacgctagctgaatctgggtcttctcgagcttcgccttgttctttcgctcctcttggcccatcaccatgtgaccttgcgccaaataaccttttattcttaggcagtcctgctcgtatcgatcccgagtctgtctgtttagcccaccggttccgcgctgagatatccacaagctcaccttattcacggtgtgtgtctgttgcatcttagtcttatgtatgcgctcaatgccattttggatgatctttcttcgttctttgttaccaccggcaaatgcgatcagcggctcttctagctctctcttcatttgccctgcgatggcggcatgcgctttcgcaatggcctctgtctctgctcgcacagtatcaaaagactcccgaagagatcccgtctcgtgtgctccgagaggcttgcggcagagtgtaaggagcttccgtgcatactcatcttcgatcgcggcgcggactagcagctgtcagaacgacgggttcgcgagtcagacctaggcatgggtgacgaactattgtaccaagtcttcaattcatcgcaagagagcttagctgcttgcatgcgctctagcatgggcgcaacgccggcatcatcctttccccagaaattattggcaactacgtcgatcttgttagtaggtagatcctggtagaggcctgggggctactcacaagatagggcaaccgtgggcccttcagaaaccgtacccggcatcgtgatataatgtcttgaagttattgagctttggccagcctttgctcatttagttaccgtgagacaggctggacgggtcagcccagaatgtagattagcaaacgcttagcagggcagaaaggttgagtaaatagacaattcaatcaattcggtcgaacacaaaacacaccccaattgcatctggagcagtagtggaaagaaccagcacgaagcagctggatctgggtggagttggatatggggtggaatgatcgctgctaattatttacggtgcacgtttctcggggcaaccacctcagccatacctgggcagcaattggcgctacgcctgccaagactcgagatctattcgcagagcagtgagaccaactctaataaatacttactctccttcttaatacatatactaactcgcgttaataagttaggaaatcagatatcttgctggctaagtctcattactcggcacccaccttgcgtcctgtaagtgctgccccagtccgtacgttccgcgaaatattagtccatatcagtggctatataaggcaagggtacttactattagctggcagggtcaagttgctacatatgcaattatgttacggtcgttgtaatatttctagttagcgcggtatggcgccttaagcattcaaccagctatatatttctgccagtctgcggagaggctcttgtttaagcgttaattgttgacacagcggcaatatagattaactacgaaagggataagaaaacgactaaacggcaataccgttgacatttcgatgtcctctgttatcttaaaaaagttttttgaaatgcaaagccaatcttttgtgaagaaatacaggctgggcccgctcagtagtggacctgggcacgaaccattgcactactccaacatttgatgcatcctttatcactaccgtaacattatagcatatagtcagaatgtcagcctcagaagcaccggcttcatccctccgctatgctgatgtgagtattctccagtctctgacacccataatgctgacttttcgcaggtagccgtcactttcacagcggaccaattcaaaggtatctatcgtgggggtaaggcctatcacgagcctgacattgcggaagtcatacaacgcgcaaaagaatatggctgcgaaaagatcatgctaacaacaatgtctctgcccctcgcgcatgagaatttggccctagtccgccaattcccagagacatgcaccatgacacttggtgtacatccttaccatgcaaaagaaatctatgtctctgaagcttcaggagccggcggcagaaccactgccgatggcgccaggtaccttcaggaactccggaatttcgctagaactatcctcgcagagcaaggcgttgcaggcgagtctccgctcgttgcctttggggagataggtttggactacgaatatattacacgttcggacaaggctacgcagcagcgcgcttttcgagaccagctggctattgcggtcgagcttcaactgcctttattcctgcacgtgcgggagtcctgtgccgatttcatctcaatcattaaaccctttttggcggatctcccacgtcgaggcctcgtgcactcctttgctggaacaaaggaggaaatgattcaactcacagctcttgggttcgatattagcgtgaacggtatctgttttcgtactgaggagcaattggaaatggtccggtctattcctctggataagctgcagctggaaactgatgcgccatggtgtgaaattcaggaaggagatgacaggatcaagcagtacctggagggtgccaggtcgcttccagggagcagaaaacacgggaagtttcggttaggcgaaatggtaaaagggaggaatgaaagctgtacgattgaaagagtcgccatggttgttgcagggttgaaggggatcgaggttgcagaggtcgcgacggctgcttgggaaaacagtgttagaatgtttgggttgggtgtgaagtcttagaggtggtactagttgaaaacagggatataacgtaaagagtttgtcatgattagacctatagattagagaagaagggtgaattcagatcatgcggcagccactgcctgctactccgtagcgaataccatatgacggccaaataagcgtatttcccattcagagtatactcttgacataagagaccggtagccaataaagatgccaggccgagatgtggctgctctatattaacagcattattgaatccgaagttctctagatgttccaagcaggatgttggtcggtcttcatgctcgacaataaacccagcaaaaattactttaaaactaggagttgtccttcaagtaggaagataatagctagacatgacaagtgaagtgcatttgaatacctttgtactggtttatcatggagcgtgttcatcaaatggagcttgatctgtgccggccggagtagagccctgcgataagagttgtttgttctgtttgtttttcttgttgcagccgcacgcgagccacgtgataaaacccaaccgtcacgtgcttacatgccgaagcgtattcagctggagactctattcaggagcatgaaagaaaatacctaggtctctttaacggagttatatgatgagcgtaatgta

SEQ ID NO: 1723 - DNA, 3718 bp, Emericella nidulans
agactctgggtagtctggtagcgcatggtgatggggacgcggcgacttaggttgctgtgggcgacgagttctctggttgaatcctggctagcagaggggttttgtaattttgcgtcgggggaccttgacgctgagttgccgatattttgcgacatttgctggcgtgtgattgccacttcgggggtagggatatagtccggatcaaactcgagcgaagagagggcatcaaagaattggtcgttcaaggagccgacttcacaaatgaaagcgtcggtaaatgtcttctcggggtccaacccataccgtgacgcgagcatctcaatagtaacatcatcggtcagtaccaaccggttcagcatgtgatagtaaagctggagctggagcagcgtcggtcggaacgaggagctcttgaccgtcggcgtggagttgctccctcgcgtcttgatgtctgtcaagtagatccgagggagctgctgaagttcagcagtggattggctgctaaccggatcctccgcagcctgtggttctacctcatggcgcgacatgtccgcaagcctcttccccccctgcgcaggcgatacgaagtagtccgtcagcgacatctggtactcaggcaagacagccctcgacgctgccgcctccgcatagtaagaagcagccgaagcctcgagctccatgtcgggacactcataacaaagctggtcaataaccccattgaccagctccccatccactagcccccagatctccaactcccgcgtaattccaaactccctcaatgtccgcaatccctgtatgacattccatatccgtagcgccagcgcatcctccttcgtcgtaacctctaccggaacagtcgtatagatctcgtcctcgagcgtcttgtgtatcgtactgcccttcttcatcgctgctgttctctgcttcctcccatgtttagtgagcgtataccagtattgcacttcgcaccaggcaggcgagatcaaatcagtgacggaaaaagccttgttcggcgggcgtcgaaaacgctccacgggcgatcgcgtatcgagggaaaccttcactttcgagtccccattccccttaatagtgtcctgctcgcgagccacgtccctttcccgctgccgctcccgaccttctgtggagttgggatgctcaactaatcgcttcatagtcaggtcagcgttctcaaaccatacaacggatcaagtcccagaaaagtgtccccataccaaacgtggcccccctactgacagggacccagcctgcctcatgtgtaaacgcgtccgggagtacccctccagccgtctgaatctgccaaataggatgcctcttctctttccccagtatcctagacacgcgctcgcccgatacatcgtcacccaggtcttcgatatccggaacagccgcagggacgggctgggatggagaaaataagccctgtcgcgtcgggctgtgacgaagttggagcgttgtggctgctggtgccacagggccggtcgcgtcaacttgcgcgagaagctggttcaacaggtcggtttcatcggcgctaaagtccgatccgtagtcgctgctgaagctcaggaaatcatcatcgtctggtgagggatcaaatggtggttgcggtgaaaatggcattcctgtggggaggtttggttagaggccaaggtgagagcttcgcagggaggcgagagtcatggagggagatggcgtcacaacgtcatccttaggtggacttactgggcagtcctgcccgtcttcatcatcctaataatcctaaaggatgagcagaagtaggagacatttctgtgatattccagtcgagttcgcgtttgtcaaatcatagacgtgcgcatggtttttttaaatatgcggatagattcaaccctcttcacgagccttacgggttgtcgtttagagcaataaaaaaacttgcagctactagtcctgattcacttgtagcttcaagcctattgtctaactttgcgccagaataggtattgttttgacaattgtcctgcagaagtctttgctgagatgtctgtaaatatgtattcttttttagtcggtatacaacccgcatcagctcttatagaacaaggtcagcaattacctctatcaatttgtttatattctattgccattactaagggacatatgcgcctataaacaagtctatagtctagtcaaataccaaaaaaccaccaaggatgcaaaaaacgtcgcaaaaagggctctagtgaactgatgctggcccaatctaagccttaataacgactgcaacctgctcctctgacggagccggctccgtcaacgcagtttcaacctgtcttgcagccttctgattcaaccagctcaaataagtctgccacccgaccgcaatgcaacctgagaacacgttgcggaactgcggcgggacatacatgaagctgaacgccgtaaccatgggccagaacttggcgctattcacaatactccgaggcagcgcgaccttcagccgttcccatgtctcttccaatgatgcgccggagagcaaagagtgtacgctgaagaagtaggtgttgaagacgggagtgaagacggcttgctggacgacgactttcgtgaggatggaaaggggtttagaggcgaagttgaagttgttgtggaggaacatgaacctagatgatctcggttagcctggcttcctgttgacattgaagaatctctctaagagggtatagaggagcgggcgaactcaccagttatacgacggaatgctggacccaataccgacagttagatggcgcattgtcctccacgggtcataccctcctttcttctcagcaacacctccattatcgtccttttccggctgagactccattcttctctgcggtggattttctggcggaaagaaaaactgcgcactcagatccccgcacagatagataacaatcgaactgcacacctgcgtcgtatacggccgtttctcctgaaatcgcgagtacgaccgccccatcctccccaaaggaccagcctggattatttgccgtagcgatcgaggcgcagcccgagcgggaacgggcggcggcgtagggggtatactgatatgcgactgcgcgggcaactcgcttttaggggtcgtggcatgatcgggttgtcgttgggtgggtgtatttgactcatatcgccgtgattgtaagcgcgcttgagggggagcagacgatctggaggggctcgggctgagagctgggcgtcggatgaatgcatgtctcattatgagaaggggcgcaccgcgcttgcagcgcggggctctagctctttggtgctctagtgtagcttcgtgatctattcaggacatagattggaggacgtaaaaacagagagtgaatgggcgaaaagagcggccggatgggtacaaacaacgatggtatactttgaaacgtggagcgacttgtcttgctgacgaggccacgcacgaaactaaaggagagtataaatgataagcaaacgaaaagatctatgactgcaaagaacgagggctaaggtgaaattgatgatcgtgatggcgactaccgcgaaagaaaatcggcaaactggcagtggccgccagaaatgccgaggaccggaaaggcctgcctatcagagcgtctccagacaaaactccaaatctgccttacaatctttaaacctcgaacaaagagttacaggaggttgagttagacaacggcaaaag

SEQ ID NO: 1724 - DNA, 6784 bp, Emericella nidulans
tggtttcccaaggccctcgacttccgcccaactatgtcaacgttgacgatgcaattgtgaggaggggcgtcttaagtgtcatgggagtggtagtcgatatcatgggtggcactgcttacagaactaacggcacctccatgtgcataacattcacaatcaaggatcaaaacctatataatgggcatgtatgggatggtctcaggattaaatacttcaaagaatccgagcctctgttacctcctgttcaagagggtgatgttattctactacgggatcttcgcgttcgtctagccaatgcaccttaacgatacagtgctgactggcctcccatgcagatcaagatatggaatggaaaagtcctgggagtggcgcctcaggatagaatcattccatgggctgtctttcgcccagatagagatccgaccgctcatctccccgcactcaccggtcccagtccttttgagccaacatatcaggagaagacttatgcggcgacgttactagaagcttcgccaggtgcatttcgctctgtcactgttactagaccaagtctggcacaagtgtcagcctcaaggcccgcatcgacagctaagaaattctcacttcttcaagatattcaggacggacaattcgtggatcttatcggtgagataatcaagatttatggtaacgacagcgagaaagcaactctgtaccttaccgactacacgaaaaatgaaaatttgttcctttacgcatcagacgatgatgatgattctggccacggccgcgaaggagacccttacggctatattcagcggcaaaagaagaactggaatggcccagtcggtcgtatgagcatccaaataacattgtgggaaccacatgcatcgtttgtccggggcaattttaacataggcgatattgtacgcctcaaaaatgtcaaaatcaaatggagccgtgtcgagcaaggtagtctggaggctgtcgttcatggaaatcgtgccaatccgggcgaaacgaacgcgtttccagtggattccaataatgatccccgagttcagcagttgctagctcgaagagaagcctattggaatgcgcgaccaaaaaagcagaagaggaaaccaaatgaagacaatgaacggccttcaaagaagcccaacaaaaaacaatcgaaagtagcacccaagaaggaatcgggccagacaattctcgatatcaagaaacggatggccgttaacgagcacggtaagcattttctctcattatttggagactgcagccttcaatatactaagcctcgttttgtcatagtcgagcctcgcgtaccaccaagcggcgtgcacgctcagtctctcgaggctatattaaacaacccagcccacgataacacatccacaagcggtatcaggtaccgcctcccatttcagaatctctgctatctcactacagttcgcgtagtcgacttctatccaccgctattagaggactttgccgtccataaagaacaggtgtctcttgcgtacaacagaaagcgcgaccctgcttctcgaacatttagaatatgggaatggcgcttctgtcttcttgttgaaggttctttcccagccaccgtaggacagtcgaacgaacgtgctaagcttttcgtctctaactatgaggctgagcatctcctacaattaaacgcagttgagtgagttctgagcatgccaaggtactattagttcaccaactgaccagtcgtcttctcgcagtttgcgcagacattcagaagtcctgggacaactgagagaaaaacttttcattctatggggtgatctggaagagaggaagagaagagctatcgaagccggcaataaatctttagatatagggccagtctcgtctaaaccgttcaattgctgtatcatggaatacggtgttaaatgcagccaccctcgtgactcaaacaagtgccacaacgggcgctcatatggttgtactgatcgagattgctttggatgggagagaagatttggactactaaagactacaattcatggataaccatgcacaagaagtgttcaacgctgatatggaaaattgatcttccagttgcttggaagacataattgctgcggtatcgtttgtcaccgcatattttccatcataattacatagctcttgagctaattggaaagaggcagaaaggtcagagcaaaagcgcaccaggcgatatgaaacagcaagggtgtcatctggataatatttcaaagccaacgccatccatattgttacagccccgtcattcttggtaaaaccacgagaaacgccctttaagataattatcatgaacgtgaaactgagagcgaagcatcagaccttggtcactttaacgatattggtatcaatcccgtgggcagcagtactaaaccggcaattcgaaccccaatagcagtcttttcttccgacttcgctttgggggcaacgatggccgtacatacactcggggtcgtcacattccagtccgtatcgacatggagtcattcgcgcgacagctgttagggtatgaagctcggatttggttagtttgcgagaatggtcgtggtgacaattctcattcgggcattcgccttgtagatagtaataattgcatagcttcaatttcttgatgcggttcacttcttcccggggtatgctcccaatgtcgagtcggtctacacgttggccgtacttgttccgttccacaaccttaggacgggcggagataggtttctgacgcaccaattgaaaatcatcagagccgtgagagctggccggtgttgacgatataggtgcgctattactggctgtggtaatattgctcggcgatcgagaaagcggtgctacgtgaggattcggcgacggggtgaggagagagcgaggtttggtggccaccgcagctttccaagagatccaagcggtgttgtttatcttcgaatcccggaagatttcaggaaacttagtgaacctataatgtgttttaagaggttcgagatcctttccgaatgggatcccctcaattagtgatagtcgacctgaaagctccatatctgctaaggtctcttccaaagtctgaaggtatggcgattcttctgaacaacctaggaaaatctggtgacagtggcagttgtatagatgtaatttgaaggtctctgcggcaatagcagcaaccagtcagcgcaaatctcgaactgcaagtacattgcataccttttatcttatcgtgcgcagcatttttccccgttccgacatcgataaggtcgaacaacgggaagctgctattgaagcctcgaacgaattcatcaagtagagaagggtccatcacaactccggtacggatacaagcattgcatagcgccttcatgttgacgtacattttcgtaacgatcttcggagatataatagttgggaagttatccgcaacataattctccactgcgaaggacaattccttcgctgctcttcgtccaccttcttctcccagctgtaataactcgtccttaaagatcattccgtctccatctagaagtataactataaatggttcgcggtatctgtacgagggaggagaagagccgtcagcaattgatgcaatgacacaatactgggtaatatctaatgagagagtgctgaccatgatagctctagtgcgcgatatttgttccatcaactccatctcatggatctgtatgtcacgattagaacgcttttcacgatgatggtcaagttgttcttgttgatatgcgccttctagctcagtcacacgttatatgagtcgctagcgggcgaatggtgcgttaacacaagtaggcctggccagttcgacaggccatatcgggatacctcaattaaagtgtctttcttctgttccacagaagtgagttgttggtagcgttcaaagtaagcgcggaccgacatgatgcttaaacagacaaaaagtgctattcgaagacaaagaaatcattagagagacctgaagccggaacgtaggttgaagacggagtatccgatccgattattgagaggtgatcacggagaacttgggaaatggcgcttatggtagacaagggcgaattaaataggagaatctgggcaacaattcgttcattgtacttgaacagatcaatcgagactctgccaatggttgtttggttctatctattcattgctattattcacccagtccttttgtacagtggaaatcgtggtatgcaactgcggaaactgcgatggaatcagtggctgagtcagcggagcctggggaagaaacgccaacgtggagcaaacttgctgtgtctcttccaccccgacctttcgtcttcccctctccacctcttgtattcttccttgtcatcttcttctcctgtccacccgtggttgttgcagatccggcttttcctcgtctcaatggctcgcttcgctttcctttccctggctttgttctcggttcaggccttgatcggcggtgctctggcagcagtatgtttcgcaatagctgtcacatcagcgcaagcctcaattggatcgctaactgaactcttccggatgtaggataccgcagataaggctgaagagacatttgaagcgcctactcttgctgtgactgcccaggcagcattccctgcctctgagatcttcggcgtgaagctcgtcaatggccaccccacacaggccttagtgaccttcaccaacaatgaaaagtctgccgtgactgttaactttatcggtggtactctgtctactctgggagaggagagtaagctggtccgcaatttgaccgcgactcgctacggcgtggaaattcccgcgggtgcacaggagagcctgagctatagctttgccaccgaaatgcaccctcaggatcttaggctctctctcgcctcggtcgtttccgatacagagggccgtttcttcaccgtgtacgcttacaacggcaccgttagtgttgttgagccggaaactagcattttcgatcctcagatgtaagtccatgcgccccagtatttttgtggaatgagggcttattatatcccttagtatcttcctttacttcttcctccttgcttgctttggtggcgtcgtatacttcttctatacagtttggattgcgccctacttccctcagaaacgaaagtctgccaagcaggaaacatcgaggaagaacgtcgcctcgaagaagactgaagcatctgtcgacagccctgctgtttcatccgccactacctacaacgccgaatggatacccgctcaccatatcaaccgccctgaagccaggaaggttaagggtacctcccgctccaagtcacgggcataaacggattgcatccgatgtaccacttttaaacttgagagtttccgagttaggcgctccgcaaggaaagtctttttccataatgtcattttctgcacggcaatttgttttcaggtgcctatcaggttagcgaacctgtgcgcggttatgctgagaatgaaatccgtcagggctctcattatacattggattccccgcatgtatatttacatctatttaacttggcggctcattggagctttggtccttttcacaggtcgtttggcgacaagcgatcacgttctatttatcaaagatgcggttttaaaaacctgaagttctggtctcaaatttgtgcccagtatagtagagaatatcatataccgtgatcctacaaagcccgcgactgggtctcttctgctcactcacaatcgtttccactcgtcgaattcttcctcgagatgttttttcagcgcggtgaactgattaccaaaatcccgaccgcagcgccaacatttaaaatctctccgcaagtaaccctgcctatcgggatcccttcgcggatcgtcgcgggcgaggggaaaatcatcgatatcgatgaagaacggcgtactaaagctattgtagtgcttcctgtgcttgagacggtcgctgtaccgatctacggagataatgtgcacgtgtagatggttcattgacggatgcgcatggattccgcacatgatgtcttgctcccagtctctccctgcaggcagactgtctacgggtggttcggcatcaagcgctttccgccgctcttgatctcgcgcagagtacttcccatatttccgccgaagttcgccggcagccaaagtgcggaccttcttaacttcatgtttcactttttccagaaactctgtgtcatcgaacgcttcgattgggtggacaagagtcttttcagggtcgcgcggaaggagaagaaggtgcagcgtagatttgggaaacatgtcataaataacaacaaattcgtcattgtaatataccacagtactaggcggatacaattctgggttcgcgatgtagacgcctaaaccatctctggcgtggaagccgccggtggccttcttggggatatctttcgacgagctcccgttgctgtgtttaggctgcttcattttgggggacagaagctctgtgactggagagtaactagtcagctaacagacatttttttcacgaaaggtagtgtgcagctgaaacgctgcccgcgggactcacaggcatctctctttacttgctgcttctgaggttgcgatgcagaactcggatctgcgcagctttccatggtttcaccatctaagaacagacgtcaagtgaaagtttcaagaccagacttcgcggaaatatgtatccagtcgagacattcgtcatgctggttcatcgttgaaacgtgtgcagaacctcgaaaacaccatcaggcggaggcaatcttgcagcccctcacccgaatgggac

SEQ ID NO: 1725 - DNA, 5829 bp, Emericella nidulans
gacccaacctcacgtggcctgcggaccttccatggaggccgcagccgaatcaattccccgcatgctatcagcttttttccaaatactccactatcctcatgccctctcctatctgtccggttcatctcctaggcctccgcattgacagatgatataccggcgtcatccaagctgagccgatacccctattttggctgagctgagctcaggcagccctaaccccactgtccgacggtccccggccgtaacactagaaaagcctcccaaagccacggaactacaagcgacgaaccatggagaccatccagcagccatatgcaaagtctctcggccctagaggctatatacaggggtgcaccatcttgtccaagtcatcgaatgctcctttgtgccgctactttggcggtctccgctacgctctgcctccatcagaacggtggcgcaaagcgcagaagttacccgcgagctatatttatggcaccaaggaccgtcccttccaatgccccggtgctacaaacagatgtccacaagcaacgttcttagagtctccggtctcggaggctgcgcacgaggattgctttcagtgtaatatatgggttccttttggagatcctccggcaaacggtacgtaccagttctcatctcgcctcttaagctctcgggtctatactaagcttctccataggatggcctgtccttgtctttatacgtacgtactcaaccgtttcaccgtttcaccttacaaatacagagctaatgggatactagacgggggtttcctgcaattcggtaccccaaactccttttccgcagcggccctcctgggtgagacagactttggcgccattatcgtcatgccagcctaccgtctgaatgctctcggctttctctactcctcagaactagaacaagacgccacttccgttggcgaaaccgccggaaaccatggcttctgggaccaacgcatggctctcgaatggaccaaagagaacattggcttatttggcggcaacggctctcagctcacgcttgctggatactccgcaggcgcatactctgtttgttaccaactagcctacgatctaaccctcccagagtctcaatcccttgtcagacgagcctgcatctggtctaattccttcactgtacagcctaaatcccccacgcttgcccaaacccagtttaaccagctcctttcggccctcaatattccaatctccttgtccccagccgaaaaactctcccgcctccgctctaccccctcgtcaaccctcctctccgctgctgcaagtatagacctgcacgagttccgccctacaaccgacaacgctttcatccctaataacctcttccacaccctcgacaacggcaccttcgcatccaccttactcgctcgcaacatccatatcatcaccggcgaatgccgtgacgaacacttcctctacggcacatggcgccccccagtcaagaatacgctcggctcgctgcgcgctaggctgctggcggattacccccggcccgtcgtcgacgcccttatgaggatatactacccaaacagaacattaccggcagattgcaaggactggtcatccgatgcctttggccgaatttacgcggacatgcaggtccaccgtatgcagcgcggattcatctacgcgctcaccaatcccataaggcccagagagccaaatctcggcgagagagtttctaaactcatccaccgctaccgcatggaatatcgtcttaaatgcgcggacgtctctactccaccgggatggggcgtcacacacgctacggaccagtatatctggttctggggcaatgggcagatcgtcctacccgaggagaagaagattatcaggaatgcggtcatcgatccgttcattaagtttgtgcgtggggagcaggagctggggtggggggccagtaatcatagggagatgaggacgttgaagccggatggaaccgtggagatttggcgcgacgggctctgggacgaggcagtaaggacctggagggcgctaagggaggtcgcggactttgcggatgttgagaagggcggagctaggctttagggcttgggatgtgccatggttgttgtccactaggaccatataggcagtttgacagctaagaactgacttcatattcaatagaatctagacggcagaggcctattgcattagtgctgtctgtagacaggcagacaacatttcgtatttcgaatagaacaaatctgtagtttatgagcacggaatacacaataataggattggcaagttttctaagtaatgtgataacatgcatatagtccttcctttactaggatttagtctattccaagcgcccatcctgatacatggctaagtttcgtggctgccctatcggtacaagtgatacaacaagaaccctaagtaggttcaattcacttctcatgcatattagaatccgaaattgaactggcgtccaagaagacggaaagggtaaagatgagtcgagggttcgcgcgagacagggtaagacagagggggaggtgaagggacatgaatgggatcggcgtataacagtagtgggtagtagtttgctcttagagaggatcagtgttgcacggtcatggtatcgcaggtcgtgagaagatgtgaaaatgagaaaaaaaaagaaaaaggtgaaataaaagttggtaaggataatatttacaagcgaagagacgtagatcatgtcggagggccgggggtccgataggtaatccattcaggcacccatagattgagtttgagaatgagtgttagggctcttactcgctcctgcgattgtaccagtctgaatgctgccactgcgttgtgtttgcggggtcgcgctccggctttgttgcggtacagctacgcccatagcaggggagcctccagcaccgatccggttttgctgggaaggttggggtacacgcatcattggagaaaagccctgcgcctggggaacttgcatgttcggaccaccactcatgccactttgaggttgaaaattcccatcatgtgagacctgataattgggctgcacgcccaaattacccgccgctgcattcatagcaacctgagacatccgttgctgctgttgctgctggtactgatggagtcgttccgtggttagttgtttgacttgttcgagcggcatgttgggattgctcctttggatctggctctggatcgtgctaatcgttgttggaacagctccactagatagggtgttcggttgacccatacgtggagaaggtgtagagacgccttgaggtgcagagttgtggaagggcggactctgcattccgcctcccgcttggagtgctgcaatcatggccggattgtttggggtaccgttcacagtaggcatgttcagattgggagagttggatccctgaggtacaaactgaggctgggcatgaaattgttgctgagcttgctgaggctgttgagggagttgctgctgctggttctgtgcctgcggcggttgttgctgctgaagcggatgctgggaaggctgctgtctagattgtaggatccgctgttgctcttggaggcgattagcctctcggatcacccgagcgttatccggcgacgcttgcattgccatgttgggacggggggcattgttctgctgcatgctagcctgcggcatcattttcatagccatgggatttggagatatatgattgtttacaggtccaccacttccatgcatcccctgaacgtgaggcctaccctgattgactccaacattttgtgggagtccgtttggcattccgttagccaatgggttggatattccatttggtagaccatttgcagtactggtcgaaacaggaggagcgtttggattgtgggggatggcatttggagctcgtccaggagcattcatcatttgctgttgattaggcatttgaccagcacgggccgcgaggctcgccttaacaccacattagccgagttgaccatggagaaagctaaatggaaactcaccctctgttgagcaatcatttgttggcggtattgctcctgcctctcttgaagtttgagttcacgttcatgctttagacggctgaattcagcgggagatgaaattggaggcttcggttgattggcttcattaacctttcttaacgaagcaagctgcgaagctaaatagaaatgaagttagcatcttccaaggcgctcgattgacttttgcttaccatgttgctgcttttgcagaattgtctcccgttttttagccaatttcctcatagcatcgagaagcgctaggtgcttggaagaccttcttcgatccacccgaataggttgagtacctctcctgcgaatcaaaggcatcggttgttgattgttaccgttactgccctgttgttgttgttgctgctgctgctgttgggctgcagcttgctgcgccataacattacgctgagctgtatcaattctctgatggtaggccctgaagtacgccgtcttagacatgtcagaaggcaacccttctattcctgcccaccgctcgaaacactcccatggtgttcgtctctctgcgccccatgtaaactgggacgacggagtaagacaactagatatcagtgaccagttataggaatactcttcaacaagactgcgaagttcctcgtcttcagcataagtccattgagaagattgtctcgattccaggaaaccaagggaaggcataggatattcggtaggaggtctgaaaggttgagctgggtgaatgcgatcgcggatatgcctgttttcgggttgaaatagggcgacgttggtttgctcaggaggtagttctacaacgggatgctcagagccggaactgtattgcgaatagtcatagcgactacgtttccttgccggctcatcctcgcggaacattatctttccgcgagcgtatttagaaacgggaagaatttcagtcttccacgacgcatctgggaggtctttgaaccttggaagattcgtatctggggcaatttgaacaggtgtgtagatgggtaactcgtccagaagcttctgcgccgttggggtcatgtccagcgagaatgtaaattcatcagaacccagggaaaaaatagcagccggagcgactgtgtcctgtaaaccatgtcgtggctcatcaggaaacccttcactgaccgaatcctcctcacttgaaggcaccaagtctggcgtagggtgtgaaatctccatagcgtcgttgcccaattccgctgggggggaaaccattgtggcagattgcggtccattcttgcacggagaatcttttggtggaattctagcttgaacacgcaacatcgaccgagattcggggtcactgtgaatatactctgcacaccaatctgcacaactctttgccgcagcaagcttccacttgcgttcttcccggaaatctgtccgcatccatttcatatggtctaacagaacatcccagtgagctgcctgcctcggtggttccgcagagcgcttcaattggcgcagtggccatctgttagcatgctgaagatcatagatgcggcgaagtatacggcaatccatctgttcctgataatcaagaagatagttattcgtggttaaagtcttatgcgcagaagaaagaagagccgtcaaggcagtaccacggggtggagcataagccttgttttgaaataacgtgaagagataatcccgctcttcatttaacttgatcaaagcgccagattgttggcggacaagatccatgtcgccatccttatccggaaaataatgctgtttggaaagacaacagtagagaatttgtttctttccttctcgcgtgctcttc

SEQ ID NO: 1726 - DNA, 6521 bp, Emericella nidulans
tcagaaggatgccgagtccctgtgtccgggtcgacttcatatatttgcggagttgagtactaatatttactaggtacggaacatcaccccacggtggttacggtctcggtctggagcgtttccttgcttggctgtgtgcccgatacacggtgcgggattgctccttgtacccccgtttcacaggacgatgcaccccttagatctgttgtatttaagtagtgggaagaaccacgcccaacatctttttttttttcatagaattgaggcgatatgtatgctctctcccaccattttgagtgttgaagtctatcctgatatcccagtatgcaattgtatcggctccaaactctatcagcaagcgatccatgcacggccttacttcgccttggaagtgggatatttcgagggccctagctactacttttctaaaggttgacccaaggaaatattttagacctggcgtagtaacaatgggacctgtaatagtttgctgtctctgacgatgatgcaagctagtttgtaaaaacactttattacaacacggcactatcttggctgcatcctcagaatatagatactgttgtgcgggggcggggttggctagggttttactgggaatgagtccgaatcaaatcttcaactgaagcaaatgcgcactgtcaggaatatctaaattcagaaattctaaaagaaatcacgtaaacaaacactatgatatggcaatggtcgtcgcaaaaaggccaccaataatagaagccacagtgatcgagttttgtattctttctcatccaatgtatctcatcacagcataatattcgtggcatattcagaccacgtaactcaagcagggcagaccataaagtcgcgagcgttcttccatcctaaagtattcgggtggcggggtagcgtaatactatattcatcgggaccgacgaattatcccctgttctcagtctgtccagaaccggcgactgctctgagctcagccagcgtatcgaagatctgttcttgtgaagcgcctgaacggataaactgaaacaacctgtcgacagccccgggttcgccgtgagaaacaaagtcaaggaggcgtgcgaggaatgtcctatagtactccaaggattcaatctccctctcgatggcttggtgcccgcccgcctgctcgttgttgtagccggttccgttggactgggaactgacaggacgtttgctatcagccaagccgtgggagacacaagatcgggcttttcgaacgaccagagtccaagaagcccgctggggtggtagaaagggtgggacaaaggaaacctgagaacctacttctgtcgagaagcctgcccgttagaatcgaatttcgctggtccatgttataagagcttctggaggctgtaggactccgatgccgaataaatatcttagtgggtaacgcaatgctggatgtcggtgtgtggcgataggatgctttctgatatttggcgacgatcttgaaatagtgtgaaggataattctggaaggacagagcaaagtacaaggtatgtttgctcaggcctgcacgaacaagtccagcgcgctccacggaaacaacgatgtgacgcgcttgcagtacgtcggagcgtccaatgaacggattccgagcactcgtcgctgtcacagatgagcgctgactataacgctgactgctgaggcggatattgagggtatgcgcagttgctgtcgagacttgaaagcattgctccaccgagccgacacagtgcaaagtcaggcttcataagacgaaacaggtcagtttttgcgtggagccacgcaatctgcagcatttcttatgggcgtaaagacggggtatcaagtgtaaggtagtcaggcttttgggtcttcctcttttgggcctcggaaatgttctccagtcaatcagagccaatcacgggactcggctcgtccccttgagaagtcgccacccgctgcacctgggtctgtctgagcgacttcgcaaatggccatgccggttggcaaccccaagctctcatctcctctgaattgctggaagcatagttggctagtagggagcataacacctgatagcaatgcggcgatatagtactaccactgctcgcccgcgatctcaaatcgaacgtcgactgctaggacaacgccttgcttccttcatgatagtcttctttaggagtctcgtccacactccgacttgacgctgctcgtgcactctaggcgctccttcctcaggctgcaagagtcgtgcattaccttatttctctctatttgccgctcgcactcaacatacaatgccaaggctcatctgctgatagaatcgacttcgagaggttcgagcagtggaaacttctgaagcctcgcatctacaaatcgcgtcgacatattgatgacatgtgatcttgtttctgcgtcagaagaacactgttatcggcatcaggaagtaccaacatgttcttccgcagtatttgtcggcggtttcatcaaggtaactcggataatcatcatgaaatctcttaattgaaggtgcatctgctgacgtatcatgttatctgaaggtcaaattgcaagattcgatgcacaatcgcatggacatgatttatatccttggacgatcgactcggctgccaaacaatatgccgaagacagaaggctaggatagccgcacgccaacgttgttaagctcattgcataagtcctaaagtgatatcggcctgcgttaaaagtctcatacttgagctggtctcggccatgttgcgtattgagtcatcctttgcgtacgtttgagcaatgagcaagacatggaggaagccgggaacgcctaagcctcagccatcaaccattccttcgaccgccgtgaaggcgagaagcggcgatattcttgcagggtgctcaacttttcccatggttcatatgcgatggtatgattgctagcatgtatcacatagttgagcatgtccaattcctttctatgattccgcccgcgcagcagtgattctggtatgctgtccttgacaagcaggctcgaagaatatcgttgcccaggggctttcgagcgtcggttaccgtatgaaaccggaggcaattttccgcagctcgtggggtcagcaaacatttcccaacactcccagccagccttcatgattccgtatatccaaggcagtttgccgaggctgtgcttcgtcgagatgcgtcatcaccattgctacgtccaaatgctcatcatactcttgaggatagtaactttggtcgccttgttatgatgtgctggaacaatgggcgctaattgtccgaaaaccaatcggcgatttctatgcatgttttcgagtcagctcggtgggtgtattacagccgccaactgtattccctgccggaaagttccgccgaacgtgttgaccgactggctttgcgctgtttgctgatacctcattgttcgtgttgtacaggcagggaaacagatatcagggatcaatttgcgaagatgtgtcttcggcacatttttgactggtagttggttggaataccaaccagcaagccagacaaaatttgaggcgaggcctcagcgcggatatctgtcgacagccatgaatgaaaccagggcgaatgtgcctagaatagctcgagtcgaaccaggcttcttgtaagcaggcagtcgataccgattgctgtctggagcaatgataattccaacgagttcgtccgcacttacaaggaagcgaaggcaggggagatgcgtgagagagcagggcagaagagaagtgtggcctggccgcctgaagctgcctggcaccaatcggagcggagactctcaggaaatagcttcctcaccttgtcattgggtccactactcacttcctgggtcgtcgtgcgagtgcaaccatggaatactgttaatctcgcctaacgctcaacattgacaggcgactcgtggtgcagatgctggaaacggttggttctgaccgtttgctttagacctggctgggattccaccatgtcccttgttttcagtattacgccatgggtaatgtcctcatgaggtcgtctatggaccgcggctagaggaacaacagcatacccggtagttggtgcagtacccatctactgcggtgaccgcgcccaatggtggttgatgcataataggccgtcgatggtgcttgttgtctggccttcgagcgagcacttgcccagaaccaaagcacaaaccacacggaacaatagtggcaaatattgaggcacagggagcacgttctattttgacgacccgtaaccgctccttctcgcttaaagctgatcattgttccacaggccttgcggcggaatgaacgtcaactcagattgtcacgtatcaggatcaaatgtgccttcttcatgataaaccagagccttagcaaactccctacataactactcgaagtttacatggtctcggtaatcatgcattttgttggcacagtaatgattgattagctagctgtgttggctcattggatggcaggcaccgtctcctagtcgaggtccactcgggttggaatctatttccagcacaaggtcaatcaggccccttctcttgccgacccttcttcgctactacattgcgagagccgcatcgcagcaacatctgacagaatgcgccgtctgatcacaacatgagcattcgtcgtaacaaccagtcatgtttgcactactcttagccgcgccaacgtgcctcttccgccgcatgtcttagagcactgacagataacatgccaatatgagatcgataccccgagaccaattgaaggtgccatttctagcattccagaagttaaccatagtatgcaaaatatgtacaggattcctctgtcctcccgtcgcgtcatcaaacatcccttgcttaccctgaaccgcgcttcttaagagcggccttacccctgcagcgcaaaaatcaacacgacgccatcaccaaccaacccaagtcaataacagcgcaataccaaaccctctcgcactcgattccaagccaaaatgcacatccaagctctatccttcagcatcgtgacctttctcgcctccatcggcgtccgcgcgcaagtgcacaaagacccctaccatatttcagccttcgggcgacccaatggcatcgacgccgggaacaaagtctgcggtggcgcgtgtgttaccgatccgaatgctttggcctgtaagcatattgaggtgcgttgttgtatctccagtactgccaaggctatgctctcctttctgacaggcgatttgcgcatatagtttcgtccgcagctcggatgctttgagtgctgtctctcagatgatgacttggatcatcttgacttccacaataaagctgtgccggactttgatgatgacactgactatgacacggatgaagattgggactaatgctctactattggtgctttgaggcgatgttcagtgattgatgtaatcatgctgcaagaaacaggtgttccagccagaataatatgtataactagtcttttccatggatcttagtcatgcaatacgggcctaactcactagatagtgatagtatccctccttcaattcatctcggtccaaagcagggtcgtgcgcaggtccactttacagaccggtggctatgcggttgtagcgtttcttgaacaacagcgtgatggtggttagccttcagagcgtaggcaattatttgctagactatgtagtaataggaatgataacagttcctcattcacacgcggtcctgccagtataatttaccccatatacccacttgttgtgcagatttcacttagcggcaatatagaccaatactataatcttatccactatgaactactcatataggaatcaatatacaaggattacctccgttcgttaactgtacacttaagtgaatacctgtctgtatacataccactcattaaccagagccggaacagcacctttttccgacagacaccaaagcacctctccccagtagatccaccagcagacggaaaatctggaagagggggtgtgtggggaggaaattgtggatatgggggagctaacagttgaaaaacgagctagaggctttctacgctatgtatgccttccccttcacctttctgcccggctactctgacgttctatattgtagattccttaaaccgcaacatctcctatctcccaccatctaccgacaggaactccttttcgcccgcaaatccaaaccaacgtcatcatggcgtcgtcaacaccttcaggacccgcgtgactcttcgcttcagcctatttaatactcaccgacatgcgccacaccaacgcccttgctgtcaagtaatcctaccggattggaaaccagaattctggtagcttcgttatactgacaagaacaagggcgattacttagaaggtaaggtaaaagtagaagtacaagttgattcaacgtgtgtgctagagggtaaccatagatataccttgtctttgttaccgttagagcaactaggcaattgaggtaactttctatcaccaacattatcgtagag

SEQ ID NO: 1727 - DNA, 1815 bp, Emericella nidulans
acaaggcaatgttcagagcggctgaccagctgggcgtctacgatacgcccatccgatccgatagtgaacgatttgcaggggaacttggaggcatcttgtgacgcagatgtaaaggtatcaacatcaatgatgttggtctctcctgaagcgctgaatacccaaatgcgagcgcatccgtgagaagactggagggctatttcgaccacgttctgtacccggccaatttccttcccatagatcttgaacggccacatcatcgcagtgggtctgtagctgacgctcagaagaaactcccagtcttcattttggttcgatgtcagactctcacggtgaggtctgtctgattgaatgagaaagaaatctcgtgcaaggtcactgtcggccatcacgccgtcaccctgtctctcacgctcattcttcagcacgttgaatacatccagtggcacggagtagaaaaccagcctattcccataagcagctacaatgcgaagcccccaactgaggtctgagcctgatgcgaagaccgtgggcacgggtgcatcttgagatccgttaggcgtatcattcttgaatggaggaacacaaacaagcgccctcgtgaggcacgttggtccatcaagcggagcatttgacccaatgcagaggtagccgctccgtggctcgacaaataatagatggatgccgtcgttgactggaaccgcccgataatggtgacactgtgtcgttcgtaccaagccaacttgatcctttcgctccggtgcccaccgactgaatgtttgaacatcttcctttacagtgtggaaagggcaagatggatgcaattctccggctgatagagtttgacaacggcaaccctccacccctgggccagccactgaggagatcaaccgaaattctaatggagtatccaggcgattcggcatgaaatgcaagatctccgagggttgtgacatgggtagatattttcgacaatcgatattcgtctcttgatcaacccagcgtaactcaattccagattcagagccgaacgcgacacagcgataaccagggcagatcgatatgctcagaggtggatcatggacagagcatacgtcgtaaaagaagtgtcgagatgttatttttttggagaacgcactcgcggagtgtcgacctctcgcacagcagctattcgtcccgttgtgaacaaaatccattgaactaaagtttcctcccctatcgactggagcaagctcgcaaatcgttcccaatctattgcgcaacagagctgcaacattgaaattcgatgtgctggtgtcaatggtggcggacaaaacctctgtcggacatgtgatgctgcgacaggcgcaatatcaacatttcccaagtcctcgttgaacatcggcgcgaatcccactctgcgcctccaagtagctgataagttgaatgtacagcctgaatcacagcagcttgttcctgcagttgatacgttaaagccagatgtgagccacacatccttcgagtcaggataggggtaagacaagtcgcaatagctggatgtttggcctgcttggcagagttgcgagaagtcgacaacagttgtcgtctcagaacccagtcctttggacattcatctttcggcgtgaaagcatacattcagtcgcgacccgtttgctcattattcagactgtgctctctccattctgatccatctcgctagcacgttgaatcttgttatccttgagccaactgtcccaccagcctgcccgctgtagcatgctatccagtaatagttcgttcaaactggcgcgcatccattgcgaaggatctctcggggaa

SEQ ID NO: 1728 - DNA, 5915 bp, Emericella nidulans
aaccacgttcaaagataatatgatatatatagattttagttgctattgggaatattatgatattcggattgggtaaggcgttgacgacaaagtcatctctttgacagactactaagatataatatcatggtcctatctctcagaatgcactgtgagacgccataacatgtctgaagctccctagaaacgattaataacgactttcagcttgcgacaaattgggcaattatacttgagggtctttacatacgcatctgccagggaggcttaatctatactctttgaatgttcacccaaggccgccaatttcacagtctcattactcgagcaacgaggatgtggaggtggttggcggcttggtcgagagagcagaaggaactttcggagagtggaagctcaaccgtaaaaaattctttgaaatcaactggagtccagtccacgagaaaatacagcctacatgtgaagacggtggatctgtcttgtgacctgacagataagtgtgtgtatctctgagggttggtcgttgccataagtgctgttgctaagtataagcttgtcgatgttgcaggagagctctactcctccatgctggtgattcattgcttgtacgtcattaccggctagatggtcaaaacagataaatagatagcagacaaaagtgtgattgctgctacttcagtgctgtcaccactttcctagctcaaaagaagttgaatggcccaattagtacagcaacggagccctatccagtagtgagcctttcagtgtttgctgtcgatgcaagctgccgctagagtcacttgccagataatttcggtgaatcaaggctagttcaatcgctgagaccgcactgatggcactgtttgggagaagaacatgagagtctctctccgcaattcgcaaggacggtattcattcagatgcctaatcgaatgatgttcgaaagtacacattgaccctgcccgggcttacccagtcacaggtaagatcatgaaggatccgagatctgcggaaaggggcgatggcgggagtgcgattggtttggttttggctgatacgtattaatcaaagtgtaagaatggtaagtgatatagcctactactgtgttggccttctcgttacaatagcaagttgatccaatatctggggcctcgttcttgaaaggcagaggtgtttgaccataaccgtcacaggtgcggcctgtggaacggcatttaaaacatgaagggagagataaatcaagtacagcgagcttcagcatcagttctagaatttaaaatcaatcaactgttcagtatcagaacaaggagcatgactgacttgcaagtcttacagcctagtcttgattttgggtcgaatttaatcacatccatcacatatatgctagctggcaaaattcgttatacgcggtgtttcaagccaagaataatcccaggttcattgtcgtgtaagccccaagtgcatggggccttggctttgaaagcaatcactataacgtaccatctggataacaagagaatcgtctattcgtatgtttgtctgaacaaagaaaaattccttcattcctcacatccttcgcaagatgctcgaataagaaagacaaacagtgccctgcaactagcctggagaaacaccaagtaggcgaagttaagctattgattatatagatcctgaagtagactaatgcgccaaattggatatttcgactggtcagctcgtgcaagaggggtctaagtatggaaatcttgatgagggaatattgagcagctgagccactggactatcgcggtggttactagcgtcaaacttggtaatctaaccacagtctgcaacgaccgaatgtactgaagatcgcaatctccaaatacagtttgtcgtgtgttttctatccattgatgggcctcttctggtttcatgaacgataatgctagggatgtttgggaatgtaaggggttggcatcgacgtgctgggtataaatggcctggctggctaccacactactcaaattacctgccacctgatattacttggtgcatgaatattttagtatgtaactagttttcagatgaatgcacttccaaaattctaatagacagcacatataattggctagttcgtacaagtgagcaccaggagagtattacaattcggtagaaggaatgcaactgcataagaaaccctgtagtaaaaactggcggtatcacacatctagcatatatagttcgctgatgttgtcattgtgttggctcaatgatcgattccagcattgttttgaagacgataaaaataaagctcaatgaggaaacctgtgcagataatcacgaacccactcgtgaatgcagttatccttgccgtgagctggggatgtaaagccgatacttcacatggtcagggaatggtttatggatttgaggacgtgagtcctagattgttgctgaaccacatcttcgcgggcttccaagctttctgacaaatcttagattgaaccatcagccggcctaacatgggcatcatgttatgatgactttaaatgctctcgactggaagtccccttggactattcaaacagaagtcttggcacgacatcgattgctttcatgaaactccctggaaagaatgccactgtcgagtccccgagtcttgtaatcatccctggtaagatctcgaacggatgatcatgcatagttgcctggattccagtggctgggctgacatgttgataggcggtccgggtggttctggtgttgacctcctccttacataccgggaacttttagagcaagacttcggagagcggtacaacttcgtctcgtttgatcctcgcggtgtcaacaacagtggtttgcggcttgactgcttctcggggaacgcggaggcgaaattagcctttgagcggctgcacagaataggcgttactaatatttcatcgactttgcttgtagagaatttctattcaagctctatctacggcgagtggtgcaacgatgctgtcgggaacgaatctccttacggatattacgtgactacaccggccgtcgcccatgatctgcttacattcatagaagcagaagctgaggaggccggtaagtctccttcagacaccaaattgtgggcttatggcgtcagttatggtaccgtcatcggcagcaccttcgcttctatgttccctggccgagttgggagaatgatcctcgatggtgttttgaacgcagagcaatattataacaatgagtggaaagaaaacgtcgatcagatggacgaagccatcgagaagttctcgagcttctgccattccgcaggtcctggaaagtgctctttctggggccctacgccagccaatatcacggccagagtggacgaaataatccgtcagctccaaaatcatcccgtcccgctcagcatggtccgaagtcaagagctcccaacaatggtcacctgttttgacctaaaggctcttttcatcaatgctataaactccccactggcaaatttcccaggcatggcccatgtgctgcaccaactcgagcgggggaacatgtctgctctcgcgggcacatttgacgggctgggctatttatcagatagtcgtctgactatccagtgcgccgattcgtatcggagcaacaggcttaccacatttgaagagttcaagagttacgtcgagtacacgacttccaagagcaggtacattggtgacatgtacccccttgccctggacggtatcttgtgtagatcgttcagaccgcaattgcctgacagcatgatggtccagggtagaaagcccctctttttgtctctctcttccccgcatgtctaagccccatcttggttgaagaaagatgcttctatgaagaaagcaaaagctgacccatttctttggatgcaggcccagtcagtgcactagataggcctacggccttcccaattttattcacgagtaataccgttgaccctataacgcccttgatttcgtacgtcttggccatcggcgtcacgatcgagtatgttgctaattgagttcacctcatggtagggcgcgcaagatgtcgtctcggtttgccggatcggtacttctattgcaagaagccgttggtgtaagttgctgttccttcccgtacttaatgacacaatctagaacaaaagtccaagctgacctcgcggaatctttctctgaatgcagcataccgtcgtcctaagtggggcatctagctgctactgggggcatgttagggcatacctccagggcatacttccaccttccaatattatatgcccgcagcaatatatcccttttttaaatggccctattgggcctgtctagatttatcaaagcctgaataagatgaccagtagattctagaaggaaatggttagtgcatctaacacattagcattgaagaacttttcccgtaactttaatatacatacataatcatgcaattggggacagaacggtcaatattgatcttgagcactccaaaagcccatactgccttgagcagtactaatactttcggcaaaaggggtatataattgatatatatcacaaggtgtcgggctaaccgataatggctaattaaaactggaatcacacatcaaatttcccttccgaaaaatttctattatgctgttttgaaatataccgtgcactgaagctttgctagtaagtacagattatctgtcgggcttctaccgcagcattttaggtacgatgcgacgaagaaggatgaactggcagcgcattttggtatgattacaagaatcctgcggcgagaatcagagggtgctttgggggtatcttgactgtagatatgacatggagtggcagaaaactttctagcttagatgttcttctatatagagttacatattcgttataaacctcgtactgagattgttcccattataatcgaatctggatcaggtggcaagaccggggtggtctgtttttaaaggaggtcatcattcgttttttcctttgcctatgatgacgctctgtctgtccgtgctcctctcggcccttgacttaacgattgttactcctgcagttccagccacagttggcacgttcaagaccgccgccggtatatttggatgtgaagcgcttatacgctagcctacgcagccattactcctggggctcagtctccaatatctggggccggaaacccattatgctcattgcagccgctgtatttcttgtcgggagtttagtctgtgcacttgtgccgcatatggatgttctgatagtgggccgtgcgatccagggattgggcggctccagaatggggataatggtcaacattgttgtcagttttcgatatgttctcgttgtgagatcaggtgttgtatctgcaataacttcacttgtttgggcggttgggagtgccataggactggttttgggtggtgtttttatgacgaggctgaggtaggtgccgccctgtttgaagtgacgacaaggctgacaatgaggtagctggagatggtgtttttggattaagtgtgaggcactttattcaacgcggcggcccgaagctgacaattcgaacgcacagtaccggttggagctgtcttctttcttgtccgactcttcatggaaagtcccgagtcctcgaccacccatcgccgccggtcttagggtcatcgactggacaggcagccttttgattgtagggggctttctgatggtcctacttgcccttgactttggtgatgacgtctactcctggtcctccgccacagtcatttgtctgttagtttttggaacggcagtgatggcgctgttcgtggtgaacgaatggaaaatagccaagaaccctattatcccagtttggctgttcactcgccaacaaagatagcgccttatgttgtcttcgcgtgcaaatcatatgtgtttatttgacaggcatat

SEQ ID NO: 1729 - DNA, 3247 bp, Emericella nidulans
ctctccttgctcctagcgtcccatacggtgggaccagcgcccaagtggaacttccagaatccctccgcaagtgtcccaatctcagccaacgtgctgcgtcccagccgttcattggctcgggaccctataaagtacggagcagccagagctaggatctatcattcaccctagcgtcttattatttggcttgaaggacccgcctcgtcgcctcactatcactcaaacgggcctttcctccaaagagctctcgccgttcggtctcgtggagagttcgattcgtgttccagaacggatcctcgcgccccttatttgtttgcatgagctggcccctttagaagcggggatagcttgttcttcggcgctagctcgcaactttatataacgttggggctggagcgaatgccatcatgagctcccccaatgcgagctttcctctgccgcctgctccccgtgtagggttgctagacacaagtgttttgcgactgcttcggtatcagatttcttctactctcgtggagatagctccttttgtcgcgtcgactttttcctttcacgcttttgacccaaatccgaaagtgaaccagggcgaggtagtttttttgactgcctgcattatcataatggttggctgcggactcctgtcttcgctcctgcagcgcgcaaattcggcgcgatcgaacaaaaggagacgctttcgccgctctctgagtgacgttcacaaaggttctggcgggacggtgacttcgtctgacgaagacggttatgaaagttcagagtcatggcaacatgttgcggaaactcgccaaaaccaagaggtacaccagaaaggtgatgagccgcaggatggtaaatttaccttcagtaacttatcaggcaatgctaatcaatgctcagcggtcaacacagaccctggactcttgaaaaaacattcgctgtacctgtcttataagacatccgtcgccgaatatccttcaataaggacgttcaaccgcccacatccgcagatggacaagttaccgaccacgccatcgccgattcccctcctagtattcgtacacgggctaggtgggtctctggcgcagttcaaccatctcctcacaagcctttcaaatgtcggtccttgttttggtatcgatttacccggctgcgggttgtcatcttttgcgcctaccgcgtgggatgcgtacacaatcgaagctctagcggagttgcttgccacagctattgaccgtcatcgcgataaagaggctggtcagaaagtggttctgattgcgcacagtctgggatgttctctatcagcaatgctaacatcctcaacctcaccactcaaacatgagttgaaggatcatatccttggcctcgttgctatttgtcctcgcgcatcacctccatctcccaaggaagtgtcgtcccatcgtcgtttgctttatatccctgattcgatattcaatctctggcgacgctgggacagacgcggtggcctgtacagcaatagtgtcaataggctcgttggcgcaggtgccgatgaggaaactcgcagccttcaaatccgtttcaacaaacaaagcaagactcctgtttggaagcgcatggtttggggcactcttccttcatattccggacctaatagtaaacctattagtggtctccctggacaggaggtttgggccggtgtgaaaacaccaattctacttattggtggggaatcggacatggtgacaaggccagtcgaactccagaagcttttaagagccctcggtgacactggtaatgataaaaccatggacgaagatgcagatggcagcgttgctgcctccgaagcttccatgcttcccgactctctggctcacgaggagaagctcggcatcgagccgcagcttaaggagaaggtcacaaatgagtccaacggtttaccaagaagcaaacgctcggttaaaacagtcatccttccggcgccggcatctcacgccctcctgtacgaccgtgcgacataccgcactcttgcaggtattatccaggacttcgtttcccaacatgcagaccacaggctgaacctcgggtggcaactgcaatatctgaacacgtcgggtaaatgggacgtgaagaatctggcgaagtggaagaaggtgcctccagtttccgatcgtattgccaatacattcgtcgcgctcaagatgctgcgtgaagtcgacgaagaacacaacccagttctcttctcaaaagcacaccgcgataatatctacactgtgatagatatcagccacgagagccctgtctacaacccagcttctctggaggctggcggcattcattaccaaaaatatccgaccgtgtccaaaattcctccaacaccagatgaagtccgcgactttatcgcgctggtggatcgcctgcagaaggagatcaccgaaaaaatggagaaatctaataccagcggcgccgcccgtctccggcctgtggtcggtgtacactgccactacggcttcaaccgaaccggcttcttgatcgttagctacctgattgagcgatgcggattcggtgtccaagaagccattgatgagttcgagaagcgtcgtccgccaggaatcagacatgcacacttcattgatacattgtttgtgcgttattgcgttggcttgaagagggcacctacgctctgagtgtttcaagtatatgtttactttctttctttgccttgggcgctggcgttcgatatcacaggctactgtttgactgtttgacgagttatgatgataccttatcttatgttgcttataaactgtacaatagatgaattggggattccaggtttggttcttatgttacatagcgtgtttctggacaatggtctgttaacggattcttggacaaatgacgcttggaaaaccggcttggacgaagctgtagtactagcatttcattgaagcagcagagtagaaagttggagtccttggactgtgctgctccatggtttccttctacggccagttcactggtgcagtagagtcgtgagcactaagtgatgagatgatatactgtaacaatgtggtattaaatgccacgtcagataaccgcttgacgaagagtctggtaggatgaacaaaaaaatatactggttcaaagggaacgtcttgtttcgacgattctctacaagttgttgacgaaggccaggccggaaaaatggtgtttctaattgtaatataaacattgaataatgcatatcccccgccaaagaatatgtgtttct

SEQ ID NO: 1730 - DNA, 1219 bp, Emericella nidulans
gatataagtaagtttgcaatcatgcactgtgaggaactgactagtaaggatttccacagcttgagaagcacctgtccgtaagcacctaccgcgctagatcggcatcgtattggttcacagggtgcatctagtacatcgagggatccgacccgcaggcattttagcggccatcgacactcacgaagcaaggaggagaaggcaaacgctgctggagacctcgctggataccccgatcgtccttcaacaggccgtgatgacttttccgttggcctacgtccgtccagggacggtagcttaggtttccgacccgcagctaactcgtctatcaatcttgctgggcgctcgacgagccccacgccaagtctccagagcttttatactaaggattctggccaaggctcccctggtgcaccttcttctaagcgctcgttcctgggaaaactccgccgacccaaccttaagcattttccagggtcaaaaggaccgacagatgctattaggggcacatcaaagcttgcacggcgtgatgcttcccctggacgacgaggacggcaaggcagtctggagggagcaccttctaagggcgctgaaaatggggaacatgaacgaaagaaagatggcaaaggcctaggaattgcgactggtaagctgcgaggccgccgcggtgctggtcacgaaacccccatcggaaaggagacgaacccctcagaagcacccggtgtctgggctttggacacggatctatcgcacatggaaggcatcgttcagccagctgcagatgatggggataagacgaatgaaggaaagacggtacgccatgatgagaagaggctgggggaccagctaggtgccggaaattgggacgctcctgagagctggcatgtcaaacgccaaagaaatgaggttttggccaaagttcccaagatgaccaacgatgctgctcgaacaatagctgaacctgatggtgttccgtattttatccgtgtgttccgcattgatggaacatttgccacactctcgaatgggttacatgctacggttgccgatgtacttctgtcactgggaaagaagtcttttctaactgaccacctcaataactacgaaatagtcatgcgcaaaaatgatatctctcgacagctggatcccaatgaacagcccattctcatgcagaagaaattactcgaacagatcggctatactgagaaggacaggattgaag

SEQ ID NO: 1731 - DNA, 2589 bp, Emericella nidulans
ccatgatgcaatccgattcttggagacattgggctaggcatcacctgttgagtttgctggttagaacactgctcgtagtttggcggcatggtatgactgcggaaggccgctgactgccgcagggatttgcagaagtaggtaccgtggtattcaattaggtctgccggggaggaacttacgaagacgtgcgcacgagtttggcattttgagcacgatagccaatgtcctggcgactcaagaatcaattgtattccagtgtcaagttagacacctgactctgcgggccaaaaaacacggacgatccccggattaggtaagcattatcacatggaaacagacggtggtctccctatctcctggatgacgtcgcggttagtttattgctcagttgggggtgctgggggcttgcggaaaatataactcctcatccgttgcacaagatgaacttctaaccaagttatgcatctcagtaactagctaactgttgatctgcactcgtggatatggcccgcgttccatttattggacgacttttctggtttgaataccttactttgttcgggtcgttgattctggtgcttctggaatggatcattcatatcattaccttctgtcttcgtacgttgcataatataatgtcatgctggaaaagaaattcactaacgcgaaatagctgagctaatcatcaacttttgctatgagcggtcgaagactatcttcaacttggtcataacccctgagagaccagagaagcaggggaggaggaaacggcgtgcaagtgccgttgcccacgcctctgatttcgcggaaatatgctccatttatggttatgaggcggaggagcacatcgttcaaactggagacggatatctgctgggtctccaccgactaccgcatcgcaaaggcgaggagtctcaaactgtcaaccaaggcgaagggagcacaaagaagaaagtcgtatatctccaccatggcttgatgatgtgcagcgaggtttgggtctgcttgactgatgaggagcgctgtcttccttttcagttagtggaaagagggtacgacgtctggttgggaaacaaccgggggaataaatattccaagaagtctaccagacattctccgctatcaaacgaattctgggacttttccattgaccagttcgcttttcacgatattccggacagcatcaattacattcttgatctgacagggcagccctctttgtcatatatcggcttttctcagggaacggctcaagccttcgcaactctttcgattcacccccagttgaaccagaaaattgacgtcttcgttgcccttgcacctgcaatggcccccgctgcgcatctccaatcctgtcgttgattcccttatgaaagcttcgccaaacttcctgtttttactcttcggccgacgcagtattcttagctcaaccacaatgtggcagaccatcctttacccgccaatattcatgcggattattgacacgtcgctctccttcctcttcaattggaagtgcaagaatatcagccatgatcaaaagttggcaggttatctccacctcttctcattcactagtaccaagtctgtggtacactggtttcagataatccgcaataggaacttccagttctacgatgacgagatatatgcaccattcagcatcgtggcaagtgagcgattctacaagccagtcaagtatcccacgaagaatatcaaaacgccaattgtcttgttgtacggcggcagcgatagccttgtcgatatcgatgtgatgcagaaagaacttccgcgtggaacaacggccaagataattacgaagtacgagcacttggattttctctgggccagtgatgtgtccgagttggtttttggccatgtgttcgaagctctggatcgatatggccccacaaaaaggcttccggatgggagtgttaatgggcttatcaatggcgcctgaagacgtggaatgacttcacattcggactcaatgtgcagatgcagggggtccacgatgttcctgcgtcagacggcggaccgagactggtgctgagttgctatttctcatatttgctgtatatatagatcctgggatctcagtcgtacaacgcattgtatttatgcctaaggtgacgctacattcccaacataggcaatcaacacaacctgcccatgaccatcattgtgggggagctttaatgtcgtcagcaacatgtcgcaactcgtaggaccttagacaatcgacgaaacgcgactgattcccatcctcccgcgcgttcacctgggaaggtacttctgccagggcagacgtgccgctcataaatgtgacgagtaaagcacatacatacctatcggaacggtccgcatggcccgtgcggtcccgactgtggatggtgatgcccaaaatcctagaggaagagttttggctgcgtgaatgttaatacatggtcttaatgtttgcaaggctgttcttatcggaagggtgcttgcctggtccgcggcagcgatgagctgtcggttcctggcctggcctgacgatcatgcagcgatgtctgagaagagctcagtatgctggtcgatattagtgacagg

SEQ ID NO: 1732 - DNA, 942 bp, Emericella nidulans
agtcgacgagtggagaggggagcggcagactggatgccttgttgcccaagtcatgcacgaatctttagccagtacctcgcgtaacaacagatctctagctagccattggattcagcgtcatttggcggtttgggcaagtccaagaccgtgtctggttttgctgagggcatctggtgacgagcatagctttcaaccatgacgacgccgcaccgatcagcgcaacaaaactagtcagaccagcttgtattcgtgatacatgtagactccttcaatctcgcgtttctgcgatcagatagtaccttgccctgattcggggatctagaatcgatcatcggctgcgcacccgagtggactggcagcgctggtggcctgttatcatctttacgagtacccagcttgattgacccggaaagctttcttctattttcgcaggctgccctgtatacctcagcgtaacatcacaatcgaagcaatatggaagtttctggtacatctgctggagtggaatcccaatcttagctgtgattgtattctgtaagaatgacgtggaacttgggattgtttcgatcaggcaactccaccaaatgagaaaaccaccacaaactccaaacagtaaattcgacaggtcatagatccagtctgtggaagcaggaatctctttgccgttcgcctggtttggtgagaggggtgccgatatcgagacgcatcatatccatggatctacctccgccaccccatacaattcaccctttctgacctcacaaacccacaatgactgtaccatgatgctttagtactcaccatgcttctcccctcatgacctcactcgtcatcatcgcagacgaagatccaggtactcaccggctataagtaccacctttatcaatctcctccgagctgtcatcaagcacattccatcagacaataagcacttccactcct

SEQ ID NO: 1733 - DNA, 3620 bp, Emericella nidulans
aacaagcagtcggcaataaaacagaggggaacatgcccagtcctcgtgagacgtagggagacacactcaaaacaagaaactcgaaaaatcacgtcagtttgttgacgtagcacgcagcctacaaaactgaatggggaaatgcaacacagcagtagtttcgcaacaacgaggtcttcctcgataagggcgaccgaggatccacaattccagatagtgtcgcggatcctagatactgggctgtcgccatcaaataaatgggtaataatcgagctttgaaaaagcgtccgagacagttctattgcctccagtttgagatggtaatgacgtattcgcactccagcgctgtatgttccatctggaaactgttcgataaagacagagttcgtggtaaagatacgagaatttgaatccactcgccggatcattgtggaacttcgaaattgggaccgcgaaaaaagcaaatttggccaagtcgaggccttgtcgcacggagtattctgtcggctgcgtttacttggtaatgaggttcaagtaatccgcgacgataagagttaccattctaaaagtggagcagtgggtcagcgataagcaaaaagaaaaatcaaagtatgcacggagtgggggggactaacgcatgaggggcgatccgcacatagtatgtgccaaacccgcgatagaacctcagccagccttcatcacgaacaaccttgcgagcacagtcaaacatgcccttgtatggcaactgacccgtcttgggatctttctgttgtttttgcaggcgagtcttgacaaagtcgaagggaagcgagaggaaactagcgaagaaaccagcgatcgctgaagcagcaaaggtctggttttgcgctgaaagcgatgttcgcgtcttcagctgggcttttgattccgcaaagaaagccaactggccgaggttgagggccattgcacgcacgacggtggggaaagcgccagcccacagggcagtcactccttcggctttggaaatgcggaacaatgcgtcgatgacggaccggtagtgagcccgcgcctccggaggcttgagaccgtctgactgcatccgaacaagggccaaatctgccgggttaccgatcatagcggcgataccaccagctgtcaaacctgcgccagcgcgctcggcaaaagtcacttttcggttcgctgtatcagcgttcttcgttaatgctttcatgaaagtgtcgaagaatcctagacgggcggttgtgtaaactgcttgacgcagaagaccggcagataaaccggtgtagagatcgagcacttttcctgatgcgataatattacgcgcgacgcccaaggctgaaggacggggcccggtgcgcacaccctcgccagcgagctgtaagcgcactttgatcatatcaattggctgaatgacgacggtagccgtcataccggccaacccgccattaatgaagggaagagcggcacgagtgtacggatggtgcaagaagtcgacggcgggtttggccgactctttagtggtggaggccatgttgatcaggaagcaggattcgaaccaggcctatgggtaattagtcggtttcgttcagcagcggcattggcagtgaggaatgagcttaaccatgaactgaccgatgatatatagcgaaggggagacgggaaactgacgggaaggagagccgttagtagaggaaatggcaatcgcaagtaacactggacaaattggtggaaagagtggctcgtgtgacgggaatgacgtcgaggagaggggaaggaggtggtatacccgggaatgctttatacctaagagccaagagaatgccgggatcagatggccaggcactgctccagaccgaggacgatggaaaagaggagacgaggagatgaagaagataaaacggagagggagaggtgcagttccaaggttgaggtcgttgtcagatgattgacgaggattagatgcggggagagagcagagcctatcgctgaaggacaagagagcactgcgtctactaagagtagtcaagttttagacagtctacaaattcaacaggaagagtccgatagcttcttatatttgcatcttgccgacaatatcctagcaataaccgagatcaggctccgagggttatagcccaggttaagtagttcaatacttcggcgataggacagcaatgacctcccaaataatattcaatctccagactcggagtaattcgcacgctaatggaaataacccatgaatcctgggctggctagtggctgtctccactgtacagctgagactgctctgaggagtgagtccaagaaaagtggatgagtggatgagaagtggatgaagatactagaaatgcggggatgctgttcgagctgtcggcgtgcattagtcctccagtctgtatctgcaacgactgtatctttttcccacccaacatttttgcctcctatctcgctttattatgtcatgaacaggtccgggatttatttcattacctcactacacaatattccatttggtatcctggcgggtgctgaactaaccacattcggctggctcgaacaggcgggtaactcctgaataatgccaggtgatatcatcgaagccactccggcttctctaccgacattccgcccgagctttatcattctcccgccggtttcccgggctcttcccgagcgtgatcatggcaccactggaactgattggtagtggcactggctgttgaggctctagtgagctataataacgggttccgatatctagtgccgcggtggactgggtttgccgggcacgacggtgataccaatagtccacgtcgcagcccacaactgggtggcctttcgttgggatgtggggtggatcaaacacgactcctctattctacagtttttcgctgtcgtggactgccgtatctgcttgaggtgacagtctgttctcattgacgaacgtcccgctcctcgtactacggagaataactcgtccggacggacccatgacggatcccattgatggaacgtggtcgattgacccgtgtttaccgcctcaagacatttgctcaagcatctgggggccgaggaaaaccgtttggctggtgattgcgtcgatatcattcatcctgacgatgcatggaaatgccgatttcggcggagaccggaggcggagcactgttgtccatagtcaaagcagttgggatgtgggttgatactgaatggctaggtaggggaggccaaccactctgcgccgaatacattgaccacctcacaaacccttaattccccccaaaacatcatattatggctgccaggtactggctacaaaatcctcatttccacagggaaatcgctctcatttcagttgcccttccctaaactgatagaaaagcgtacagtccatttgctgccaatgtctgccatccgtctattaaccaaatcattcgtgcccactctttttcacgacgaacattgtaactttcagttagttataccccccttccctcgctggttggggaattaccaacgggtcgccaaatattctttctaaccgatggggggataggcctggtctcccattatggcggcaaatgtccttgggaactcccgaggggtgctcaactcggaaaagt

SEQ ID NO: 1734 - DNA, 5487 bp, Emericella nidulans
agcgtctgatgtagcccttcctgaagacgctttgaaataggctgcgtcggatgagttttctgatcagcgccgccgacgggcttgtctgtgatggcaatggggacacgatcgtaatcgttgtataaatgggcaagcgactgcgcaatggctaagagtaagtggtacgtatagatatagatggtcctttcgttcaaagttgcccgctcatgagggctactccttgttagcttgacctcaacaagtcatttcttctccctgaaacgctcccgacgtacctgccacgtttcacccattccagatgtgcgctagtaggcgcagaccacttgtatagctcactgaaccaccatgcagagaagatgtaccacccaaaagtctgaatcacgtgaagtgggaaaaggtagtggaaagtgttaagagaagagcttgtcgttcttgagccaatgtgcatctgacccactcgcaaaacaaagatggcgagaggggatatgaagaggagaatggtgcggataccgcatgatccgagcggaaacagggcccagaatacttccaagtcgaacacagataagctagtgcgtgagttgaaggtgctgagtgtacttacgagaagatttgtcgccgatcaaaaccgagattgcgtaacagactagtaacgacaatgccgaagcatggacaaacctccggtgcagcgcagaggtgagaatgcgccggtacgggcgaggttttgcggccatggcgttgagctgagattgactgcagaattgaaagaacggacaatatcacagcatggtcagggagatagcaatagtaactgacaattaccgcgccgggcggatgcaggaacgagtgtgatgcttcctgggaggattggctacggccggtcgataattgaagctttgaagcttttttgaaagccatcaaaacacacaagccacacctcattgatcaggtgacctttcaactaagccacgaatttcgacatcacgtcatgtcatgtgagcgtagcctgcatatccgggcaccaacaagcatcttccaacgtctgcacctgcaggcagctctccgtagtatcttcttcgttgacctcttggttttcttgctccctattgctgcgtctctcgctacaatatgtctttcaatcacttgagctctctcgagtcccagcctaccacctaccgtcgttcggatgatccccagtaccatgatgatcccgaattccagcggttgaccgagtccctatcgaaccagctattcacactcacttcaaacatcacccgcttgtcggatcagattgccctccttgggacaaagcgcgacactgaacgggtgcgagaaagagttcataatctccttgaacaaacccgtaccggattcagagacgttggcgaggggatcaagaaggttcagaactgggaagacgtcaatgtatgctcctaacagctgccacaactcatcattgcctgggcgctctatctaataaacttctatgagccctcgcaaaaatggacacagcagaaattgtcaacagagttcaaggccaccttggaggaattccagaccatccagcgacgggccttggagaagcaacgcgcttctgcagtcgcggcacgcaccgctgtggaggaggccgggcattcgacagaggatgacgctcagcagcagcagcagcagcagctcctcgaagtagaacagccacgcctagcgaatcaagacgaagttgatttccaggaagctctaatcatcgagcgtgaagcggagatccgcaacattgaacaaagtgttggtgaattgaacgagctgttccgggatgtcgcccacatcgttcatgagcagggagagcaactagacactattagcgggaacgtcgagaacgttcatgctaacactcaaggcgcgaatgttgagcttcgcagtgctagccggtaccagaagaacgctcggactaaggcttgctgtttactcataatccttgccgtcattttggctattattatccttgcggctgttcttggatagacacttgatgatccccatggtaactttcgtggcacccgatgattcttcttttccttttttctttgtgatatcctccgctgttgctgcatgatgttaccctccattactgtgagcagcattatgattatgaccctgtccgttctggcgttggagtggatgttctatatgcatttgttatgctgccttcatcgtggtattatacatggtcccaatgttatacatattatataattcaatgacccaaccgataccgaaactcctgcttccaaggtcataccgcgagaaatttgaacagagttccttaaagacccgagaatcgcctgaatctcatcatacagccttcccaagaattcaatttcggccgcacgtcaaggtaaaagctgagcttgcctggcccggcgtttgcggccaggccaccccggctgctccctcctgttgactttccttggtaaaaatcgatgacatattcaatccgctgcccgtcacatcgttccacaacccagtcgtgtcgatcaaaaggtaactggtatcccatcaagctgttcatgcgcgccctagggctcaaaaattccggctcggagcctagtccgcgaaacgagtacagcttcggcccgccgcactttttgcttccagggtccgataacggcgctttctgttcccattccaggatttgctgccatgcgcgctcattcacagcgttatggattgggattatcgatgctaccgtagtcgctaattctgacgccgagctgactgaattcggggtattacccttacgcattagcgcctcgaagaattgccgttcagaaggataaatccagttccccgtcgatttgtcatgccccgtttcagtttctgcgttagaaggcgtaccgtgcgatgcagtcggtgatgcatatggggaggacggtgcggcgggacactcggatgggggtgcatctgaatcggaggcaaccgctcttggtatactgcttacttcgcgatctgtggagagcgggcggtgttgcttcatcgttgtcggcaccccatcattggaagcgacaggatgaggagcctcgccgggtttatgttgctgcagccatgcctcacgggttttgtgatcaacggggcaggtagccgctggggtggagggagggggtgatactggagtgcttgcgccggcgcccattgagacgttagcgtactctgatgtatgcgaaaagaagagaaaaagtgagaactggaagaagagagaatggccgttgtggtgcttggtaatgcgaaaaagaaagcaaatggccggactaacgcagctcaccgcccgtcggccgctggacttactccgagcgaatctccgtccagctgtatatttactttttgtgtcacttgttctcgatccccttttttgggatctcctgctgctgtatcttcacttctctttgtttatctcctcccagactatttgtatattctgacacaatggctgctgtttctgagagccccgtctaccgggccaccactactgcccctgttaacatcgccgttataaagtatgtctgaaccccgccattgtacaacacattggcttataccagttgtctaggtactggggaaaacgcgatgccactttgaacttgcctacgaactcatcgctttctgtcaccttgtctcagcgctctctccgtaccttaaccactgcctcgtgctctgccagctaccccgccgccgatgagctgacgctcaatggcaagccgcaggacatccagtcgtccaagcgtaccctggcttgtctcgccagcttacgggctcaccgacaagagctcgagagtgcagacccgtctctgcctaagctctctaccctccccctaaggatcgtttccgagaacaacttccccaccgccgctggcctcgcctcctcggctgctggtttcgcagctttggtgcgcgccgtagcagacctctacaagctgcctcagtcgccaacagaacttagtcgcatcgctcggcagggttctggctcggcttgtcgctctctgatgggagggtacgtcgcctggcgcgccggtgagcttgcggacggaagcgacagtctggcagaagaggttgctccccaggctcactggcccgaaatgcgtgctcttatcctggttgtgagtgcgcagaataagatcgttcctagcccgcgtggtatgctaacttccgttgcgacatcagagcttttcgcaacgcgggcgaacgctgtcgtccctgcgcgtatgaccgctatagagacagctattcagaaccgcgatttccccgcttttgcgtaaatcaccatgcgtgattccaatggtttccatgctacctgccttgactcatggcctcccatcttctacatgaatgatgtctcccgggccgccgtcaggctcgtacatgatatcaacaacgccgtcggtcgtacagtgtgcgcgtatactttcgatgctggccctaacgccgtcatctactaccttgagaaggattccaaccttgttgcgggaactttcaagtctattcttggcacagaacttgaaggatggtctggccccttctatgatgccgtgaaggacgtcagctcgggtgtatctctcgaacaggtcgactcccgcgccgtagacgtgctcaagactggattgagccgtgtgatcctcaccggtgttggtgaaggtcctatcagtgtacaggatcacctcgttggggaaaacggtgaaattctctctgatcaatagagaatcaggggagcagcaggggcgaacaatttatgatttcgtcaatcgcatcagacctattcaaagttacttgtattcaattgcaagccgtgcatcgtttgagacgatacaaggcatgatgtccattgtttcggttatctatgattcggattcggtcaacgttcgatacatcaaacacatgctacacatccatatacataataaacagctagctattctaattcctttctagtatacctgaacaaacttttcctaacctaccttaagggaatataacctaacctaactcaacaatgctgacttcttcatctccttgattttcggcggctcctgacctttcccacctcccagagtagacacaatactctcccaaaacactctctgcccgccttgcgcaattggaacatccacaggcccattcactgcctcaccaccctgctccccattttctccctcttctagctgttgcttctgttgaacaatgaaaacttcctcctgactttcctcacacagcttcaaaacatctctcgtagccttctcaatcgccgcagcacgctccctcatccccctgcgcagagtagactcaaccagattctccacttcgggaacagtcgtgccaacacgttcaatcagtcgtcgcacactgttaaccaggtattcttcttcgtagacagttcctttctttccacgggcccgcttgcgctcttccttgcgccggttgcgagaactctgacgcgaggatgttgtt

SEQ ID NO: 1735 - DNA, 4594 bp, Emericella nidulans
  unsure (1)..(4594): unsure at all n locations
ccatcagaacatgtctcgtgaccgcaaaacccaggcgaaggtcaagcatgatcagttgccaaaacagcgccctgagccagaaccggatctagtgtacgacagtgctagcagtgatgaattaccaacccaagaaaatgactatgacatttcaggtgaagagttctcaagccgtgaaaccaaggcactgaagatcccagagccctggcgagggagtctctaccgtggccattcgtcctcgcagtctcgccgtaactaccgcacccactatcggaaagacccgagttatcggagggaatcgcatcgggctggcaacaatgggtacagaggataccgggatgagagtgttatcgacattgttccggcggactcaaagcatactacgaaacatgcgattaggaggtatgacggtagccgacagtgggcggcccagccaagcatcgttcaccaacagcctagcaaagacgaggtagaactgcttatgagccagatccgtgaacgagcacaaaacgatatccgcagtcggatgctaggggattgggaagcagacctcatagatcgtgagcacttattcgaatatcaaaagcagctgtttagggacacccttcgcaccgagcgaatggacgatgtcggtctgatgaaccgcgcaaggtccctgcgtgagcaccccacaaatactcgtggctatctgccgagggccctgcattattattaaaatattgcatgccttggaagaatacctttttccccttcagatttcgactgtcgcgttggccctgtggccagcagtccggtttggtgtctaactaggacaggcaaatgttgaactgtaccaccagtcggttttcggtcattttgtgagagctgcaagaatttcagcacttgattgaggccaatgtgcccaatatttcctttaatgtggtagtttaggtagtgacgcacggccaacacacaagaatgggatgaacccactcggtgagatcatcccgactcctggctactggtagacgcctagtggtcccggtatcgataagcccctccatggtttaccggtagtgcactactccggctctcatttattttcgtcattcctccttcccaaccttcactcttccagtttccaactcaatttacctctatccacacttctcttccttcctcaatcctctatatacacaactagacactcaagatgcctcgcaaatttttcgttggcggtaacttcaagatgtatgcataagctaccccgcaatgccctctactctcatgccacagcgtatactgttcgagtcattcctagaaccaacgcagattgcatcgctaccatgtttttcttctttaactgataggaacggtaatgccgagagcactacctccatcatcaagaacctcaactctgccaacctggataagtccgtcgaagttgtcgtctctcctcctgcgctctacctactccaggcccgcgaggtcgccaacaaggagattggagttgctgcccagaacgtcttcgacaagcccaatggtgctttcaccggtgagatcagcgtccagcagcttcgcgaggccaacatcgactggaccatccttggacacagtgagcgccgcgttatcctcaaggagactgatgaggtatgcccactgaaacacttcgtggtgatacgagcttgagtgcttaaagatctagttcattgctcgcaagactaaggctgccattgagggtggcctgcaagtgattttctgcatcggtgagacgcttgaggtatgactctttttttgtttcggcttatcccgattacccactttgactgggcattcccctatgttgagctttctaccgtattaacaatgcgtaccaggagcgtgaggccaacaagaccatcgatgtagtcactcgtcagctcaacgcggcggctaaggagctctccaaggagcagtgggccaaggttgtcatcgcctacgagcccgtttggtaagacacccatctgtctgcgcctcgtctcactgagagcaaacgggctaattgtgttacagggccattggaaccggtaaggtcgctacaaccgagcaggcccaggaagtccactctgccatccgcaagtggctgaaggacgccatctccgctgaggccgctgagaacacccggatcatttatggcggctcagtgagtgagaagaactgcaaagatctcgcgaaggaggccgatatcgatggcttcctcgtcggcggcgccagccttaagcctgcctgtacgtctttccctccccttgtcgtttcttcggagtgcattgttgcttactagtacttagtcgtcgatattgtcaatgcccgcctgtaagcttttgcgagaaaagtaatattacataaaaggcaataactatacaatattcatggcgattggatggtcaccttttgaagatttggtgtcgcaacgattctaccaaaaaccataggcagctccgacatgtaaagaggaagcttgtgtattatcgtcatactacttagttaaaaataaaaccgtgaaaaattcttatttactggcgccctcgcgtctaggtagtaatttctttaaaagcatgacaaggtatatgcatttagtataatccacccacatcctagaaagcccttaggaagaatacgacaccgaaacaccgacaccgcgccagtacgacgtcggagggcctccactgctcccctgcgcacctgccgtagcttgagaatttgcatacgaggaaggtgagaacgaactcggtccaagcccgacaccagcgctcacaaggagctccttaactcggccttcccagagaaggcgtacattccaagactgatcaactcggaccttaaggactgattcttgggtttcttcttcgctaggcgtgattggttctggcacctgggaagaagccggaatgtcccagatgcgagccttattgcgagcccattcaaggccatcgttgtctactatggcggcctttcttgactgtcgccagagttcgaaccctgccaccatttcgctttcccagctgtagacgttgaagccgaaacgggagctgaaggaaagattgggagaagcccgtacggagtaggacgttgagagcgatccggtcaacggagtgagtgtgagtgttagggtatatgggaaggtagaaattggtgtattggggttgggcgtcgatgaagtggccgctggtaaagtgcagaacctgaggccggtcgacatgcctattaatgatgatacgggagaataataggcctctgcaccagccgatagcagggataaccgttgcgcgttgttattgaaccggggatcaggaccaaagttccatagtccgcgccagccaaagagggaattatccgtactgaacagatactcattactgtattttccggtgtcgtgggtgagttgggtcaggagtgtagcctgtggcgcggattttgataatggaggtccccttgttgaggagacggcaagtgagagctgcatagtcggcgaaatgcgtcgcaagaaaagcgcgttgagagtcgttggtggcggcagatgcaaagttgcatgaagtagcgtcgccttctggccctttgagctctgtccatagccataattcccggcattggtgccgtctagtattgagtcccaattccaagattcaaccgggggcgcgatgggcgcttgtacttgtctatagccaggagcaagcttgcggaggggaattagagcgcttttacttggcgtattgtcgaatgatatattgctgtataggtatgaaatggagccctcgattagcccgacggtaccgagtgtataactcgtcgcgaagttgggtgtcgatagagaagataggtgtatccggacacgttcgggtgttgtgaagtcgaggaggtctagatgacagtcaattccagggagttttcatctttgggagcggctactcctcactctgcgctgccctgtgagcgacgagtacgagttgtcgcaattacgttgcgtcccctccgcaaaggcgagttgtatatagtccatgaaatcaagcatcgttaggcagtcatgggatattgagctggataagcatatattatagtaggacgtccacgaggcaatttccgcgaagcatcacgaagctaggaaataattgctgaaatggaagtagaccatgacaagaatcccagccgcgggccaggaaccgtatcagctcattccccctttgggcgagtcggataagcctcgcatcatcattgatccgtcgttatcagcgaagaaaaaataattccacttcaactcgacaatactccgcaccctttctatacaacaaaacacacaggctgcggatcagagggtcttatttacaatttggttctatattactgttaatttctaaaacttacacaatgcctcgttccaagcgtgccaggatcgtccatgagtccaagaccgccaaaaaatcgcacaaggaacagaccagacgcctgtacgccaatattcgcgaatgcgtcgagaaatatgaccatctcttcgtcttctccgtcgacaacatgcgaaacacatacctgaaggatgtgcgcacagagttcgctgatagtcggtaagtgtacangcnatcgacgc

SEQ ID NO: 1736 - DNA, 3439 bp, Emericella nidulans
gggaacgaaagaaactgtataacaataaatggtatggtgatatattagccgtaatgagccaagaccgagagggaaagaataagacaaccaaccaaaaaaaaaaaaaaattcgacacctgtgagattcgaactcacgctcccgaaggaaatgcctagcttgtatcgaagatactatagcagggcatcgcgttaaccactccgccaaagtgccaattcataataagagattgtttatatcaagtaatgatagtttagaatggtgtgctggagtaaactagccgcaggattatgcgcagtcttttttacagatgaggaattcgtgcagttagtccattaaaagagaaaaatttattatactcggtgtgagcctttcaagctgacaatcatgttcgtcattttccctatcaacaattcttcagctcatagcattccactagtttgttcgatcattgaggtctgtaaaagaggcttgatattcacgtgatgggtgtaaaagcaggcacgcatgggcccagtccctaatacgggtcttgcgggtgaataacaaaacttgcgggcaggtctataccccgcaaaacgattaagcccttcggtcgggattagttgtgcaaaaaagacgacacctgtgagattcgaactcacgctcccgaaggaaatgcctcgcttgtatcgaagatactatagcagggcatcgcgttaaccactccgccaaagtgccggattcttattggtttgagagaattttgacattatatggcaatcgcttctaggtccttccgaactagaacgcttgtgccttgttcaacgtcaacaatgtttgtcacatgactcctatggttcctcacaccgcgcaaacagttaagtatatccggatattcaaggccttattttacatttaattatactgtctaaacctaatcaaaatacattcgagatcattagggttcaagtgacgctaattgggcacagaaggctaaagagcacacggacttcggtagcaataaatatatatttcgtccttgtgatctccctttgtggtatattaattggacctaacagacaaccaaccgcgatcgtagatagtattaccacaccggcactgtgcaccaacctgatactggtgttgttgccgatacacatccgatgccgcggaggcgatatggaagagacatcgtaccgattgtgtatcgatagcgagcggattcaccaaaacactgccatctaggtgcagcaagggaaacagaacctaagagaagctgcacggccttttagccgccagcacgcatcataaccaatcaataggtatgggacggcatttttacctggcgggcaactagccgagcgcgccagctaggatggcccacctgggaagctacgcactggatctttcacgtttgccagtaacggacagacgggactagaacgatagaatggcaagttcttactcagcctaggcttccctaccctgcatatatctgagcaattggtgtaactaatgaaggtgggctgaccttcgcaggggccaggccgtacctgagtaacaataccaattatgaatcgagccagaacggggttcagcatcgataacttcatatacattgcatcgttactgcacagcaaagcagtactaaacctgtaatacagtggaggtgggttgacagggctgagttgatgaagtctctaggtgagaggtcggggaaataggttatttccagagcagagccaaaataaattagcagcattacagtctcatctgacaggattcgattatttacttgagggctattataaaggttctaaatagttgtgtattttgaatagaagcggccgggattgatgacgagcctcgcaatggtagaggcccgcagggctaatgtactgccaccagctcgaacactttagggctgttagcaactgcctccaatcaaacctcacgatgaagaaaactctagcacgaagcaccagacggaacattcttgcacttagagctcttctttccgccggtaatatcaaccccagaccaagtccagtctttgcagctccctgacccgcagaggatattgacacgtgtggcactgctatccacagagccggtaatcttcttgaaggtgatatcttcaacctcgacaccgttggtaggggtacctgttgggctaccattctcatagtcctgctcaacaatgaggccgtacttggtgattccagagagttcgatgtcctggaaggtgacatcggtgacggagccggtagccttgtagacggtcttgatgcggacgccgttttgggagtcgacgaccttgctgttggagatggtgacgctcttgacggtgttgtcgctgcggccgccgacggagccaatagacaagccatggccgccggaacagtatccgttggtgaaggtgatgtgctcgccggagttaatggcaatacagtcatcctggttgtagacagtcgcaccgtcgatggtaatgtacgtcgaggagccgatgtcaaaggcatcggtgttgtggcccttgctggtgccggcggagttgtcgatggtcacgtccgaaatggtcaggtggtcggactggatactgaatccctggacaggggtgttgtagatcttcagcccctgaatcttggagttgttcagcttatgcgcgctgaagaacttgggcttggtcttgccgccgttgctgcccttggtgtcccaccagcgggccccgtcgcagttgatctttgcgccagaggcttgcttaaccgtgattttgtcaccggacatggagatcagcggtcctttccattctttgtagccaaaggttgtctcgccttcaaagataacctgctcctccgttagaaagccgagatcaatgaggcggcgagggggaaggggaactacgtacagtagcacccgatttgagaccggtcaggtcaagggtctcaccggcaggaacttggatgctcttgagggtgacagtggagcacttggatgcgccagacttggccgcagaggcagaggtgaaggtgcacgagcttcgagcatcaagatcagcagcaggggcggcagcgaccagcgcagcgcccattgccgcagcaataagggagttttgaaggaaatgcattgtaaaggagcggatgaagagtgctaaagagcgacagggaacttgatcaacagagtccggaaggatgcagagataagaaagaaaggacgatgcttgggtggcacagaaacacgagagactcgcagcgttcttatacttataagtcgggtcgatgaccatttgacagccaggagcgcaaaccagacagagggtaccggcaatgagtccgatgactggtctagggctaagattgaagctagaaaaccctatctcaaacaccggtcccctcttatccccccacttagcaaagggcatctccactgctgagcaaacgtcgccggcaattattctgcatc

SEQ ID NO: 1737 - DNA, 3847 bp, Emericella nidulans
tcttcttcgcgctcgtcgatgggatggatgattccagcagtttcgcctctcctaaaatcataataagggggtcggtaggtgccagcattcagcactggtcgattaaatttcttaggcacgtaggcaccgcctagcaggccagtcctttccgcaatcgcatctccattgtcgttccagtcgaccttcttcccagtacttcgtggtctgttgttaacgttccaagggtagtcgttgttcactgccggctccctcattggtgaagggttccggatactgctggccatctccgagtcatcccttccccagtaatgagctctttgtgccccaagcgctagctttctgatctcattgtcgcgcgttcggcgtaccccgcgcctgccgcaacaggtagaaaatgagcagcccaagaccagcagctactggaatgccgatgccgatgccaacacccaggccggcccttaatgacgtcctgcttttacttgaagtagaggagctatcagaggcttcagcagtggcgtcaaaatatgggttttcatatgacgaagtccacctgcctgaggttacgtcgtatagataaacctgcgagttgagctcgggtccagtatcggatcgttttgacaactgtgatatttggtaccctcctgcaatcatcataactccaccagggagcatggttgcaccgtgcccatacagcccgtataccccggattcttcagggcctccgcttgtggatggtatactccaggtccattcgccggaccctgcaaagccccctccaatctctagaacagcgagctggggcgttgcggcgactctagtgttgcccacccatccgccaaaaataattaccttggtcccatcaggtgaaagaacggcggtgtggccggatcggggctcaattagggctgtgttgcggagggagagatcagcccttgacgtgtctgcggcgtatcccacgcttacaaagctccagctattctgtggcgcagagaagatagccaactcggacatgttaatgaatgcttgctgagtatgcccgccaatgagaaggaagtcctgttgttaccggagtacaccgtccgtatagccatatgtggcctggaggggagtgaacgtgaaccccgcttctgggatcggaggcgccctgtccccagtaatcgacgcctggtagcacttcccgttctcgcatggagccagtactgtcatcgtttgggagtagttcgcggcagagacccaagaagtgctgtcatcgctttcgtacgggcacattcccgcaaacgcgaagaccgagctttgggtagtgtttgaagcagagtatgcgaagcctgctgacagatggcccggtcgattggtaatatcaacttgtcctggtccctcaatcgagaactcctcccatttcccgctgcctgatgaactgccagaatccggacgaaaagaccatagttttggtgcgttccccgagtcccaacagtcacccgcgtagatcttcagcaccccatcctggtcaataacaggtacgtatgcggactggccgacgttcttgttgaatgggacgtcgtcgagcagtatagtatacgcggacttgtttgtgtccactttccgagaaacgtctagcgagataaattccgttcggccttcggttgcccgcagcagataggcaaatgaagtattatgctgcgaatcgtataaaagactggatggtgtatacgggatttgtgcagacccatggccgacaagggtcagcacgcaaaggagggacagcaccgagctggcgccgactgccctgcgcattcgggatcttcgatagaagcgaccatccatggagagatgcacgagatttcaggcaacgtaggcagaggtgcaatgagcagcccgactttgagacattggaggctgtcgatcgctcgatcgcaggatctagagaaagtacaaccgggaagcggggctgcgaccatcaacaagtgctcaacacaagctaccggttaacaccttcaagagttcgtacaatggcaatcctgagtgatgtagcgaacccgatgctggtcaaggatctggccagcgtggttttgaaggtaatgagcaagggcgatggtgaagccagtcatgtaaacaaagtgagtctggagtacgtatgcatctcaatcgtcacgggccacaataagatctagatcattcgcaacgcacaactggagcctaaattgattgaaagtccatacatagcacagaagactagtgccgagatcaaacattccccacgatgtgcagggtggatttgctgtgagtcgatgtcatgcgtgaggggctggtccattgtggccacaaaacaccgccgccggctcgttgccagtgcaacgagcagctcatcctctgactcgaagcagcgtccaagaacactccgccgagcgaggcgacctgaatgctagacaatggatcatcagaattcacgagcgagttcgttttccttctgaggaagtccagatgatgatgcacagagtagaacagagctggagcccgcagtcggtgaaacattccatggccgttgagagtggagccagctaaccatctgacactaacactaacactacactgacagtttgacagcttgacactattactattgaaccaccttggaccttatgtcaatcccagcagctttatacaaatcccagttgttccatcatcgattatgcggtggctcggctgtttacgtattttcccgcaatcttcatgtctatttgttcttacgtccacgtattggaccccgcttgccgtgctgatgtcgtgtctctctccatcaatactctcagaacaggcagataccttcgagtatttcatgctccagggagattcaaagattcaggttcccgacgagacactcagctgcccgcttagagatcatcttattgacttgggatctcagtaatccagccgattatacctcgcattgcctctgcctccgcctctcgcagctgaacgctctcttgtctttacgaccaatatcattcctagaaacggccgggtttattgttagggtcaaagacttggagccgaagattggtgtctgatggctcgtaagcacattcttctactaatcccaaagcaatcggccgaagcagcgttaccattttggtcaatcggactccggaacggccgcggcatctacagggctccgagggggctgtgaaagtaaactataccgaggagatatcagtcatcaatggaatcgccatagatagcggtgaatctagagcgccccgtcgcagaggcgtttccccgtctcttcttcagcagatataacccctctctcctcaggcaggagcccctgccacagagcaacggtctcggagcctacgggttgcgctcggggcacgagcaggggcacgagcaccagccagagacggcgagaagactagacacgattacactgacggtggacaatcccagcctagagaccactgcgtcgctggtccacatgccgtagctaacaatacgcggtttcgagttgaacgtgaccagtgctatgacttgtccacgagattccggagttcccttttcatcagacttgaagacacgggacagggcgggatagaacaggtcagccataagttgtgccgcatctccggtctcgtcgctgtcaacctcgagagggattcgtccgtagactgtgctcatcatcggtagcaaacatgctaatctctgctgctttttctttcttagcaggacggctaacaggtccgatggtagcgacacaaattcaggtcatagagcgttatcaaaaaaatgcaggtaagccaacgtcttcgcatgtcattgagagcgtgcggtgtagtctcaaccaaggattaga

SEQ ID NO: 1738 - DNA, 3563 bp, Emericella nidulans
cctgcaaccatgacgcaggtctgccgttcgcataggatactaccgcatatcgaagcatattagtcgtgtgcacggtagtcagcagaactcccacaacttcaccactgtgctgtcgtgggaacaataacagtctacacgacacggcaatgtgactcgatcgagacccggcaacaggccttacgtgttacaggaacctttgcagtcatggcaaacaggttttttgtgcacggaatgaaaagctattggcgtggtagcacaatgcgccttggaagactggttatgggaaaggggttggttttacagttacgagaacactgaactgttcttataaagtctcctattaccagaaaactcaaaatatttgaatgctacctataaggcgagaatagttatgtcttataaactgataaagaagaaaaagcgtagtgattgtttgtgtcaatgtagagctctccaagtcgaggtctaccaaactataaaaacctaaggcctgtgagggacgcgatgagagaagtatcgaatatgctctccctgtggaaaatggggttattggccagaaaggcacgttctggtgtctagtgtcactattgtgggcgacatgtgggtatggtcagtattccagagacggcgagccgctctttcaaaagcatggctctgccatggtataattttggctcgtacggtaaccgtgatgctgaggaacacgactcgtggctggcagaccagaatatccttgggaactacgatatgggaccatctaagaagatctgaactaacaaaactagaaagctccacagccctaggtgaattgaggtccatttatacgctctgggcaaaggcagcatctgtgaccatcccatttccgtagaatttatggaaatactgcttcattcatgtttagatcacttggttattgatgccatctggcttcttgggatgaggataaaccacaagctggcaaatgaaagaaatataatatgaatatgcaacaaaacctcttcagcaggccgggtcgcaggacgagtaaacgcgataatcaatagcctaggtattactataattgagacatacgggctcagttcaattccaagtccactcacacccccattatcagcacattagattaaacccgtattttattaatcctcttcagccgccgtagcccaccccaggtgatgaggccaacgcccatcagactgcccacaacaatcgccccgaaggccgtactgctttcctcgctcccattaacaacattcataccataccatcctgccaccagcgtcccgcctgcaagcgcaagcatcaagatctcaatccgcgcctcgagaaccatgatctggttacgccgcacgcttaacgcagcgcggatcgtctcttccgtgcgtgtgatattgcccatcatacgtgtggcctcctgcacaatggtgtcggaggccttaaagtacgcttcaaaaaggtactcgacgtcctggtggtcggacggaagatgtggctttccctgagctttatcggtgaggtacatattcgccatatcttcatcctcggcgaggacctcggaagtcagtgtgcgaacctgccgagcggcttgatcaatacttgcaagatgacgagaaaggcgaagaagggcgtggataagcgactcgtattccttttccttgtctgatatgaagggcgcgtcctggtgtgtcttccggaggagttgggaacttcgtctgcggtaaggctgtactccgcttcgaggacagacgtcgctgaggcaagcgctgcttcgagaacccgtagttcgtaaggctgggttgtactgttggcgctacctagaagctttcgctcgaggttgtgactgaaaacctgtgagacactgctaccaatgccaaaatcactttcatcgtcgtcgccattactgttggaactcgcactcccagcctcaacagatttactagccagatggaaaagcaagacatggtcacactcaatcagcagccgcagatcaaacaagtggaccaaaatcgcatgttcccgaaccaggacatgcggaaatccagcggaagggagatcaaacacccgtagatcgcgagtggtcaggccatatttctgggcgatttctaacttcgtttggctctggacctcggaaggggcctgcttgtcacgcatatcagggtcggcactttcgtcgtaccgcgagtaccgcatggaagcgttgccgttcataggccgctgggagtattggagggacagttcatggactcgctgaaaccggtgcatcgcagttcgatctgcaatatggcttgcattgcatcgaactgctgtactaaagtacatttggctttgcagaggaccccaggaacgacctgcgactctcggccaccggaggacgtacctgatgtttgtgtacacacggccgtgatgcattggacagcgcgttaatgggtcgatagacactcatttgtatgcactgacgcgttaagggatggcttgaaacttgcatgaagcgagtgtggtatcagtgtgcagaattcgtccggttggtgtgcgagtcccccagttcagcaaaaacacacaaccaacctccgatcaggggccggtcgcgctcttagaatttcctggtagtatctgataatagatgcttgtcttggtaaacataaacagggtatcggggcttgaactggaattggctgtcgattcaaaattgtggctgcgagccattacgtcacagcgcctgaccaaggcataactgtggcagacagtgcatccactttctaagtctacaccatagggcagaaaggatggtattgattcttgcttcatttgcctagattatatcctagacaaactttttggtagatagacaggccatcagaaagaacgagcaaagggtaaacgattggcctattcttctccctggaataaagatgattttcctatgtcattaacttgaacttcaccaggatcctcacagcaactagcccgttcggtgactatcttagggctcccttacatccttgtgaaatgtggatgtgcgggtcaagtattgcgatgactcgtcattggactgaaatggactaccggtcttatatgagctcgtcattgcccaggagcattcactggccggttgttagcgtgatgcttattttggctgatttgcgaattgactttcgatccaaaggctcttacgtgcgatgaaccgcctccaaagtgagaacaatacgtagtcaccagatgagttgaggacattgtgaactaagccagccaaacccagacaaggcgtaagatagctgctgctttcgatatatacactaagaaagctggttatacctgggactgggaccagagcatccctgcttctagcccactgacagcccaacatctgactgcggtaatacggcatttatgaccagggccccaaccaaggatattcccctaccgacgacccaacctttggctcttgtcaaacaacgggcctggcactcagggagccatactagaggcccttggaataactgacgctaccagaaacggtgcaggagtcagtgcacctgtatggcgggcatcaagagccccaaggt

SEQ ID NO: 1739 - DNA, 2456 bp, Emericella nidulans
taaattagtaataattgacgaaaaaaaaacacaatacgcccctaataaatgagccacccgcaaaaatggtcggattcttctttaaggccgttaaaccaacaaaaatgggaggcttttggaaacccataatagaagagggggtagcctttttaaaactcacgcggggggttttatgcaatccattatcaacttaaagctgaaggtggtatgcattttccctcaaaaggagggactatgcttctttggctgacgctttaaaagcctgtcgagctgacatctcaaaagccccgaactgcttggtgggtcaatttcaccatgtcaaatgacccgtcaatatggttcagatgcaagctaccgggctatttgtagatgcactcgcgcctgtcgcatttgtgcgcaggagtagtcaccgagccagccacccctaaccaatggtctgataatcgagcaagagtccttgacataggttgcccaggctgatcttgctcaaaggcaaaccgtcagtggggctttggctgctctaaagttgaggtctccgggaacaagtgctcaaagagtgtctatgggcagcatgcagttcgacaataatcggcatcctagagctctccgaattcacggacctttgtagagtcatatatgatccggtcacttctaagagagtcaccctgaaatacccccgctactgggcggtcaagcatcatggaagggtaagattacagaacttctattccacggccatagacaatgaaattgaaactaatacaatcacagggtcgcctccagttttaccgcacaaacaaaatccgcacttccctcaacccctcaaccacatcctccgcaaaacgcaaaagagaagacgggacagccatgccagcccctagttctggcctccgcgtcacgttcaagcagtcaagaccgaaccccagcaatcaccaccccagcaccccctccgccaaaaccccagggccaagttcaggtcttggaactcccttgcaacaaagacagcccacgaagctacatattccgaacttcgctgcagcgcaggttcaccgtcagccgccgtcacacacccccgcgactccgtctacgcctggtggcgggctcaagctgaaattgaaacttgggtcccagcctaagcaataacatttaaaacctttccctccctgccatcgtatttccatgatgagtattcttgtaatgtatcttcttcaggtcgttattcctgtccttctgtatccatttattttttgggagggtgtgggctgggtatgaggcgtgtttgtttggatgatcttttagaaagatagctatctatatctatgaaattctgagaattccaccgtgactaaagttgaaagatctcctagctcaacaagagtagaaatttgcgacgtccgacagggttcggctggttcttaccttcatggctttacagagtagctaattgttcctgttgttacgaaagtatcgagattaatgcaaatatatatttagcatgccaatttccaccacaacatgcagatctagatctacaaattaagtggaagaagcgaacagatcgaaagacttatcttagctaatatccctctcgtaaacgaacataataaaagtaaatatgaaacagacgtaatgcccttgcttggttcgatggattccatgcgagcagtccaaaatcgtgaactcctttttctcttaatgaagcaacccacatacatcgcaggatatggtatggtataaaatgcaagtcgtcgatgtcctaacgtctcccccctccactgttgtcttattttgggtctatttctcgcttatccgttccagagcctgtagagtggagaagagtcagttgtttagtcgggcgaatgtgcaagacataaagagagagagagagagagagtgagataaaataggactaacctcgagcatgacgacagaattgccgcggatgacctagaaaatgtacgtgatacagattagttcaaattcgtatagagttcaactccagtccaaggtcaggaagcgcatccaacatacaatcatgccgatagctaccttctctccgcctggcttctcttcgaatgcctcatctaagacgatgttcatgaaaacctatgatcgatgtgctccgttagcttttattcccgtcatcgcgtatcgatagcttctaggagtagcccaggacctgagtcgcgaaattcttgaagctgagataaaatacacagagttcggtccgacgtacatcgtagcctcgtagaacgccaatgactttgcggttgccgttgagttcgcagaatacccgcttctccatatactgtgaaggagtagtgtcagtgttaccattccaaacgccaaggtaatactccttaagagataccgaccttcttcaactcaggctgtgcttgaggcattttggcgattgaattctgattgatttgctgccttatggtgaagggctaatg

SEQ ID NO: 1740 - DNA, 1710 bp, Emericella nidulans
ctggaccctccacacactcgcgcgcaccgtttacaaggccctcccccagtccgttcagggcaacgaaccactgccatttgttctctgtgttaggatttactcttgttctgctggatttcctgctctgctttgctcctcgctgctttccctcattctgagtcttccactttcacagcgtatgggatgagcttttgagttgacgagcaacgagtcctcgatccgcgaggccagtcatgactggcgttgtcccgaatgacctcgcccattcgtctctgacaaagtacaaggacgagcctggtgataatccggtaaggttttgctttctttttgctcttctgctttgacttggtgcgctgctttcgcccccattcttcggctccatccaaggacatcctggctcgtttcacgtggtcgagaccgggaacgacctgtcaacaaagacttgctacgagtcaacagcggcgatctccccctggttttgacagtgcacagcactcttgttgtaaacggctgccgctatcttaagctttgatacacgcgactcgaccctggccgtcttggtgtatcggtctccatctgaattgaggctccaaggacccgttctccactccctggggtcctaggagaccctctgacccggcctgatactcgccgtttcccggggagaacagtcttgtgcgagtctctggccgacgtggacaccggccctgcgcttcgcgattgaatgtttcgcgagactgggcatgtgcaacctcaagaaccgcaaaggcatgtcttgggcccattatggttacagtgggatgttggctcactctggtcacacctggtgtgactgatgtccctacaagccgtctggcttttggagaatgcctggacgcgagggattccggtatctggacatgccagggccgcaccgagttgcatctaccgtctaggctggagcggccgtacgacctagaggattcttcgacgttcatcgcgccgccagatcagccagctgcctacgacctaggtccgcattttgacagccgctatcatgtggcggctgggggctatgcagcctccctgctttgcagctcgagcgttagatgcacatattaaagcattactgaccagtcccattgcagttgcgacaacagcacgctatctctgggcatcaaggctcccagaatcccggctcagcaagccttgttcacatctcaaagcaacccgcgtcgcctcgccaaactagcacgaatctctctactggatcatatggtcctccgactctaggtattggagtcttgcatcatccacctccatacggcccacaggctccagagcaaacctattatacatcgcatcaatcttacaccacggcgagtgcaccgagccaatacccgtctagcggtaagtgcatttgtcttatttgtcttacggagaaaatgaaagcccagatagcatattggccagttcacggccgattccgaaacttcccagtccacatcagtgctcagtcattctacgctttagcctctaattctgttctaggtcctcaagaaataatggctactacacaaatgcatcgaccttatccccccatctaccataccccccaatcatcctcccctgcttcagtggctcccagccgcacgaacataacagaagcctctatacacaatctcctcaaatgacgtcgacgatctatggctatcaacaagctttatcagc

SEQ ID NO: 1741 - DNA, 3192 bp, Emericella nidulans
gaatcatttacctatcagtgatctaacttctcccggcatcttgacagcctttagtctgctgtggctgaaacacagtttcaacttctttgttagccatatcatgaaactacaggcgaaggttagtcttggatgtcatacatctctttcctataatagcctaagatctattcatggaataggtattatctctcattagttttgatggagccatctgggccttagcgtggcaaagttctttcatcatagccgcatgcatagtgggcagccatgatcgctctgatgaacagactacgcaggcatgttgaatcagcacatatgtgaattggatgcgtataaaagcattgacattcccacactttcctgtcatttcctgcatcaaatttaacagacagctcctttctcaaagcatttattttcaattttggaagctggtcttttccgtttaaaaatcactcttcaagtctttattattcttgcaatgaagcttttcttcgtctcgattcttcttgccgcgttgctggcaaccgctgttaaggctgcacctgccgctgaattacaacatcgatggtgcagattcgccggtagaatctgccccccgaccaagcgtactgccgacgccctcaactttgtcaagcgtgaggccgaagcggtggccgagcccttcaaaatcaatagatggtgcaggttccgtggccaggtttgtggcaaggccaaacgtgccgcggaagccattggaaatgtcaagctctctgctgaggccgttgcagacgctatggcttttttggatgagcttacccgggaagagtacgcccagctcgcgaaagatttcggccatctcaaggagtctgacaattccgacgggtaaacatcattcgtatggttcaactacagactactgctatgtatcaaactcacaaaagacttgtagtacttcctctgaagccgcctcgacattaaccctgagttttaacgaaatgacgggcaaagggtgtacgaattctcttgattacgctcctttacgcctatcagttagcactcacagtttctgtgccagttttgcactcagatcatcggtttattgctaacctagtctacttctgccggggttcttcagacgagcaccgggttcaggcatgggaagtgcgcggcaggagaagaggaaacgaaggtcgtgatgggctcacatgaccaagtaaccgcccggaggtcttaaggctaattatcctatattttacccaaggacatgtcgagggttagtcttgtttggcagttacattactctagtgctcagtgcaaccatacctatgtatatatacgtgtatccctatagtcaaacaaaagatttgtacgagcggtctgtcattcatcactgatagtaacgaaatgtccttggctgtcttgcgtatatcatgaagatgtcctgggacatttccctccacataaaaccgtagaagccaattaagccgcaaatataccaaagctccttagtcacacagttacattgtgcctggaatgctagttttccatcgtcgtagcttgtgttcgttcccaccagcgctggcctcctgcttgatagacagggtcgctgaaaagcctgtatggagaacaaagggtgagctcatttgatgggtgattagcctgaccggcctccctctggtgagcgaccagaccatacccagcaagcatatatggttcggcagaatggtctgtaatatcgccattatttggtgcttgagccgaatcgcccatttctaaatccatggtaagaaccgcctggctctggcccaatttcccaggctctgggcatatctgccacatctgaatcaagcgattctgctgatctggcatggcgttcgcaaatagctctaattgactcgttgacagtgtggatggattgatacggtggtgcatgagcatctcgagtactccattcgcagtttcactggtcaccggtggagcaacattctgcgggacagctaaccccggcatagcggctctctgtgctacatgcgctgaatgatgataatgctgtgtgatactatatgtgattggagaaggtgtcgcaggcacttccggtccttcagagacccgggattgaccgatgctcatgtgtgtgttaaacagcgacacaagatcatcctgtgctcttaatttaccctcggacgctgataaaccgcactgcgaaggacacctagtcagggataaggtaactaacatttccggggtatctacctgggtgcagtgagggtctcccacaaagtcagtcagtatctcagagatatcggtaacatgtccacaggagggacaactatgcaatatcgacggagacatagtgatggaatcccgtaggcaaacgcagaacaggggagtggaagatgcgtgacagagttcgatcagactttgcggactagatctaagctccagtggcctgaagacagtggatgacagatgtcagagggaacagatggtgaattgaggggccgtcgcaacaatatgcggggtcgacagtcaacagtaaatacctaggaaaattgagaacgtgaaaattatccagaagagcagtactgagcactaaactgtcgaggcttttaccatcagtagtctgagaagctgcaatttcaagggcggacaagaaagtgtcaagagaggaaagtgggatgggagcagatgcccaagggttgggcatggagagttctagtctgcgagattcttagaggtgaacaggaactagcctcgagactgactcggcggcctcatctagctgcctcgttctacttgccctgcataatagcgcaaaaccgtcatcttcgtactagatgagcagcaggacagtgattgatgaagccgaaatagaaatgaccagggtaaagtcatgtgatctgaccatggcagtgacaacaacggctgagtactaggcggtaagctaggtagctccaagacctacgtaccatcatcggagcagtaacatcaacctttttgacttcctctgaaaccactgacactattatctccttatacccttaacccgttactcaacctgccaccgttactcccctatttgtacttcagtcaattcggccatggtatgtttcgctgctccagttagctgatacgccagctaatactcagcattacagacgtccatcggcaccggctacgatctatccaactcagtgttctctccagatggtc

SEQ ID NO: 1742 - DNA, 3381 bp, Emericella nidulans
ctccaggctgggcatacgtttcattgtcgtctggcaggtcatgcgtccagggcacgtacccgactagctctcgtccccggatcggatcccagtatgtgacgttctcattgttgacgtagaaccggtcgatgaagtggttgaaggtagtgttccatagatattgctggacaagggacttgatagtttctgctttggcgttgtactcgtccgcgagatcctcgttgcccgacgaggctgcgagatttgagatcgctttcgcgttggcgaactggtaggcgttgatgctcggcctgaacgcctcgcccccaaaaaacccatcatacccaccgctcgcgtcgatgctagagatcgtgtactctgtcgcatcatccaagggctggatccagtagagccctttgctctcatcgtagccgccaacgccacccgttgcattttcgtcgctccacccctcgtagacactgaccatagcctctaaacgttgtacggcatcgtcaatcactccgtccaccaggtagcccgcccagacgccatcggccaagacctctgagaactgataggggtatgtattcggtccaaagagagtatcagcgtaatcctccttgaaccgacggtctcgacaccagcgtccttcccggagatggaagttggctgcatcaatcaaaatcccccatggggaagtctgccacgagacgtcattgatgaactcggtggatatatacccaagggatcctagatcgcgctggtgtgcacggaagatggaccagcggtaatagtagacttcctcaattgacgagaccgaggtttcgaatagcgggattcgggaagtgtaccaaggggcatcagcaccgaggtattgacttgtgagggacgttgcattgagggcgtgggatacacccacgagggggaccagtgacaatagctttctggatttcatggtgctcgctgacatggcttttggggtagggctcggtggggaaaagggcatttatgaagccaactgcggagggagatcgaccccccgcattctgacctctgaatttaaccgacaggacctgacggggagccggttgattgccgatctcctgatcgtctcttggtatgtgatattcctcaggattctgcaacggcgtcctaaccccacccggagtttcttcactttcatcggcggagggccgaaaggttgcgtcaggaaaatgatagatttatccgatagccccatggtagccccagactttttcagagagatgcgatcaagttatactcccgttttcgaaagttcgctgcttgttcggcgaaccgagcatgacggagcggttagggttctgaacaaccagcaaaagaaaagaaaaatcttccgctgtgtgcggccaggttcaagcattctcaggtaccagatcctggcctagtacgccatcctctgctttgaccagattctgactatcatggcatgcagctgctgtacttgagtacggtacgcaagggcctgcctgaggattcccggctgtgtcggccatgttatcgacgtcttcttaataccgggcggcgaggccctggatctctaattatgcagatgcttgagcgtgaaaaagacttcgagttgtgcactggaaaacattcggcgtgtcccagcaaactgagcgcttcattatagatcccatcaatcttcttggactggggctgcataacgagcaccgactgacggcaaccaaagtcaaataaacataagaagaatctgattgtcttcacacttttgccaggaatcaagtcggggccggctctgtttatctacctgacgaaggttcccacccgaaggggcatccacgccatagaggccaaggtcgtggggtggcaccgctaaagagggtagctaagaggcagtctcctactctaatgaagtcttgctttatcaaggataaattagaagagaatgccacggtagcctggcgcaactacctctgggtgttgtggtatttgcgccgagttcgtatacgcgcattcctgtgtgggattcgtgggcatatttggcgcccaatggctgccggactcgtactctgaaggtcgctcagatagacatgaaagaactaactctggctatgctccaatggtctcgatgcgacatggcgtgcgaaggaacgagctgcctcgagagatgggggcgcttgtgtctaccgacaactactggtaagtgcggccatccaaaggctttagaccggccaggccagctatttcgtccatgtctgggcgtaattccttacatagatcagctcttggtattgatcaggctgggcttcctcgaagatcggtgatgctggtctttttcggtcacttgcattaaaggatcgagatggtgtcaatgaatgtgcaggatacgatacgagcgtgaacttgcgatcgtcaaatgcagcgcaatgacttcccagctgttacctcatgagctgaagttacgagaaaattatgcactgtgaattctcacgagcaggctcgatattagcgctcagcaccgcccttcaagccacaaggtttgcctaaagcccgttgtctcgtatactagctgcaggtgttcctgtgccagccatccatctgtaggtagctggcgccaccaacagctcttatttgcagaaattgggctggggatgcatgttgagtacccaactgcatgcagactctagtcttggccacaccgacgtgaagacgctgcaggtgatgtttgccatacccctctcttttggtggctggctggcgttcacagcttgaatgaggttcgtttgctcctgacttacaggagctagttcgtcttagctacgtaccgctgcaacggacgctgatcatttgatgttgtcttgtataattacagaacattattggctgcccatacatccccagcacaaccgccagccatgccgtgtcactgtgactgctacacacttactctctgtcatggcaacagttgccacaggtcattaggtataactattatgaatacattgccctctattttctgtgacgtgtttgctctcatacctgagtaccaattacccgcaacgtcgtaccatgtctccagctctgcttgatatcgaagttcagggtgaggttcctccatgcctcttccccagatcgtctctctcgccaaatgataagacaagcgaactgggtactcaagaactggtcctcacggaaaagttggatttcgtccaccagttcctgcaggaaagccagatcacccttccaaccgccctgcaaacagcatgggctctgacgcttcgctgtttcgtgtcttgcgatatcctctcgttcggctatcatgccagcaatcttgacggccatgaagaactggctctcgtcggccgagtcgacaacaccgagaccattgcggtctgtttg

SEQ ID NO: 1743 - DNA, 4391 bp, Emericella nidulans
atgatggatggaaagcccctcaaggagtggagtggccccgtgtctctagccgcaactatctcaattctaacgaccgcctattcatcagcattgatgcatagcgtcagttcctttatcagacagctgaagtggcttcatttcaaggataagccacggagactttctcacctcgagacattcgacgaggcgagtcgcggggtctggggggccctcttgctcctcacgaatgtcaaatggaatctagccactctcggagccatcatcacaatcttgcgactgacgttctcggcgttctcacagcaagctgtgcaaattgcgcagagggcatcgacgacaccttccgatatcaatagtgtcgcctttggatacgcgcacaattattctcgggattttagcaattttagcacatatggaaacactgacaaaagtaagggcatctctacattccaaaacatttcagcttttaggactttcggctaagcaacttacagaagcgatcccacaggatcccgatatgcaattcgctataatcaaaggtctttacggaattgatacgcctgctacattctcctgcccaagctcatgccgctgggatggctcatatgtctcactcgggtttaagagcgcctgtaagaatgtcaaacaagatacactacgttcggccgcctgcgatgggacagagcacaggaaccgatgcaacatgaccacgccgaacggcgtgaacataataacgcataggatccacaccgacgcggcgacaagctatgtcatgaataccacgtcgacactggagccatctgctgaggagaaattgctggaaatagcgcggttcggcatctatcggtcctcgccagacggcaattttaggcagcaaaatgtcagcattacacagtgctcgttatatctcacagcttacgaatatgcaaatgcgtttgccaaattgccaacggaagtctcttctatttcatagaaacgcgcgaagttggctatccaattggtgaccgcaagatggttttccgaacaaacgagacgaagaccgaggacaatcatacgattccggcgctgcaaataggcgagtgggatctacaagctctgcataattttttccaatccgcgacaatatccacagagtggattgaagggaactggcaaaaccctaaccccggtcattcgggtgccttgaagggagacgtggatattccggcacggttcgaccacatggccgctagtatgacggagtatttacgaaacggccctaataagttgttagcagatggtgtaaaagtggattcaaataccagcctcggcgcggctgtgatcggccattaaagccatggaaaacatatgcagaatgtccttttgctaggtaaattacatgtgttgccgtctgaggcagttcagggcgtagtccgcaagaccgagtcagcgctatgcaaggccccttgggagtaaatcaagaacatgacacatgaacatggcttttctggctgcccaggtatgggatccaggaacccgttgcgaggcgccaccgtgatcggccatgcgcccaggcaatctagcggccccagaccgctaggaggacaccatacaaccctagtaagagttcaattgacatatacttgtatttagcaatagctcaaaagatatctcaattccataaggctacttcattgttctgaaaccgccaaataattcatcttacaggtcctacgactgggtacctatcgaaaaccagatcagtatcctgtaacatagattcgcctccttccatccaacccatatatcaggagtaaacttcaagcttacattgcgagtaaaagtggttgaagaacgtgcatgtccatccagagggacacgcagtcggtcctgtgtattcgctgccgccgcattggccgtagggcgaggcggtagcagtagctgtggctgtagtgctagtggttgtcgttgtcactgtggtagttggagtagaagtcgtcgtcaatgtcgtagatgtactcgacgttgttgcagttgttgacgttgaagacgaacttggaggtgaacttccattcggctccccatagaatataccccttccatttgtccctacaaacacccgtccatagttccccatgtccccattcaccacattcgctgacgcagcaccgaagccatgctccgaatcggaaatcatagcccaagtggttccttcatcctccgtcttagagagcgcagttacgccgtctacagtgaagaagccatatattactggatatgcggatgttgaagagggctttccgagcccaaagccccagccagctgtacaggagcttccagtcttggtaaaggtgcggccatagtctgttgagtgatacagtccggtatcggtggaggcccagacatcacccgcaagcgatggatgagcgcggatggcgttgaccgtggagctagaccccagcgtggcggtcttagtgaaggaggttcccgtgtttgtggagacgtagaaactacccgaactgccgccgtagaagacggtattgttggccttgtccgacgcgatgaccgcacccgaggggagacttgtcacagcggcaaaggtggactgatactgtgagcggagagcgccctgggtgttcgacatcaggaggatggtgtcgccgtctgcggagatggccacaggacctggtcctgtggccgaagaagcggcgtagttggcggaccacgtgcggccaaagtcattcgagagggcgacggtgggatcgtcggcgtcagttgagccggagcgaacgatggtcgctggattattgcctgcgtaatcgaggccgttggtcgagccataggttggtgtgtggtatgcctgggttggcggggtgtcgagatctgagtgatagaaaccgccgacgtcatagacagctgagaggagtggagggccgcccgggggcacgatcaaggcctggacggctgtttcttcgattccagaagccaggctctggagggtaacgcggtggatggagtcccagcttgtgaggtcgtggccgccgtagatcgtggcgccggtaccatagagccagtgattcgagtcaaacgggtcaattgatagtgcttcgaccatccagcctacgcggacgggaaacccgtctgtggaggtggtgtcttcgagccatggcgcgtttgacacctcgtagtcgtagtagtagttgatgttgggatagccattccatgcccatattggggaccagttcgcgccggagtcaacactacgccagatgagctcgtcgggccaccagcagttcagggccgcaaccattaacgttccaggaaccttagatgacagagagaccacagtagccatagtatgtatcttccatggacgtagggctgatgtcggtccacgttccgcacgagatgtcgtacttgtgaacggtcccgttcgttccgtcgtaaggaccagcaccattcgagtaggagatgtatagtgtcttctccactggagaaaggacgcctatgtgagggaggaatccgtactgtggctcgccagtgacccagttccctgtcatgcatgtcagtcgctcagctcgtatacggctgatataatcttacatgtagcaccagcatcttcagacacaaagacagatttaccagtatctgctacccctgtttaaccttcagcatcagctaggttaacagggagcatagaatcaactaaccaacaaagatcctcggggttggcgatcctgagctaccagatgtagaatcaaacgtcacccatgcgatacccacaatatcagaagtataagtcgagctcgagtcctggaagtacgtccccgtccaggtaaaggaagtgacattgctccaggtcgcgccatagtcagtactcttccaaagaccgtgaccgctcctagcgccaaagaagagaatgctattcttatgagggtccaccgcaagtctctagttgatacaatcatttagcggctcttccttagaagatcaagtcagggcagtatgatttcgcgctcacctcacccatcccacggccaggcatgttcccacccactttaaacggcagcgctgtttctgtccaggtctcgcctttgtccgtggagcgtagtatagccccgttgctcgtgtcccattcgttggtgtacataccaacggcaagatacagcctgtttgtgtcaacggggtcggtggcgagcgcgtccacaccccatcgattcctgcacgattgtcaaaccaaccatagaacatccatagcggaagaaacgagcaatgataccagttactattacccacaaaatcagtcagtggcgtccatgtatcgtctgagttaagacggtatgccccgccaatatcagtgcgcacatatgcaagtccctcttcggacgggttgaagacgatgcccggaacgaaac

SEQ ID NO: 1744 - DNA, 4296 bp, Emericella nidulans
gcactttccgtgataaggacgaccagtaccatgggcagattctggatatcgacctggggacctgctcagacccggggaaagggccagagccgagattgattcggcacagaagagcgggagcagcaccattattgaggtcctgagcacctgcgttggtccagagttctactgaaaagcttggtcacgagtagcggtatcgattgaggagaatgaccatgttgagattggaaggtctggagccggactttggggtggagaataaggacgaacatgagcacaaacaaaagggagtataccgagtacagctacacaacaaaactacgacgtggaagcatctacctaagacggccaagatgaaggtgatgtcgccatctaacagcacctgtgacatcggttgcgccaaatatcccagccttcttcgaccatatcagggtaaaaacgaaccgcaactcccgaacgaaatatccaatacccttccaaaccaggacagcggaaagtctcgcatagcatggcagtgcaatcctccatgccccaagtccggcgtttgcaaggggaaccagagcctggcattgttacgcggccttttctttcttccccaaagatgcgggttcgtgataaaggccgaagttggatttttggcaactatgataggtttgattggattaagaagcggcaatttattcatcatactagcaataaaacctcaccctggacgagtttggcaatgtgtacagtgtgatggtgtgactgcgggtgtggttgtggtcatattgcttctctattctgtgctatagttagccgggactcaataggatattaatgtacgagagctcgagtgcactttcctcgggaagattactgtggcccacaataggcgcataagcctgcatatatctagagaatatgccggcacagactgatgcattttctcattcccatagtagcgaattggcaagcggacaatctggtaccatgtgggttcagtgtcttgaattccagacaccaactactttactgtatgtaaagcacctctcctgcgctctgtatacatgctctgcgtggtcactggttcatgcgatggccgtttcagacattctactaacagttggacgatccagccaaaggagtcatagggtcagacagcctgtactcttgtgcagccaataacaagcagcaagcaccaaaaacaacaggagatctgatccgcagtcaaccgtcacttgtgagcgagtgcgaatacagacactttccagcactatgaatccatggcgcccctccaaatctatatggacactgtcatcccgtcagagtcggacagactcagatcctatactagggttgggtatgagcaatacccaaatatttcacagaaaagttccagttcgctgacgagcagatacaggagcctgatataggcagacaggcaggtcccttcgagacagctgcatatatccgatagtacgtggaccgtcaagagtaaaaggatctgcacatagcatatctgcagatactgcagactcagcaccacaatccctaccatttcacgacactgagtcccgaggttttgaagtcccagctcgattagcggactccagcccccgagccacgttgatagccggaggtgccggaatcggatgctatgaatattctaattgcgtctgcagacaggcagctgccacgccaacccatgctgtagtcgcggactagtggcatggttcgttacacagcaggcagacagaattgacgataataataataccaggcgttaatggagaagcctgtgcgacaatgggcggaaacacttgctcttgttaacagcagcagggatgggccgttttcgagtacgaaggaaagcagatgatcaacctcgtcggcagagggcagcggttcattctctaaaatgtccgctagcccgtggctgaagctgtcacgtctgcactaatgcacgacattcgcgtaattaaatcgtccgcgacaggggtgttgaccgacgaactctctaggtctcagtacttagttgggggcagaaagactagaggattttctgtatacatgcctgaccagccatgttactgggaacacagcacgtgctgcaattccctacagccaaggcaagtcttagcccataggttacgtgagggtatcacctagcagccctaaagcaatatcagcatcaatcctcttcaatcctccatcaaccctcttcccgctatcttgtccgctaccttgttctcaactcggtaagccttgcgccaggtcatctcgcaagagccgaactggccaatcctagcctgagttcagagcaaccaagtgagcaccctaacttttcagctcccgtagtcgttcgctagtcgcgtggaccgcaaagatcagcgccagcaaatagttattggaccaaaaatctacgctaccgaatcgttaatactagccttggccgtgttctgtcctgacagtggccgagagaggacacgaagcctcgaatcaaatgactaaagatatgcctgaatttttgctttaccccaaattctggagtcgtgagaggttctggcgggtgggctgaatgcgttcctcgtaagattcgaaatacgaggcacttagcacgcttcgtagtctgcctgcctgtctgccagacctagagattcgacggtgatagtgaccatgatcaaactagacactgacgccataaggggttcggttgccgttgaattttggtatgctgggtcgatttcgatgatcgatcgggactctcctaaatttgccaccctcgtggcattgaaggaagaagaatccttggttctggaagacaaaaaattgtagtctcccatggtacagcatttactagtgcagacatagtttaccgctaaaaagaaaattagagatgcggtgtaacaagcttgaagatcctcacgtgcccggtctacatcgtccaattttcgggcgagcgaaccgagcttctccggttcatagagtgtggcgcaaaactgtcgctcgttcagaacagtagtccaatattattgtttagtagtcgaggaatacgcgctcaaaaaccccaaacttccaacacgtcagctgctggaagtaggaggctatggatgctttgacctatcgatctcggactcactggtactttgccaaggttagaggtgaaagaaatgacaggttgacagataaatctcattggtggtgcctttgtgactgagcccgagtaaactcaatctcagccttgtctttcagactcacctagacgccaaacagggatgagacctgagactgaggcgctcgcatttgcgagatacggttagatcaaacgggaaaagtcgctgccaggagcctgctggattttgtcagcgaagaccgcggcaagacacgggatcgttctagcggtcttccagaatccttctagagtcttctaaattcttggtctgtaaggggctcatcccttgagtcagtgagctggatcagggacagcgatcatcgacagcgatcatcacagggcagatgatattatattaattcatttctgaaaccatggaatcagagggggcttttatgatctcatattcttcgacactgatttgctgttggccaggtagtgagggaaataggggtagacgccccgttaataaagagtcggaaatgcaggatgaaacacgaaactggacagagatcatgtcaacttgacacacatgtcaactaccacctgtgctgtgtcatatttttaaggcggagaatttggacacgggtaaagttgatatgacaccctcttgggcttcgcctcaccgtcaaaagcttctaccgtaaaaaacattttacggagtatcccgttaagggaagataacacggcctgagcaggagctatcgaaacaccccgaatcttgaagccataacctcctccgagcagctgagcggcgggtgactgccaatagccgctccaaactcacaatcctatttcatccccaaccctttctctcccaaggtcttttccttccctccacaaactcttattcaacatatatacatactcctttccatcaccaataacttcctcaaatccaagatactccctctcatctacctctccttcaatccttctctctcttcaaaccttatatcaatacttactacaaccacaactccttaaaccttacttaatcctcactctcccacctctcctaacacctcaacttacggtctaacctcctccccataatttttatctcccttcacaacacaccctccaaccaccctccccccccccagagagaaaaaatattatatttttttttaaccatatcc

SEQ ID NO: 1745 - DNA, 2922 bp, Emericella nidulans
tatgaatatataagatatgtatggagagatatgagagagtaagatatgtaaaggtataaatgaagagatataatttattaaataaaggaaatagataacaatgagatagttataagagaaataatatgtagagaggtagaataataaatgaaaatgaaatatatgggaaagtatgatgtgaatcaagaggaagagatttagggataagaatgttatataattagtgagaaagaatgaattatagtttaacattgaaatatgttatattgaaatatataaattccagtaaaagtgtttatacgatcctcgacccctgtatataatgtctacccttaaagaatagggtcaaatttacattggccatggcggaaaaaagagtttaggttaattttgtaagccggccagaattcaaggaaaaatggtataagctcgtgccaaggtttcctccatccaagggtcaatctcataaagggttgtcttcaaaaacacctggcttgtccctggcctctttaaatggccaggttcaaccttaagccattgatcctcgcactccttctttagttccaggttaagctaaaatggcatcctcaaactggcctgggttggcccgtttcttcagcacccagttgcacggtatggcattttctggtgcttccggattgccatggcatgtggtaagctcccatgaccaaactttgaggaagcttgataatgcattgagcaaaatgtgggaatatggagttagtagcctgcaacatccagccaagatttctctttcgcctacaatcttgcaatctcggcggggctctttgacgtgatagatgcgaacaatcaagattcttgctacggtcattgtactcgtcatatacagccggtcaatcaagcctgttagtagtcctgggtcatagcacaaggttcgtacagcttaacagattcgcgtgggcccatatggctcttctctggaaacatggttgtcccatgagcctgtcgatcctgcttccgatacgcatacgcatcaaatgtttccatggtgcagcatgcgtagcctgacttgcctgagcgcccgcggcgatttattaacgcactaattcaacatgagatagcaagcactggaggcagttccagctgtctatctcgaccttgggttagagtgatatttgaccagtaacggagtaagtacttacaacaatgcaatatttgggcgtatagttgtcctggctaacttgggacaatagtacataatcagtcctcttagtccttaccgccggctcgtggaaacagggggcgtcgtgtatcccaagccatacccatctagctgagggttaccacaatccgacctccgatctgttgagtttatcaatgtgtatgattaagtattcaaacggaacctgaaagaagtctacaggtcatagcggatgatcccatggttcggacgtctgatggtcaaccagcaaatttggatcgccttcctcatggaaaaaagaatatgaacgcgtattttaaggtttacattttgagttagcccattcgactttgccatcatatacctccatcatctattcaattataacaactgtcaaaagtgtcaccctctcaggtgaatgtcactcctttcacacaaagtagggagctgtccaatattgtgccagtttgcttccttgttaatcatcgcaatcattggggaattgagttatatttaacttgagcgtctgagtggttgtttagtagggcttgtataagaatgatttgtattaaatgagcactattcatttgtttatacttcagcctttactggcccagaagcaaacattaccatactccaaagtcatttcttgttctcatggaacataatattctcctcaaatagtattccccaacgtggcatacatctgcctccaatgtgatcctgcttttttctaatcactccatgcaacccagcctcaggcctaataactaatccactcctcccactcctcccattcgccgtccataccattaggcctcctccgaaattcgacgcagactttgcgggactcaggatggactgccagcccaaggacatggatcctcttaaattcaggaactagctgatcagcattaagtccgaattcttcgacaactttagcccgctgcgctatcacttcaagaatacggccttcccagacgccatctggatagggtatggttgataatacctcgatagcctcctggcggacttgggagtttcggcatttggttgcgacaaagtacagggggtaaataacacccatggagacggggacaccgatagacgaagacctagaacagaacgcagtctcaaaatgctcagtgcaggctttagccaaagcaatgatgcgtcgaaactgggctaaaaactgatcatagagcgtttcctccgcgtatagacatgtcgacgccattatacgcgcgacgtaatactgaattagcaataatgacgctgccgccgacactcgcggactactgcccagtgctttctggcatgaatacgagtacgtgaaggtcgacttccagacttcaggcggtgctgaaacgtgtgcgtgcgtgcgatcagttcgagcggaatatgaccgggctcatggtagcggtagcgtttggttggtcggcgcccaaagtgcaggatttgcgcgtgttcatgcatcagcgaagtttctgcgtcgtggagcgtttcgaagacgtaggggattggtggtggccttttgattgaagcggcaggagcacgcataccgatgtatagcgttgcttgcatgtccatcttcatatacgctcttcgaatttccgggttaatgttgcctttgccatgtttagtggttataggacgatctctgtctttttccaagagaattgacaaggagtagattcataccttccttgaagagctggacgaaggatgattctcaaacg

SEQ ID NO: 1746 - DNA, 4380 bp, Emericella nidulans
agtagggacgagcaccgagtgactactgttgtcatctatctcgaccgagatgcgtttgacagaaccatgagcccatccgcactttgataatgctggactgtagtgttcggtcgtccaatatgtacacatagtgttccctcgtacagtctgggtatctaggcttagagtagtctgcgttacccctatagagtaggctccgtctccaatctagtgaaggtgatgcacgatgtccaggcccgagatagttctatgctaggagccagggcttttgtggttcggagccctgtcacggtccgtatggtatgggactaggttaggatcagctgtggttccatatcgataggggtgaccgtccgcccacgcccagttcatttgctcattagatccaggttgctgtggcaatgtgatcttcttgcggcagcaacagtcactctgccaatccaattcgccatacccagttttttaattctcgaattttcgaatgtgtagttaacctgccagtcattatcatggccatattcaaggatcatggcttggcgtggcgttaaagcactgggagtccagggcaagcgttttatgcaagccattatgtaagcgggggaagatatgctgcacttccgagaaatccggcgggtcttggcttggatccgccgagtttccctcttcaaatatcccttgtatcttattattaattgctccgaacattattgattcgtccgattccgaagcttctagctctcaggaagtcttatgacttccgaagtgacgcacttcacggtctacacggtagcatcatgaacacagcttcctcggctgcaaagccaacggttcggcttccatgtgtcctagatttcagccgacccgtcaagtccctatcggttgccttctggatctggaaggccatcctctttgttgccataatcagctctccagggcttggctatgatacatcgtcgagccttcttccgctcctggccaacggctcggtcgagaccgcgccagataataagaatctgtctcttccaattccgctgaaattcgtccgatgggactcgatctacttcgttcacataggccaggctgggtacgtctttgaacaggaatgggcgttcagttctgcatacgggtatctggtcaattccttgtcttgtcgtatgtctgctcccctattagtctttggatatcggttctaacttattcagtttttttcccatcgtatgattcaaagggagtagcagagttcgctatcgctgctgttgtgctgtcacatgtggcccattatctttccgtcctaacattgtaccagctctctctcagtgtctttggctatgagaccgagagaaagaggctcgtttgctttctttctgcggctctgcatatcatctctcctgctggaacattcctctctgcgccctatgcagagtctctcttctcattcttgaacattgcgggactctacagttactcgtcctccctcgttgatctcaccaagcgaaagcagttagtaagccatgtgaaactcctcatttcgggatgtttctttgcgatagctaccgctgtgcgcagtaatggcatcctcagcgggattcttctagcatatgaggtggtcgctcgccgttcgcccagagcagcccgccgtctgtgcttcgtcattacgagcggctgcatcgtcgccctggggtttgttattcctcagtacttagcgtacaccgcatactgctcgaatgatagcctctcccgaccctggtgtcactcccttgtcccaagcatttatggctgggtccaggctcattactggtaagttcttgagaagtttgctccagatttagctacatgttaatatgcgaacaggggcgtgggattattccgatactggacagtgtcaaatcttcctcttttcctactcgctttgccaatgctgcttattctctttcagtcctgcttctggactctgcgcgcaggagctccctgctggcttaaaaactctgctgaagccggtcgtcttcatttgcccgattcctcagcccaattgcttaaacaactcgctgtggtccagctcgtgcttgcgacaatggctttaactagttatcatgttcagatcattaaccggatttcgtctgggtaccctctgtggtattggtatcttgctaaccaagctttggaaatcccaaatcgatcctcgtccgtggccagatatagcagtctgttcctggtgagcttacaagcaatggtaatttatgcacttgttcaaggcgttctttttgcctcttttcttcctccggcttgaagcgttgcaggtcgtgcattgttctctgggacaggcttttgatagtctattctcgcattatacccacatgcttaataattatgactaaattgtctttattttagtcattctaggtcttcacggcgttatttgaatagactctacataaatcaccatgcaaaaagctcagcaattgtggttgcgaaagtcttcagtgaggtagtgacttacgctctcctgtctgcccacaggtcttaaccaacacggtcttccaggccgctaggaggtaatcatataaccacttctgagccttttgtaatagattcagtttctcccacttctgttgtgtcccttgcgaaactattgcatcttgacatcatttctgtacttagatagtgagctagctcaggtggcaaaggtggacggatgaccccgtctttcacgagtatagcatcctaagacaggagggggtggcgaatgagattattgccccagatatattttttggtgaatgtttagaggtgcgatttagaaacatttatacggtgctaggggtagcttgtgtgtcagcttctacctacttagacagaacatgcttaactctcccacgacgaggatcgaacttgtaagctggagataaagcgggcttgtgtggggcgctgggccagactaggctgcgagctctgttacgtaggtagcattatgtcatcagcagcctgacaccacaagccgagacttatggctgtcttctactgtcgtgcgtgagcttcttttatcctcaattttccagctcccaactctgtgtagaatagggggcttttgcgaaccgaattttacctgcttgggctaatttcctggctataccccttccacgattggtatcattgctgtattcctttcgatcgcactgctagaccaggtctattgggattcgtccaatgcgaataaacgacctacagcaggctactgtcggttaacggtgattatactctaacttctggattcgagctctatgagtcaatgtatagcgctgcttgttgtaccgtcactttgacatccgtgtagctgacatcagtgttatgatagagctttcccgcatctcccgaattcttaacatccgcacacacagcaatcgtcgcacaagctgcagattatggacaatccaaactctaaaactatattaacaccggacaatttccataatgtacatacgatttcacgagccacatccccgggtggtggacctgacggcgtcaacggagacggcgagcctaaagcacgagtccgaccacgcacatatccttacttcaagtacctgccatatcagacagaggatgaggcccagcgggcacgatatcttcgagacatactgacccagctctatattgcggtggaatcgggcgatttcagtcctggtgcggtgcactggacacgggagctgagagcatggctatcgctcaagtttgacccgacccgcagtgaccggatcaagcttgttaagctgtactatgagctctctctagctcccggcatcgaccccaacgtcgccgagcgtttttcgagcatgttcatgcttctcacaaagtgagtgcaactctatcttgcaggtattttacgcatgccaatgctgacatagtcccagacgcaagcattacctaaggccaattaaggacctgacgttggactggagacctctgtacagagaactcaaagcattcgttctcccaacagaatctggcctcgtacattcttcgaacctcaagcggaatgtcaagactttgacaaagctctgcgcatttatccagctctacgttgatccttgtgagcttccagccatgctggaggagttccttccgcattacagcacctctttctcagaaggcgcgtttgtcgtagtcggactaatcaatttgcttgctcccacaaccccaccaccggagtcaagagaggatttactaccgcagcattatatgccaacatacttccatctttggtccttggttagccggtcaaaaacttttgatcagacgttcctcgacttcttcaacaacggcgcggaactcattgcctgctggacatattccgttttcggaagtatggcctcacaccaaaga

SEQ ID NO: 1747 - DNA, 4047 bp, Emericella nidulans
aattcgcgattgatcgtcattgtatgtaggattgatgaggtgaaaacgcgttatactatatcatagttcattctccaaggtatggcaatgcaaactgagattcctccatcgatccacgctagcctgcccttttcgcaggaagttacaacctagtccagggcttcagaaattgtcttggaaacttcatcgcctataaactccaaatcctaaagctttattcctcgcatggaatgagcgaataaggcagtgaaaagccgctgattactgtcattcatccactacttgtttaaagctctgccatcagtaaggtcgagtagctttaatagtggacagaattctaccatggtcggcgtacttgcggcagccctgagagagcgctatacagtaaaaggtggaaaatggggagaaaatactgctgatcctaaccttgctcttctggccatccaattgcactaagaccccaattgtgagaaaaaaaaagcgcgaacattcgccgcctgcgcggtacgacctcatgggccgttggcgataaagttcagactcgctactgcccgcaaggaagtaatgcaacgaactggcttgaacactgcactccttgacgcaatgggccttcacttcaggagtagtctcccagaccacagctagagtgctgcctatctccgctaatccatctcgtgacgtccaacgtcgtgggcgcattacagcggtggtgaggtgtgcggtatagttcgacgctgctgtctagcatgggtagtactgtaagcagccttcccgattgagccctagcctgcggcactgtcactgttccttccaaaccctgactctttcccactaccagtagcctcattacccgtcgtattattactactcgaaagtctaaacgtgctatgaaccccaattctcgacctagccgtcgatgtcggctctggaacctgaaggccctccggccgtccggcaaattcaccaagaccagaagaattagggtcggtagttgggtccaacagttccgtgccaggagcagggtgtgacgacccttcagtgtcatctgtccggccgccttccacgtcagtggtcgactgcatcttcaacatctctacgccgatatacggttcatagaagttagagcttggccggccctcggttgtgacgccgctgcggcgtttgttgcggcttgtactgggacgagatgtagactttgaagaacgagagcgacgacgactcgaggtcgagattgagttgtttcggccggaaccaaagttgaagccgaggtcattttcaagggcaagaatgcggtttgaggtgcgtgtggatcgggagctaggataaggttcagaccaggatatggagcggcgatgcttgtttcggtcattgctaggggtcgaagggtcgtcgaaggggttgtatggggaagaggaccgattgtggaggatgcgaaacaaggggcgggttgttgcgagggaccccgctgttatggaaaggccgacctctatgcaggaccagattgcaatctatttttgtcagaggtttggctttgaaggaggacaattagtgctcacttgaacggttccgtctgtgtgaaagtagtttattagcattggcattggatttgggggctggtagcaccacggagggtgaagacatacaaagatagtcagggtcatggattgtctgaacgaaagctaaccgaatgatgatggcgatgctcgcactacatttgcctgctcttagcataccaaagaagacatcagcaaggagaaacaatggaatgacgcacacacatgccatccccagaagacccgcaacagctgccttagtccgtcgattcatctgcagattgcggacgaggataacaggcagcaaagctactgtgaaatcgaagagcgccgacgaagcactgaatatgtacaacattattgctatagcgtcgacatatccacagtgtccatttgtatcgcccctcatccgagtccaccagaatgagacaggagagcactgtatgaccaacaggacgaagaatggtatgccactgcaaactgcgagaaccgtgaccgtatagagtgctgcccgatggcaggggaagggcatcacgcggaggagaaagatgcaaacggatactttggcaagcacggaggagacggcgtatgagatattgcagaaccaccagtactggaaggtcagtgaaatttgaagctgacacctgcgcatgaactagggaagctacatacttccattgcagtagttcgttgctcggaagtcagctcaaagagatgcttccctgttccccagagagacccgccgatcatgcaaccgcagaacatgatgtaaagtagctgcagatttagcgccgaccctaaacaaagacaggaaaggagaggtttaccattgcagctaacataactatatcatctccgccaaaggccttgacaatgcgcagacgcacatagcaacgcaaaataacggcaacactggacagcgagaggaacgccgctgccacaccacggacagctgctggccgatctaccatgacggcagacaaggtgcagctgcagatctggaagaagctagcagctagcgaagaacaacgcaggtgccgacgcactataaagcatcacgacaaatgacacaggtttgatgcggaatcacaccttcgagctacgagctctcgacattctttggaacagcacttgtgtgtcaggattcccgcatttcgccactgaaaccccaccccagcttcgacatattctcggcaatcgacgttctcggaatgtcgctccaaagattctttctcgggaatcattgcaccgggcactggtggggaacgatggcactgcaagctcgagacccagttacatcaaatcccggtgggttcttgaagtcccacgtcagtttgccgtgattcggtcaagcaggcaggctgctgggtcgagtgtctgcgcaaattgtggattggataagttgctggcttgcagctgtagacttgtcgacgatgcgtgaatggaatatgctagcacctaaagagaaggtctgaaaggcggcggttgattgttgacgaggctgatgttgtgggaaagttcaagtcgcaagtcgctaaatgggcagcccaaaaagcctccccttccgacccaacgagacccaagtcagaaagaattactaaaaggaatctacggcgtatcaaatcgtcactaatcgcacttctcgttcatttacgaattgacttcgtatgtaaaaacaccaaaagctagcgcaatgaactatagattgcagcaactcccaatcacataccgggttccgaacaatgccagcagatcgttctgcaactctagccagctcatttcaagaacttgctagcaaggctcatgagcccgccgggaccaccagtgccctcacttccactcatctgacttttcaagtacatcttgaacgccatttccgccgcctggttaatagcggactgcttgtctccgctctgcacgcacaatcgttagctgacaatgacattcatcgcaaacccacatgaagatgcaacagtaaacagaaaggacgcaaacttacagcctccccttttccagccttctcttcccacatcttcgcggcttgcgccatggccatcccaatgaacgcattcttatcctttccaccacctgtctcctggcctgagcttgaattgaacatcttcagcgcctgcaacgccgcgccagcaccaaagtcctttgagtccatgtttccgccttgctcgtagcgtcgatgggcgttcacagcctgctcctcgtcgatgtcatcttggacaccttcagacttacgctggttgataaaggaaagagcttgtgagaagagattggagtcttcggaggaagcgttggcggaggcatgggagagagctggcttcaggtcgtctttgtcgtcgtccttgtcgaagtgggacttgacggcgtcgacgaggatgttttgcaaggacatcttggtctcgtgaatatgagtgggagtaaactggaatggactgatggattgaataacggtaaaagggggacgtacagctttggtagggga

SEQ ID NO: 1748 - DNA, 1749 bp, Emericella nidulans
atagttttcaccgggaccggatactatgatagcaaagtaaattcagaccacaaaagaatcagacatatatatgcatacctgtaaatactatatattctggtcataattaggctgccttgtctgtaaccttactattatcctaatttggcacgtcatccaagcttgcaatatcctgcaagacctcggggtaaacaatattattagtggtccgaatacctggcggcagcaagacactaagtcgccgcatatctgtaacccgcgacattgctatatataactgaccatgggagaaagcagggacccgcaaatccacacctacctgctgcaaagactgaccctgagacttatttgtggtgattgcaaagcatggatggaccggaaactgtgtttgtgacagcatataatgcagatcgccaggctttgaatacagggtaatccgggggatgcactgagcctctgaagtcacctgtcaagatgcacgcgcggattgtatagcggcataactccataatctgcatccgcgtactattgcaaagaccctctgtagcccgtaaattccgcagcaacatgatcagcataccaaccttcaatcataatcttgctgggggaagacctggcagatccacagattgcaggaattcacatgtgatttcctccaccccttcagcaacattgtccgtcaaggcctcgtcagcggaataccgcatagactcctgactgcgcatggagtccataatacagtcattgaactcaaccaaggcagagtttcgcattgagagtattgcacggcccgcaaaaaagtccgggtcagacgcctgaaagtcggcagtgtggcaatgggtcatatctgctgccggaaagacccgctcgcagagttcctcaacggacatagacgcgctatccattacatagtccggcagctccaaggtaccatgcattgtattatcaacagacatgcgagcgagtaactgggagaataggcgattaatgccaactgacgggagacgcatattctgggtgagccgtaaaatagcccgtaaccttggccagatgggttagcggacagaaacacatgcatagaggataacaaacccggcaggtatggcagcgtgtcgcctgagatctccgtgtggcagaaaattcatcttcaggcttcgagcgcaagcagcgcgagcagtatctatagccctctacagcgcgccgtgatctctgcggcctggaacggactgcaaccaatccgggcgaggggctagatggcggcggcggaggcggaggacgtgaatggagaactgagggaggcggatccaagaaattgtcctcaaacacagtaaccaccgggctggcaggagtctcattggcccgtatattgagattggtcgcgctcaacggctgtaaaggaacactaacacgcggaccacgccgaagctggctctggcgtcaacaggtgaagcaagacttccatggaggagagccacgcccgggaggatcaagcggcctgaaaaattcgaaatccggccagtcacgccaacagatattacatcagtggtgaccggaaacaggcgccgaacgttttctaggcatatgcaatagtaggagagtgcaatatgaactatacagatatgtggaattgggaagaacacggcagcgaggtgtttattgacagaaggcggcccgtagcgatccgtaacggacgcgaagaagaataagtgacgggtgggtgtagaatacatcatgggagtatattgcatt

SEQ ID NO: 1749 - DNA, 2301 bp, Emericella nidulans
acaactcttatctgggccaggttgatcccctgggtttctaatcaatatgtagactacctaatgtatttcatgatacctctcagtatttacttcaatgcagtatgcagtatatatatatatatattgaaatactcgtaagcggttcgtaaactgcctctacgtgcataatacggctagttttatactcacggattacaaatccggtgcctgagaaatcactgtaaacccacgttgcgcactcacttcttgttgattcagctcacatctcaagccatcttctagccttaccctcacagagtcacatctgcagacattacttttcagaatctcgtattcgagaagctcgcgtacggaaagatggtccaatctgagtgttctgagaggtcctgcccgttgtgttcgatacgctggttggacttcattttgcctttgcacttcgggtaccgtagggggaaggcaagataagggttacggcagaaatgaagttgaattaagccattgttctccttttctaatactaggatcagatattgagctttttctccaatcaaatgagaaatgattaggaagtcgaatgagattagaagggagttgtataagatatactgagaaaatatgtctcctgcataatacccacggtacagaacagctcccaccaaaaaaaattcccctttgacttctctcattgtcttaattttcacgaatcaattaactttaaaaacaataatagaattacgacttagctggggggtgctatcatcgaacacgtgaccgttcaagaaccaattctaattcgacttgcgtcttatgatgttctcttttaaacctccctcgacgcttcaaaatggagaataacgctcgtgtctcgagatctcgagcaagtaggcctaaagttcggacgggatgcatcacctgcaagtgagtcaacgccgggccttaagtcaaattacggcgacactgacttgtacgaggatacggagagtcaaatgtgatgaaggcaaaccatcttgccaacggtaagatgcttagtacccacgcgcaaattagggtccgctgatagcctcagctgtctaggcacggggcgaaagtgtgacggctatgctcgacgtccgtctacaataagtgaaggactgccgcaggaactggctgtgtccacaacagcaatctcggctagcgagacgcaagcactcgagttcttcttctgcataacctcatcttgcctcgctggcttcctagacggcgcattttggaggcggagtgttcttcagcttagcctttcggagccctcaatacgcctggcaatagctgctttgggttctttgcatgaatctgaagtatctactcatacgggaaatgcgcctgcgtaccaagtcgctatccagctgtatacccgagcgatccgctccacgattgataaggcgtcgaccggcagccttgctacttctgttactgtgatggctagcattctattcacgtgctttgaattccttcgtcgagaccctgctgccgctgcaacccacattctaagcgggataaacatcgtgcgagactggcgcaatacaagtcgagcccgacaccaaggtccttggggtcggaactatcaatcctatgaagcgtatttcattgagacggagctcgccccaattttgaccctgtttaatttgaatgctctggaatttaacgaatttccccggagcaggattattcttaacgcagtcgataatcgcggtccgcgcctggcaggccgatttgagacactgcaggaagcgagagttgcgtttgtggacctggtcactgcatccacagatcttttccaacggttggatcatgatgttgagtccggagcagttccctctccagatgctttggctgcgtcagaggggctttgtgaaggcttcagccgctggaaaactagtttcgatgatctactcgcgcgccgcgagtgtacttggaacaaagaagagagcgacgcagcagctgtcattcgtatttcacgtcttggggcagaattcgggcttgctacttacggtatcacgagggaatgtgattgggatcaccgtttagaagactacaaagaaatctgccatattgctgaatcactactatccgatcccactcactatcctaatgagctttccaagtccctcagtctagagctgggcctaatttaccctttgcatgctgtcgcctggaaatgccgccatccgcgcgtgcgtcggaaaggactagagctactccttaaagctccgaggcgagagtggcttctggatactcgacaataccatgccatctttttgcaca

SEQ ID NO: 1750 - DNA, 3747 bp, Emericella nidulans
atcagatcaccatccctccagccaggatatccgaacagcctagttctcttccagaggcgtcgacctctccccaaacccactgccaacccatagccgaccactcagccctttctccggaagtagggggccaaacgctgcaggtctggctaggaagaatgtcgagttttcatcggtcaggctgatgatggcagttggaggaaagagtgacgaaggtagattaaaagagaaaagcgaatgtaatcctgtcgcttgtccggcaagcgagttaggcgttgaaacacggggagaagaggtgaggacggagtagaaggtgagaaagatagggaagaagatgagacaaaacgcgaggaagactagacgtggaggtcgcatgatttcgatttgatgctgtgggagagaaatagtatttttatggaccaggagacggcttgagatcaagctcgttgcgacactgtcagtcaagaacagtccgagggtcgtgtgtccgtcataggagcggactcattgaggggaggtaaggcagcaacgggagaggccaaggtcggacagaagcggaagaatcaagtaaaggttcgagtcaaaatggcagaaaagcatccaagaggggacgagagactgaaaggtacaaagaaagcatgaacgaggatcaacgaagatcgattagacttgggatgtggttggaacttggatgccttcacctagctgcagtgcaatcaacgggagccgaggagtcacgagattaatgcctcaggcattagaatcacaccaccgggcaacaagcttcagcggacccgtgcttccagtcaacttggtctcagaggataagcgacgtacttcaacgatctttacgactttatggccctatatcaacctgtttcaacacccctgatcttcctcatccctggatggagaagatcagtgacgtgacatctttcgcttccaggcagtgcgggcgggatcgagcgctgatcatagcgccgtcacctccgctccacgaccagcttgcacctgagacgcgatcgacatcgacactcggtgcctgatgttgtgtcgtaggggattgtccttgcagatcaagcctgcacgaaccgcggcttgcgaaagcataaggaacctccccgctggtatcgaccacaaatcccctaggacagccgctggtcaacaatccgaccacacccacttgtggaaattgtttttcactcaccaggaagttgaaatgatatgttcgagctgtgggtccattgaactgtccagaaatctaccgggatgaaactccagaatctcttgaaagtcgaaccatggtcgtgacgtcgaataacactctttgcggaccatggcggaaagcataacaacagatacctcgaacgactccgtatatgtacagagaacgcttcaacagccgaattcttcgcggctaggtccgatttatctctgctcagttcataatatattgtgatcgtggatgcaggcaaatccatagcagtggtacaagaaaccctatagccatcaccgtctgttgttgcaccatgtcaaaattgttgcagaagatgaaggacgtcatggcgagctgtaagctgagctcaggcggcgccagtaagtgtatctacgaatattgatctctgaagcatgagaattaattatcagttcgcggcccgaactctaagaactatacagacgagcatgatacttatattaccgacgactttggcgataaagcctactatgttccccctcgcattgatgattatggactgagatttgggagctatgagagcaatccccggcctggtacctacggttccggcagttatggccctagtaaccacgcgaagggctacggattctcaagtgctggagcacactgttattacgcggaaactccggcaggactagggttcagtgacgatgctgtcagtagccataatagaggatcaggatatcggaacggctggtcctacggacatgattataggggccaaaggggctccatgcctatagatcgtgagcagcggagcagttggtgagatgatgtattgtgtttgtctctattgtgattatgagcatttgaaatgcaggagcaaggtaacctgcacaataggaaagagttaaccaacaaagaactgttttcccgtaattcccaataggcaggaactcacctccatccagccgatgcgagcatacctgctagagacacgagtgttgataatctcgtttgtagatgaacgaaatcgaaagagggcaacctgaggtagaagttcctcgcctgggtgaaatcaacctttctcttggtcaacacaacctgttcctgggcccctcgctctcctgctctccttcctcaatacaattccctacacagttcttcactcatccactctttccggacaattccagctaagtcatatttctgcaaacctatcgcggtcgttcgatgcccgtttcgacgtgactatttgccgaagctccttaatggcggccgcagagatacattattcgctctgagagctatgcccagacagtcccaaccttcgcccgaaggaccgttgactacgaactttctgatgaccaggagctggcatccttgcagcctggtttccttatccaattgtgcagaaagagctcttcgagaaaccgagcaacgaggaaggcaaaggctcttcattcggcaagcgctgacgacctgacaggcgtctctcggggcgtttcagcccatgatgatgttgataaacacgagcatttccctcgactctctcttccaggctactcaagcaccacagaatacggttcggacgaggaatctgagaaattgacactgccctcttcaaggctcgtttcacaaggatatccatggcagcgtgatgaaagtcactctgaggccactcaagagcagacatggcatccgagtccaaaagattaccactctcaaaaaaaccctctaaactatgctacccacaacaaccgttttcacccgggggagaccagctatttgtccgagagtcctttcctaaggaaatcagaatgggacagctcagagcatgggtctgggcctgccgacgcgatatcagccgccagaccgtccccgttagaaacgccacagccctacctttattcgcagaaagttccgcagagggagcatttgccagcctccttgcagatatatcgagagagttttgatcgtccacacgataggtcaccttacgaatcctaccgtttgaaccgccgcggcaatcggaccgatctaccagaggttaccactagcttccagtacggaaatcctcatgatttggcgtatgaaaagaccataggtaacataaccattcgctcggcaccgaacttcgcaacccatggtcgttcacgtttgtctaattcagaggcggctactcactcgatcgcgacgcggaaagtccacaaatcacaggaagcacctgtctttgggtcaagactatcaagtggtaccagcacctcccagcggaccctaaaagaggagatttacgccatcttggacaatatgaatgttaactcccaaacagatcctggcccagcgtcaactcagattcgtgaaagtacagagtctccacctgctcgtgtgcttggagtgcccaactgcttaaagctgagtctccagaattgcgatcgtatttgacaagcaacgatacaagagccgagccaagagacacaattattagggctcttgatttgaggaaagagcacatagatgtcaaaagacatcattacagcggacactttgca

SEQ ID NO: 1751 - DNA, 2915 bp, Emericella nidulans
ttaataatattacctaatcaggcttctacctcggacagccctatcacctagctaaattcgtatttcgtctagaacttcctggatcaaggactttagttttgaacttccggcatggaattgattaatagtgtttcatgctcttttcctatacctctaccgaaacagataacaaataacagagtataacccgctcagaaactgctaggctgacctcgacaacctagccaagatccatgcagtataacagcaagagcaacatatataaggggcaatggtggtatcatataatgggaataatagtctcgatgacgctcgaccgagtaggggtccaagattaatgctttgcacacacacacccccaccgaccgcttctagaaatgcagcagaacccgtttaatatcaacacgctctgagcatgaagaaaaagggaatcaagagcttccgtccatatatagacgatcaaaatcatcgtctgcgacctcggaaattgttgcatctggcgaactgacacgggcggtggaggggccttttaatacgttctcggattcggctgcgtatatcgggttttcctctgtggccatcctcgtgagggatccagccagtgggttgaatgaatagcccgttgggctctcatggcagttaaaagggctgtatccgacataatgtgcgtctccgaaaagatactggggtgatattcctctatcggtccgcttcatcgcaggtgagtgccaaccaacaagggggtccattcgactataggcgttcagcatttgttccaggttctctttgtccacactgcgaggacctttttcgattatgttcaaagaatgagcagcggtatgaggagactgaagatcgtcatttattgcaatatctcttctcaagaagagtggttgcgaggcagctgtctccctttgaggaaacctatgctgatcctctgccctagactctcgtgaaactgacatgtctcggaatacaacaggtttgttgtgctgcttcaagtcatggtcacgaagtgccaacgcaaattcctccatgttgtccccgacagagatctggcacctaaacgaccaaacgcttggacagctcgttgaggagtatataaacgttgatctatatcggcctcatgggggtcgcagtcttgcttgacgttcttcctagctcttttcccgtccggcccgcgttgagtgtttgggtccatctgagcaaaaactcgcttggggcgggtggctcgcttctttggaatcggcgtctcacctttcagaggactgctatcttcaacgttgcccgagatcacgcgctgcttccgcaggatgccggtaggagaaaataccagttcagtaggctccaccccatcgacgttctctccatcatctttaggacgctctcgcgcttactcaggtggatctttcgtttcatttgctccgtggcagagtcaaagatatccattccgggccacaacacgcccttgagccttgagatctcatctgctctctacacgagcatatcgttagcattcgagtacacgaagctatctttatcgtcgaccaacggatcgtagataaagggcccattcgaagatggggcttcctggtcatcccttgaccggagaacattgggccaacatggtgtagcttgcgttagagatgtccgttcgtctcccgaatcttcctcgttatcacgcttccaccgctcgggtgcaatacccatggcctgcttgtgccttgatggcgtggatgcctgttggtgcactgttcaaaagcaagtcagcaagtgggatagaggtgaaatggcagttccctacctgcactgcttcctgagttcatgaaagggtccgagagccgtggatcaatgtagtcaggaaggctggtaagacaggccggcagcggcgagacctgatacccattgtccctgtcggttggtccggctgtatctggcgcggcatacttcccctgtgactttcttctgcgtgagtccttggacgacatacgatccgataggagtttcgcaaggttgttggacttgtaccactggttgtagtcgtcgagcaaagcctcggcttgtggctcctggtggctgcgtacttgaagcttaaagtagtgggaaaggtgagccttagaagcgacgtgagttagcagatgcgatacatcgctgaacttggggtgtttcgggcagatgttgcacagcaatgctgttgcatccattgttggcaggatcgcctcgaggctctatgttaaaccacgctggcaagtagtttggcagcagctggggaaacaacagcttgcaggtcgtggctttcacgagaggatggtgaggcacgagacgaaaaaccaatacagaaagactaaacctggagatagaaacaccgacttccccgggaagtggaaagtgatgaaattgagcaggccatcaactggccggggacttgcttgatgccattgccaccatgacaggcaggaaagaaaacaacgtcggagaagaggctctgtgacgctttgagcaggcgcaaccgtccgcccagggtaaggcaagtgcttgtaccggcctcggccgcaacgaccgcttctttccatgacacggtaacagagtgctagggattaccaaatcataagtcacaaaggtgatttccgcttccgctcatggtgactgcacagtcagagcatgtcaatgttttcttcgatatctactcggcattgcagttgtgttgtcttgactatctcaagcctagtgacaggctgtactcgatttgcgtcacgagtcaatggctaccataacagtttaaaaggaagcaagatagcatgagtttataaattccgatagaggtgacagacaagcggtcgaaatagccagggtggtaggcctcctctagagacacctaggaccggcgtgaggcgaaaggccttgtctatagtttt

SEQ ID NO: 1752 - DNA, 5235 bp, Emericella nidulans
gaacgtgagtacccgtactctatacgggggtggtttattgacgttggggggatccttcagaagcccatcttgatcggttcgcctcggcgagcatacctgtacagcgacttcatgttcacgtaaagcgtctcgtcgctgccggtcacaaggtcggcgtcgttaggcaattggaaactgctgcgctgaaagcagctggagataaccgcaacgcaccgtttgttcgtaaattgacgaatgtttacacgaaaagcacctatattgatgatatcgagagccttgaagggtctacggctggggcatctggtgcatcggccacgggatatattctttgcataacggagacgaacgctcggggctgggggaatgacgaaaaagtacatgtgggtattgttgccgtgcagccgactaccggggatatcgtttacgatgagttcgatgatggcttcatgcggagcgagatagaaacaagattgctccatatcgcgccctgcgaaatgctaatagtcggtgagctatcgaaagcgacggagaagcttgtgcagcatctttccgggagcaagatgaatgtattcggtgacaaggtgcgggtggagagagcacccaaagcgaagactgcagctgccgaatcgcacagccatgtttcgagtttctacgctgaaaaaatgaaatctgcagacgctgcggatgatgaggttgcgagtaacctgctccagaaggtgcttggcttgccggaccaggtcacgatatgcctctctgccatgatcaaacatatgactgagtatggcctggaacacgttttacagctgacaaaatatttccagcatttttcttcacgctctcatatgcttctcaatggaaacaccctgacaagccttgagatataccaaaaccagactgattattcgtccaaaggcagtttgttttggactctagatcggacacagacccgatttgggcaaagaatgcttcgaaaatgggttggacgaccgttgttggataggcgtcaacttgaggatcgagtcaatgctgtagaagagcttaaggacttccgaaatgtcgtaatggtcgaacgaatcaaaggtttgcttggtaaaatcaagcacgatctagagaaaggcctgatccggatatactatggaaaggtgagtaacactgaccctcgtctgacgtggctaacagtgaaagtgctcccggccggaacttttgaccatcttgcaaacaatgcagatgatagcacaggaatttgccgatatcgagtcaccagcagataccgggttttcctcacctgccatcagccaagcaatcatgtctctgcctacaattttgaaagatgtcgtgtttttcctgaacaaaataaacatgcacgcggctcgaaatgatgacaagtacgaattcttccgcgaagaagaagagacggaggaaattagcgagcacaaactcggaattggggccgttgagcatgaacttgaggagcatcgtcctgtagccggagaagctttagggaagaaaatggtcacctatgtctcgttgcaggcatcgactatttggtggaagtcgagaacaattcgccggccatcaagcgagtgccggcatcatggatgaaaataagcggcacaaaaaaggtgtcaagatttcaccctcccggagttgtcaagatgattcggcagagagaccaaccacaaaagcgctcgccgcagcctgcgataaggcgtttttggccctccaggccgagatagcgaccaattaccaggcgctacgtgactgcgttcaatccctggcaacgctagactgtctggtgtcattggccaccttagccagccagccggggtacgtgaaacctgaatatacggaagagacgtgcatccatgtcgagcaagggcgtcacccgatggtggagcaactccttctagacagctatgtgcccaatgacatcaacctggatagcagcaagacgcgcgctcttcttgtgactggccctaatatgggtgggaagtccagctacgtgcgccaggtggcacttattgcaataatggggcagattggctcatatgtcccagcacaggccgcaaagcttggtatgctggacgcggtgttcacccggatgggcgcattcgacaatatgctcgcaggcgagtctaccttcatggttgagctttccgagacggcagatatactgaagcaagcaacgccccgctctttagtaatactagacgagctgggccgaggcacgtctacccatgatggagtcgccattgcacaggccgttctcgactacatggtgcggtctatccgcagtctcaccctcttcatcacacattaccagcatctttctgccatggtgcattcgtttcctgatggcgagctgcgaaatgtgcacatgcgattcagcgagtcggggactggcgcggacgaagacattacctttctttatgagattggagaaggtgtcgcgcatcgtagctatgggcttaatgttgcgcggctggcaaacttgcctgcgccacttttggagatggccaagcagaagagtgccgagctggaggagaaaattcgtcgccgaagacttgctggttttgttgctgcggttggagcggtagtgcagtcgaatcaggccgatgagagtgtaatcgagcggctggttagcagtatggaggagctgtaactatatcaagagtacatatttagcgaacaacccatctggcttggattggcgtgggcatcttatgttgatgactccggggtaagtccatggtacttgccctaaaagcaggcacgtatagaacttggaatcaggtcctttagatgtgtggtgtgttcgcctttttcgctactggccattagattggtaatctgcagtcgaactatgactgtgggatcaagcaaggttaggcgtcctgtccggggcgggcaggcttcatcggttgagtcgaggcaaagaaaggcgagcttctatatggcacatctaccaaataagcatagacacatgccccaggcggcaggacatgctggaggccttcctagacattagcttgcaacctcagcacggcaactcccaccgcgcaattacacgtctcgctcacagacagatcgttaagcatgttttactagcaaactcgagtacccggcaatgtcctgaagtgaactagctgctcgatcaaagaaaccgcaacagaaggcatttcctccaggctgaacgcggcacgggccctggtagcattctgccccttgggggattgatgatgtcgaatcaatgatatcgagatacttgagcgcaatccaacagctgcagtggacggggagggccaaatcgcgaatctcaaaatcttgggagcgatacctccctctaaagcagcaggttttataatccgccccttatagagttgtgcaccagggaaacgttgcatccattatctgtgcagcttttttcttaccttccaagcactgtagctgagcgcaggttcaatagctaacccatttacggaaagagttacaacctacactttactactttttaggatacccggctagccgcaactagatgttttgacatatatatagctgccaaatggctcactaaccaccaaacacgcagcaagtatccttaactttatagtcaccggttggatgtatgagtcagaatctttgtccaggttctgaggaagtacagtcatgatgctttcttatcaccattctcggctaagagttacttacgaatggagaataactatacatggtacactgctgcctcatgaaatcaatgattagtattacaacaacagcgaatgtttccgtggcgcaattggttagcgcgttcgactgttactatcattcggtcatcgagaggttgtgagttcgatcctcaccgggaacgtttctattttgaacttttttttgacacttataaataagtgctaagaagtatcctagggctggtcgtcgagctatacagtcgtcatggctcagcccttgcgagttgcaatccccggtacctgactgcagtccccgacttcagggccttatattttctgcagcctttggctgcgcgccaaaaacggaataaatggagtcggctacctgcaggtgggtacaagatgcctaaggtatcaacttatggccccgctgctaactttgagtgattcattcagtcttctcggtgtctattgctgtctcctactatcctcttcctcaaagaatttaacacgcgcattatcttttttagagttgggattatactatagaccaatcgtttaattgagcgcaactcagccccctctgttctccgtttgccgctgtatcctcaatccaaaatctccgataccccgcggtcaactgaatcacgaaacaggatggatcttgttaacaggtgagtcaattgctttatctacggctcctgcgtgtgccctgtactaataaccatcagcctggaaggaagactcctcttcgcagtccctaagagcaagtcccccaagccaattcgtccaactcgcgcttgactcgttcgtttgggacgcaaacctccaggagaaattgaacgactaacaaactcgcgaggggtacagaaggacgtcttcaacaatcgaccctcgacctcctttccggctgcgacatccaattccgccgtgaaaaccgcctcgacatcgccttggtcaagaacctgcctatcgccctcatcttcctccccgccgctgacatcccgacgtttgttggagagggccgcgtcgatctcggtatcaccggccgcgatcaggtcgccgagcacgatgcccagctcggcctcccagagggcgaagtttctggtgtgcaagaaatccttgatctagggtttggcgggtgcaaactgcaggtccaggttccggagaagggagacgtccagaaagtcgagcagctgattgggaaaaacgttgtgacaagcttcactgcgctgagcgagcaattcttttcccgcttggagaaggagcatggccctgcggagaagaagacgaacatcaagtatgtggggggcagtgtggaagctgcttgtgcgctcggcgttgccgatgggattgtcgaccttgttggtatgtttctccctccagttacttgttaataactatgaagctaaggaaggcagaatccggcgagacaatgcgctgccgctgggctaaaggctatcgacaccgtcgtcgagagcaccgctgtgctcgtcaagaaccgtaacacccagaacccgcttgttgacttgatcacttctcgtat

SEQ ID NO: 1753 - DNA, 3779 bp, Emericella nidulans
atatacattaataaaacgttaaagggccttaaaatatataagcgggcgtgtacccagttaaaaaaaacagagacggaaattaaataacaaaattcccaacacctacccacgaaagggaattctatacaaaagccggaaaactcttaagaagtgcccaagcctaaaaaattgttactcaattgattggcatgtctcaaataagatagagaaaaagccccccaaaaacctgtagaacttcttccaaaaagagggttataaaaaaattcaggtatccaccctttcgttcataccagcaaatcctgaaaaaatagggaatactttttttttatttcaggatccagcttcaaacagtttcccttccgaaaaaggtgtcaagctttctccctaaagctatgaaattcaattggacaaaatgaacatagaaatcgtaaaggtctggaatcccgcaaaatcactttggggcagttgggctgcctgacatcatttgaaaaatgtagcaaaaaaccacgttgaaaagtagtatggaataataaagcagttaatctgaatgggtcgagaagccagaagatcaccctcttgattgcccactgcacccattctggaataaggggcaaaggtaaacactctcactcgcacaaaggcaggctgatggaagtaaaatgtcatttgaagaaaccatcggctgacagatcttaccagtctccaaggaagatcatgattagcatacaaggtagctagctcttgtgcagtcgccccgcaaatatagccgacaatccttccccagttggacatctacatcccgtatagagagcgacactgaaggtgacgtggatcaaactggcctgtcactactggcctgttaccacacggaccagtaccaacgctggttcttcgtccgcctttttctggcgtgacggcctcgcgaagagtcatgctgcgcgcattggcaatctcgatcagggccccgaccttgcagcgttgtgtggataaagtatccctatagaacactcgattcgctggcgttgacgcgcaaaaggccgttgctattgacagttcgacctctcacgccagaaccaacctaatcctcatggtagcgcacttcggcaccccatcgcctcccttgatatgtcggttcaagctagattgggcagcgaaacccagagtaggcatccagttcgatgagtgaagtgacaaacgctatcactggctcgggacaggggtgttgttgatcgacctcgcctcatcgcgcagattcgagaccatgagttctcatttttgtgccatccagtgtacactatgtactgacatcgcgaatataagatcgttcacccaggggaaccatgtatcgcggcagtcataaatctactgtagaaaaggtgaagccaccgacaccactcgttgtcttgcaggcgcctatcggtgggtaagacagctgtcactggcggggggcgcacatacgacaatcatatcacactcggaatatcaccctctgcaatgacgagctcgtgctccatctggtttgccccaaggttaagtcagagttggcccaatgacgcgagctttctagactttttgctttttcttcccttttcatcggcccttttgggctgtgacttccaaccccagctattaatgattcgccatatcaaaccctgcatctatcttagttcagagatggttcaagccggaaatgatccttcaaacattctcagaaattccttcgttgtctccagacctagtcctagttcaccaaggttagctgtgggttatccaaccttagtgggagttttttagggagccacagttttcatgacaaaaggggacaatcatatggctcgccgtgagggaaaagaaggctggtcgtacccgaatcgaaatatgtacccatgcagagagtcgactagaactacggccattcaggggatctgtaagtacagcggacgaggctatcgacctcaagctcgattatcagactcgatggttgaatcattattgcggcagttgcaggaaagatagccctaccagaggtcttgagagctacgctggggttgtacagcatggcacagacttgctcggctggatttttcagacaagatgcccacggaagcgtgatgtggacggggtcgcagaggacaggaatcgagcgagagtgcaaaggttcctgctaccgctagtatcccagccacaaccgctgattcccgatttgtctctcgggccctttaatttcgctcatgtttctttattgagctggatcgacctgatttccaatctcggctgcaagataagccggccgggggtcaactgtctgacgcctgcagccgtgcagggaggcccgttcgtcatttcgcctgcagcgagtagtagattctggtattccgcagcatttgaataccgcgaccgtgccttcgatatcttttgcatgtaagtaagccactgtgacgatctttgaataggatgaatgatgtgtgaacgtcaatcatgcagacgcttgaattgggccacagtgctcgggcccgttgcaggtgcttcttgttttgagccgctttagccaacttctgttgggggttgacatagtcggtcgggagtttaccatgcgaccggccatagaagacttgaacactgatacagggctacaatagcaccaaggacgaaaggatgaaggggaaggaggagaggtcggtctggctgcggggaaacgtgactacgcagtggtccggacctgggacggcctcttctgtgttacgggagactcgacaagactgacctcgtccacttccgtcggtcccgtcagatccaggggcgtctgctgtatctagacactgccgcagtgagctctggtctcatgatgttttgcagctggagagctttccaaatccttctatctcacttttcatcctggtaacccccgcatggcacctcgtttaccagcagtcttccgttgtgccgatgaagacaaggagaatccgcttacttctagtccgacaggaatggctacctagggtcggttataaatcagatatgttgagaatagtgaggcaggttaggcaactgagtcagacgtctgcttgatctcgaggcatgagcaaatggatccaaacgactaacaatttgccagatctaaaatcctaaaatcctaccctatccgagtcgttgaacggcttcgtgcgtgaagcaggcagagctatggacatttcacacagggcttaaacctgccctatccacgattgagaaagccgccaaggctgcattgcgtcagaaatagcagcgtcgcgtcgcagatgctgtaaagagagactcgagatcgcatttgggtgataactggtcaggccgattcccagttgttgttcagatccatccatgcgcttccttgctcgtaggcctaggttggttaataaacggtgtgattgccgtaaaagttgacggcaagggagcatggggttcccgaatcgctggtttaactatctgattcagagagcaatattgactcctttttattaatgctggttttcgcaacgagccgaggacccgcatcacccgcacaaaaccctccaaatgaaacgctgcggtggctgatgccagaaaggataagaactgcaggaggtagcggattctagcaccacttgattgagtagaaaaaagtaagtagagtacaatacatgggttactcagtgggcctggctattcttgccggccatcgagaaaactgcatagattgtttgctagctgtaacagtaaatttcacggttcagggatgagaacactagcctcgctcgacgcga

SEQ ID NO: 1754 - DNA, 1941 bp, Emericella nidulans
acaatgccacccgcggtctttctgggtttgctggaggccaaaccataaccaatttattgcctgcagatttgggacaagatccacaagtaatgtcatttgtgcagacccgaggcagtgttcccgtattttgggcagaggtcaacaacctaaaatacacccccaaactccaagtgcgcggagtggaaaccgccgtccaagccgcacgcaagcacttcgccgagcagattagattgtatggtgataattaccttgttaacctcgtgaatcagaagggaagagaggaacgtgtcaagaatgcctacgagcagctgattcgtatcctggtgtcttcaccaaacgaattgaccgaggcggatgatgaatcctcggagaagctacatgtcctggagccggaccatccacaaaaggagatggatcgtctccattacgtctactttgacttccataatgagacgaagggtctcaggtggcatcgtgcggagctgctaatggatcgccttatcaacggcctaaaccagggcggttatttccgcggcctagaaaacccgggtgctgctggtgggcagctcgaagcaagagccctccaaagcagcgtcgtgcggacgaactgcatggactgtttggatcgcacgaacgtcgtccagagtatgctcggtcgctgggctctaacgagacagctcacggaagcgggagtccttcgtcccggagaagcggcaaacgatgatcaagagttcgaggacttattccgtaacatttgggcggataatgccgatgtagtctccaaggcatattcaggcacaggcgccttgaagactgacttcactcgtactggccaacggacgagagccggcatggttcaggatctgagcaactcaatcactcgttatgtgcggaacaacttcctagatggcccacgtcaggatgggtttgatgttttcttgggggcttatcttcccccggaatcaactctgggaaatctccggatctttgtcgatcgtcggccgctcatcatccaatctattccatacattttcgccgcgggcctctttatgatcattattgccctattcacacgacgactccccgatgcagccgtctggcccttgcgcttattcgtcgttttctggctgctaatttctggctggtgtgctcgtttcatgcttgcacacgggatgctctatgtgagtcggtgaactagatatatactcttaagactgctaacaagatgcttcccaggtaaactggccgaagctcaacacgcccgccgcgggctcagaaggctatcaagatgcgcttatcaaggctcgctctgatccagtcatcgggcaactccttccatccagaagacaccagagaggatatagcaatgctcgccttggtttcctggaagaaggaaagaccaggatcgagtagtcgtatttcctgcactcatacctgcattcttccctttgccccttctttctttcatctagtcccgtgctttggactcgtcatgctgggcatattttgcatccattccctttctcttggcttctattattattcttcggtgttttcccccctctttattaattcgtcttttagtttaccggtttccggagttatattatacgcgtagaagtgtacaacaccattcttttttacatggcagcacttttaatggaaggctacgaatcgtataactgccaacatgcacgtacactacattaaattaatactgcgaagtgggtgtaactctcagtactcttaagtcacgtgatatcatactccgggactcttgttctgcttagagttgatcgagtcaatgcagcccctccttaaagtccggggtatttgtcacgtaagcgagagcaccacctgtacactgatgaggggatttagcatcctttgttgcttcccaaagacccaagtgcgatcgttgtcgttgcattctgtcgtaat

SEQ ID NO: 1755 - DNA, 3500 bp, Emericella nidulans
aaatgtataactatgggttctgacagacgcccggcattgccttactcacaaacccagcatattccacttaacagatttccgaagaagagtgcctgatgttccctcagtgctggtgacggaaatagccacgagaaatgcggatagccaggatactcatcgcactttaccgggacttccaacgcgactagagcgtccctcatcaggcggacgtcgtccctcagggtgtcggcgtcgccaacggccatgtagactttattcagttttccaagacccggatgcagaagacatgaaagccggggatcatccggtggtgcgccatagcaatcgaagaacgaccgcatcgcggagccggtgttgattgtcaaccggtcattctcttcataggatgtatactctcctcggtctcgattgtctgcggacacggagtcaggatgaacggttaccggcgcgagagcaaccacgccttggactcggtctcctaggccgtcactaaccagggtaagtgccgtactgaacgccatgtttccaccggccgaggcaccgatgaaacagattgattgcacgggatacgtttccaggaccgatctcgcaacagttagacaatcgtcaagcgccatcgggaatcggaattcgggggctagacggtatcccacgctgaagattctcgtgcgggccagtttacagagagtgcggacgaagccgtcctcctcgtcaatgctgcccatgacccatccgccggcgtggaagtagagggccagcggtgggtcagctacatccggcggcgtgtagatgcgtgtggggacgccgccgaggatcttgtcctctgcctgaacgctcaggtctggaagaggaaagtcgtagcggctcatcagcttgccgactatcgtcttccatccctgcatgagcctctcgtacggcccgtcaagagccggcgaaaagccaagctcttctatgaactggtacagtcaattttacgcatcaggtgcttggaggactgttcgtacctgctgccatggctctgatagcttggaatccattgttgaagcgatctgttgtctgctacggactttcatcgcgaggttcgatttgtcttatgttgaatgtcggtcaccgagctacaatgttcttaattggatcttcatccgtctggtaaatgtccaccataacgtatggcgttattgtatctgatccgtctgcagcccacttagctacccccctgagtcctcagtatgccggtatatcacgtcggtatgcataccctaggcgacaatgaacactgagactgatctatccaccgacagccctattcaaactcaaaccagacgccgaccctaaccgtatctgtttatggcaggagctcgcgcacgcaatggtcggcaaggtacctggcctactggatctgcaagctgggcctcccctcgacttcacggctcgactggcgaaagggtttgatatgggtgtagtcgtgctgctagactatgtggagtctctcgctaccatgtttacgcatccgagccatgaccagtaagtgttcagaatgaatggccttccgtgtttatcatcgttgatgtacgacaaagttcactaattgtaccagaaggttgctagtacggaagtactgttggttcaatattgaattctagaaggctaggttacagcatatcctctagaactgttccactccgaactagtgcaggcataaccgtgggaatgtgtatataatcagacatcgaacccagcataccgccgcagttgcataataggcctcacctgattcccaccccatccgtcctcctaatcatctttcaggtcaaaagtaccctccgactgttctgccaaggcacgtcctgtagagccacttagtattatcccagccaagccaataagatagaagagaaaataggagtaaaatgtaccatgtatctctgggcttgcaacacaataagtcgcggcatcaacgcatgcgtcaatagacgtaaacgtgagtaccttggccatatcgactccacgcgctgccatcgcatgcttgattggggcaatgagcggagaatcgaagaaccacggcgcaagcagattgcagcgaacgcccaactgcttggtctgagaacgcgtgctgcgaaacagcccgcggacgccgaacttgctggccgggtacgtggacgccttggggctgtccatatatgctgcgatggaggcgcagaagagaaggcatttgttgctgggcaactcggggtcagttcccgtgcctggtatacgcaggtaatacagccccagccaggaagtgaagtaacttcccaccagattcacctcgatattgcggacactggagctcggccggggaggatcgacctctaggctgggaacacccgcggcaaggacgtgatctatctggtttccgggggcgatgacgttccggcaaagcaggcgactatatccagggcgccgctgggtgagaagcgaagggcgctcttaaaggcggccacttgactctcccagctcgtgacatcgcagtagacatagtgaaaacagtgcgcgagtccaggctggactgggctcgttggcggttggatgtcggcgatggtgatatagaccccggcctctgcccatttccgcgctgtggccagccctaggcctgaagcgccgccggtgatgaatgcggatttgccgttgaggctagtcaggtcgcaagtgagatcgaggggctccatattgagtccgggtgagtagctatgggttatcttttgcgcgcattgggttggtggtcattcatttatagccctcggggtatagagttcggagtctcagaatctgaacaaggtcgtagtgctcaggaagaaagatactaaaatcgccgtcttcgccttcgtgggtttctaaatagctccaaacagccaaaatccaacattattcggcatgattctgcctctgatattggtcttgtatctgctctctacggcggcttaccgtctatggctgcactccgctgcgcaactaccctggcccgtgctggtgggctgtttggcgagttccatatctgaagggcaccattcgagggacgattgtcagagatatccagcgattgcataaccagtatggtcccgttgtacgaatcgcgccagatgaactttcctacatcacgccagaggcagcaaaaccaatctacacgtccagtcccgaattccccaaagacccaatgcatctccctccgtttcataatggcgcccctggcattctcgctgccgactacgcccaccatcggcgatatcgacggcttcttgcctctgccttctctgaaaagggacttcgcgcacagcagggcatgattcagagccatattgatcgactaatgactcgtctccaggggaattgctcgtcgggctcgctggacatgaccgtctggttcaactgggcgaccttcgatatcatcggcgatctcgctttcggggagccgttcggctgtctcgagagaatggagactacccatggattgcccaattcag

SEQ ID NO: 1756 - DNA, 4151 bp, Emericella nidulans
tactcctgcacaactaaaatccgttaccaccctgcttgacgaactttctacgaaacttggcgcatgtccatctgactactatgtcatcgcctctcaacccggggtgcacagcaccgatttcgctactggcaaatccgccccccgcctcggggcgaggatgacaggcgaggacgaggcgattcgatccactatgattgtcaacgaagttgtaggcgtattggaaacgaaacaagtccgagatattctcgaaactcaatgtggcgcccaaacaacggtcatcgatacttcaggtttgtagccctaattgtctctcatgaagtcttcgttgacatctggatagccggatcatattcgaccgacttcggcaaagagcctcgcgtcgtcgttgtcacgtttccttcgccgcctctcggttccgagcgaacacagcagctttctgatcacggtatgtgcggcgagatagatgtggtgcaggatgctactgacagcctatacctagacgggctcctttttgatattgtcggccgacttccgtcgaagaaatacaccatcctctaccttacgacgcccagggagtttgaagaatctgaatcacctgtttacacgtcctcgaacgacccctaccaagaagcgatgcacatggacctgaagcgggactactctgctcactcccgcagtgacgatacgaagaacagctctcttttcgatgagtaccagtactttacgccaggttcgtgaatcacccctaatttgtttcaaatgcaataccgtcaacgtgcgctaatctctgataggtctttttatggcccttatcgccgctttcttcttcattgctattctttatgtcggcctcagtgccctgatgagcttgcaggtttcctacgcagcctttgagaaggacacctcttcgacggctcagaagaagcaacagtgattgcatttatatatggcagcgtgaggaccagcttttttgcgtatttgttcgttaacttcgaacgtatatcataaatctacttgcaatggtgccttgcttgtaatatgactaagatagcatgatctatacgagctgaaatgaccaacttagaccaacactttgataatctgcgaatagcaacgatcggtataattccacctccccaaccccatcgaatcacgtgatgatcccgtatccagggaggcacctgatgggtctgggagcttgttgctgatcttgcagccgcccttttatcctatggcgaccactgcttctgcgccttccatttgggtttcatccttttttgcttgactatcttatcccgtacagttggcatatcactgcactccggagtacattgttgtccttgatttcagctccctttgttgaccagccaatccattatttgggtggagatcgatcgatccacgaccttgcttaccgccccccatatttatcgatacgcctttgcggagccagcattcctctctttgtatcttgaaggctgtcaatacgaaatatcacctcttcccaccgactcgatacctggcgcgacgctgcgggactcatgtattgactgggatattgtggttggaagaacgaatcctctggggcacatcacctacactgatcgcccactgcccctatagcaattttatctacaatgctcctactctccatgggccggtcaacaaaccgacgatcatatgtcctacttttattattcctcgtcatcgccatagtcgcacaagtatcgcacgctcaagacgattcagaatcatccgacaacaatgacagtagcaacagcaccgatacgtcgaacagcaccacatcaagtacgacgacagacaactaccctgtcatgacggtgcccccaacagacgatgcgccgtacatgcagaagtctaccgccccagagggcaccgttttcatcgccgttggcgccgtcctaggcgcaatcggcctttctatccttgcatggcggggcatcgtggcatggtctgtaaaccgttccgtccgccgcgcagcaatcctgcactcctctgaaaacaagggcctgctcggtggcagaaagaagaagaagcgctctggccgatctcacacccacacccactctcgcagccacagcatgcaccagaacgctgttagtctcgaaaagatcagcggcagcggaaacaaccgccacagctcatatagggactcgcgtgccccctcgatcccaaccagagggagcggtctctttttctcacctacagccgggatgcagaacgctggcaatcggggctcaagttacctccccgctggctactattcggctggcacggccgccgccggttttgctcagaatgtcggcctctccgctgagagtctcccgcctcaggcccgaggttatacgcgtacgggctcgggccctacaccacctgctacgccgttatctcctccggctccaggtatgcacgatgccccacgatacagcaatagtaatcttcggcagtcgtatgccgcggacgggtcgacaagcagcgtgaacctcagctccccgcatgttggacgcacgccgagtgcatacctggaggatctcttcgaaagtcaccagaatccgccccattctcctaaccggcctcatcactaacccgccccgcctctcgcacgtggatcaaatctagcccatctgcttctattcgccttgccaataagctcatcatcaattgattggtttgaagggtattactcatgtttgcacagtggtgtcggatggatatcttgtcattcagaagtccctacaagtgccttcagctttcattctccgtttcatattggttatctatgtcacatattaggctttgtacagactttctgatccgaatttaattttaataaacataacctgatgattcctgtgcttcatgtaggacctcgtacaatggttcgacaacttgaattcctctttcacataacgcagcgttgtacgcttatattcatacaagtaccgcccaacgaagcgccagagaacgagtaccatgaattcatttcatatgcgctcaacgattagacctattaaatcctcctgtccatttctcgtgtcacaataataaagaagagaaagatccacaaagaaagacagtattatgtccgagagtaagctccgtcaacgcgcttgcccatatgatacggtaaagaaaaaggtacagatcctcctggatcacattggaaaataatgaacacgggaaatgtttgctcaacgaaatccccaatgtataacaatgcgcaagaaatgaagaatgctgaagcgcgatggaaaaaatgtttggcacgacggagcaaaatgtgaagaaaagggggacggaggcattagtcccgattgcaacatatccagggagaatacaaggtcgtctcgtctatataacttgattaaataagaacaactcagcttgacggtgaatggccgttcaatctgtgtccagtttgtcgttgtactccccaagtaggacgtcactcggtgctggcccacggctgtttcgaactggacaaattctcattagtattcattagcctcagccttgtgcaggaagacttactccactcggcttctgctcgaagaaaaacccacatccatcgacgagcgatctcagaaaacatgagcacaaagagtccgaactctgtctcactgagccagccaaagcctggaaaaaattttgacatccatgagaagcggatagcgaagtcgacagcaatcgccgcatagtactgttgatcactaaaatggcggtaacggcgcagtccatatggatattcgttgtcgtttcgcgattcggaaaataaggttaaatcccagtctttggtgacgtcccagtagaaagagtacgaagagttgataaaggtgaagaagcagctgttcatccttagtttaccgaacggcggatcatagccggatcaacttacagtagtctgtttagcgtcacttcactgataccgtggaatgagaaagggctgtaatttctcaatttagcggtaagtagaatgaccggaaaggcactggcatatttgagagcgttggccaaatgctgtccaccagtgtttccattctgaaagcccattcggcgcacgcggacgtactcaatcaagcaatgtctgaatcgaataatgcttggtatagcaatgacgagaggtatagtga

SEQ ID NO: 1757 - DNA, 2810 bp, Emericella nidulans
tgacatgagaacgcggcggtgtggccgcgatattgtgcttcttctctatgaaggaaatatatgcaccaattctttgacatgtgtactttgctcacgagaagaaccccagcagtcttccaggttttatggacagtaatgtcgaccgtagagatgacagaacacagaaagccgaccttcctatcccagcgctcgaacaacgagctgcagatgccctgaaagctatgtcagtgaaagtcatgaccgtacagagcgcgttcccgttcgcatcaatccgcagcttcccttgatacctttccatgcacagattgttcattcaacgccattactctaattgcaccaatatcacgcgcctcaaatcctttgaaatagagacaaaaggaccagccgtggtctacatacccctccaatcaaagcacagactccatgcatacgccaccctataaacatccacttctccccaccaccttcctacaacctgcatactcactggcaacttgacccccttctccgccaggggcccctctagtatctccaacataccaaccggcatcgctaacaccggatgtccagactggttaaatggcgccgtgttggccgtaagcccgacctgtttcgcgatcatctcaagcggcgtcgcagtagccgggtcaacatggctgttcgcgatataaggcaggtttggcaagaccagcacatcatactcgcgcagtgcggcgtcatattcatcacgcagccggcgcgagagattcatagctttgcttagtattccggggaactgagtctcggcgtatgcaccgttaaggtagatgtttttcgtggaggtgtaggcgcggtcccatttctcttgcgtgagggggtggaagagggtattcaggtctgtgagagcgtggccgcgccgtccaaaggcgcggttcatgcggctgtggaagttcccggatttggagatgggcgtccagattgccgcgcctctggagtgaaacggaactgagacgtcggacactgtcgccccgagctcggtgaaaagcgagatggcttttgagaccgttttgtgcacgcgcgggtctatgccaggcatgttcatcccttctgagataacgccgattttgacgccggagaggaatttggggttggggagggaggttagaatgctgtagtactcaggaatttgggacggcagaggcgccgcgaaggaccggtcgtcgatattgtcgttgccggctgttgcttggaggagcagcgcattatcgaggagggtgcgcgtcatggggcccagatggtcgttcgctgtatcacacaatatcccgtcagtaaagcctcgtgctgcaattgctccagagccaggtgtaggacatactcggctcattcgatccacatccggtatacggcatcagtccaaatgtaggctttagcccgtatagaccgcaccatccagctggctacaaactcattagtcccatcctcatggaatcagcccctcatgcagttccgattcccagcattgcgcaagacggtaagacatacgacccggacactgcccccttgatcggccccaatcgccaaatccacatctccattcgcaacgagggagccacacccactcgagctcccaccgctgctatacccgcgcgcaaatgggttatgcaccgaccccgtggcagcagaactacttgtcgccgaatggcacaggttctcgcagactgctttgcccttgaccactgcgcaagctaccaagacgcgcgtcacgactgtcgcgtcagtatcctagccggtaattgccatcaacttgtctgccagtatatcagactcgaaggtagacgtacgggtatatatccgctaaccatatcggttcccatgagcattggcactcccttgaccgcgatattgtccttcaggacgattgtcctgccagcgagtagacccgaggttgcggaacgggtctggtcttggatctcacatctccacgcccatgcgtttagtgggttttcctccgatgttgggaagtggatgttatgtcgggggaagcgttcctcatccaccatagggacatagtcttctcgcagacattagcttggtgcaaacaaccccgtcaacgggagatacggtggcgtgacagaccagggagacccatcaacgcctcagcactctcatgatacaccgcaagcaggcgaaggtagtcttccttctcgtgctctgcaactgtgatacccagactatccgcgacgcgatccagcgtctctaatgtgaccgggttggaagagttgatgttcagggagaagacggacatcgcggcgacactactacaggtaactccaggttcggtaactcttatttcctctccatcaagttcacgagagccgttgggccgagttgggaaaatgggctttttaacgattccgtacctgagacgttatcaatagagtcaagcggggaacggaactccgacggacctcctatcttgctccgacgcattggtggccgttggagatggtaagagatatgataaggaagtgtgatatgccgataggtgttggagacggttgaggtaggatataagccaacctttccttggtgttttttcgcaatttgcttctcgttgctcttgagctctacctatccggtgcggaggacgtcctagcacaggcccaatgccggttctcagaaatggcccgggcaagacggttctcctccgcgcagacatggacgcccttcccgtcaaggaggagacgggtctcccctactccagcaccgcgacagcgaccgatcctgacggggtctcaaggccgtcatgcacgcttgggacacgatatgca

SEQ ID NO: 1758 - DNA, 3227 bp, Emericella nidulans
atggacccatcatccagaaattgttcatgtacttagactccttacgtatgcacagggtgggctttaaacgcaatgtgcggcgccacatgccgaacttcttactttccatgtcttcttcacacgtgacgctgggtcgcacgacgtaagccgtgttcggtactacggacattggttatcactgccctagcgcatactccaaacacaggtatatctctgccgcaagttgtaagtcaatcccaaatctctgatgtattattcccttagtggggcaccaatagccgctagcagtatctacctccacgtagaacttcttcgccagtaatggtactagtagtaagtagtaataacagcagcaatacaggtttatgttagtactatcattagggatatactatgattagaatattattttccagcactgcatcagattagaagctactttaaattttccgacagtgcggttcgtcaacatccggctccatatgcgatatttggatctttactttactaggtacttcgatagcactgtttgaggattcgcgttgagaccgggacgcccgggaggaattatgagtatgggtagagagtggtagtaatcattctgttagcatgcttattacgtacaggcaggtcatggaaagcgccaatggcaatcatgattccatatcctaaaagagtccggttaactcagttgggatgactcgatacctacgttctagttttcgcgaagagataccccgtatcatgtgcattatttcgaaattcgatagaggtaaaggcattgcttgaaggggagtctatggtacaatagtatgaggagcctagatgaacagcattccggctcatacggtgacagtgacggtggacggttcacttggccgtattctccaccgtatgtgagctttccaaccaagtcccaaattcatcgagacgctgattctcatcgtcatcttctgcgtcgagacccttctcagcaagatcttccagtgcagcgcgcttctcattcgacttgcggaaccgctcgcttccatctgagatgtatgcttcgactgctgtgccgccgaagaagcggccgttcatgagctggcgatgtcagcacacttattcagacttccgacggctacagaggggttcacgtgggttatgtatgtaccttgacgcaagctctcgcggactctggattcgagaaccggacgctgacgacgcccgcttcttccttgtcataaaggacgacatttgtgacctctccgagttttgagcattcttcacggatatcttccttgatgtcaaggatagctgccgggtcctcctgtgtattgtcagctcagagcaatgggggtagcagccagagaccagtgccggtgcagagatgtacctccaattcttgaagcgtgaacatatgcttcaatattacgattttctcaaacttggaattcgtatccaccagtgcagcgggctcatcgtcatcccaatctgcgagtttgctacgcatccgtgtgttagtatctgttcttcacctaaaacagctgagccatacttattcagtttctgcgttctcttaatgatttttttcttatcccgcatgctcgtcttcgtcggcgcctcttgctggcttttgaaagagaaatctgcaggctgcacgcgcatgggcccctgcggcccaggcacgcccagtctaaagtctgaatcatccagcatctgaatcgcgagattcaccgactcgggtcggaaatagacgactagagcttcccccttgaattttccctcgtcatccgtgtacattttgatccggggccggccgctgtcaatctcctcggcgatgacgccgcacctcgaaaagatgtctcgtatttcgtcgaactctgcgtcgagggggatagatgtaacgaacacagcggtgttgacccgttgcttctttggtttttgagcgtcgccctgcccatgaacgaacgatcagcgatgcatacacggcgataggacaaagtagtttggcgatgtgtgcaactgacctcctcactgccctgtttgcgctttttcttgagcctctgtgctccagcctgctcgtcttcatctactccttcaactttataggcttcttgttgttgccgcagcaagtcatcgtcaatctggaggacacccacaggcgcaaaagaggcgccaaccagcaatcagtttcacgaaccacccaaatccagcagacttagcggatcatgcagattctgttcaagaggaaaagccaagcgcgcacacaccgtcggaatccaccgcttcaagatcgtatcgtagctatattcctgcccatcgtctgtttctaagatgaatttgttgtcgagcttggagaaggagactcgcgggtcgctgtcaaagtcggatgggtcttgcgggaagttgctgattgcaggcggggaacctgtcgccgttgggtcgtgtttggggtcttggagcgccattataggatcaaactaggtgctaaaacgcaggttgaatgaagaggttgtatgagtttaaagtccaagcctttggcttgcggggagcgttgatgacacagttacgtaagcaacgggaagcttccagcctttaaactcggtactaataatagagattctcttgaacagcctaataattattatcagagttacatagacaattatacaaagaacatcagttatcttgctatcgtatacactaataaatcgagaacattatatatgcaaatcctgggtatatagaagatgggaaccactccactaatgaaatgggcacttgccagttcgcgagactttcaagcctttcatgccctcctgctgctgctttctaccctttgcttgaagtatctgggcccgacatcaggaatgtaaatccgttcggacagtacttgtcaccttcaatccccgaagagggcggccagtgccccttgaccaaagcatcggacccaacgattcagacggcgggttacgtataaggtcgccatccatgaggagaaatacttcgctaagattgtctcaggaaggttcatgccataatgagcccgtatcaagtaccaaacaaaggcccccacaggaataaaatttctttttccgggggttaattaatatagtggaaattatctaacccatttttaaacaatttaacacttattccctatttctttcttcttattatcctactcactcatttatcttaatctctttaattttattctatcctttttctttatcaatttactt

SEQ ID NO: 1759 - DNA, 3839 bp, Emericella nidulans
ccgactgggccgacgacgaagagttcgacgacccctctgccctccccccccaacaaatcacaaccaacaaagacggcaccaagaccgtagtttcataccgcttcaatgacgaaggcaagaaagtaaaagtcacccgccgcatcaaaacaaccgtcgtccgcgaacacgtcaatccgcaagtcgcggagcgcagaacatgggccaagttcggcttggaaaaaggtcacgctgctggtccctcgtttgacactacctccgtcggtgaaaacattgtcttccgcccgtctgtcaactggaaggcgcaagctgcggaggcggagaagaacggcggcgagaaaggaagcatcaaggaccagctgaaggataagaaggtcaagtgccggatttgttcaggcgagcactttaccgcgcgctgtccattcaaggataccatggcgcccgtggatgaacccggtgctggtggtgctgaaggtggtgctgcggctggcgaggatgcggctggaggtctgggtgctggcggtggtagttatgtgccgcctcatctacggaagggcgctgcaggtggtggcgaacggatggccgggaagtatgagaaggatgatttggcgactctcagagttacaaacgtatgtctcgtcgttttcagtgcctcgtttgtggttttttgcatcggggattccttcttggtcctgatggctaatggtgaacgcctaggtttccgaacttgcggaggaacaagaactcagggatctattcgagcggttcggtcgtgttaccagagttttcttggccagggacagagaaacccagagagccaagggctttgccttcatcagctttgcggaccggagcgacgccgcacgtgcctgcgacaagatggatggatgtacgtttctttccctcaccctatatctcccttcttactcgcaaatcccttatcatccttatcacaataagctccgatgctgacttctccctgctgcagtcggttaccgccacctcattcttcgcgtcgaattcgcaaagagggccacttagattttttctccattttcttcgtcgtatcatatcatattatctttggggattatttctgcttcgatcggtatttacgacgctgttctgcaggtctacactggcctgtttaggcagattggatgactccatacatactcttgcctcacgagttcctttttctcaataaaagtgtcatgatccgtgaataacgaagtaataagatgaagactttatttttaatgctctatggcgacaaataagaaattgcagaggttatagagacacaacatctaccttgttgaaagcacatagctccctggtaacgttcggtagtcggcaccagctttagcacattgtctcccaggtttcattcaaggctatcccgtgtctccctgtgtcttagccgttgaaagggagaacggccgtactggatgtttcaggacgcagtctcttggtgacactcgtgagatctcccgtacaactcacctgtaatcagcctgctgtagtctgcgggaaagccgtggaagagagtcaggaaccaagagtcagaagggtgagtgacttttgcttgcttcaagatagccaaacggatagcgcagtgactggggcagagtggtcatctgcatgcatcggcatctagcaagttagggccaagtgaaagtcatacctagtgccgaatgaatagtatccggttctcagtatctttgcaaactaggaagataagtatagctcccagcatatgagacatgtgctagtcctgatgcaaattactcgcagatgcatatgtacaatggccacctgagcagcggatactcgggacttggaagagcatttctgtaggcagacagaagtaagcctaccggtatttttggtcttctcaacagccagtctagctctctccgtttacataccaccttcaggactcaaaaatagtccgataagcgccccaccccacttactcatttcctccaggactggcaactcggctgtccagacgatatgcaagtcttgatctccggctaggctcgacctcaaaacggtcctgtcaactgacaagcgaagtagagtctgatccatgtagcattgatgttttgtgattgactgtaacacgaaagcagtcgtcctcgccgtaaatgggcatcacattggcccccggagctttgccttcctattccccgagcttctgacaagtggacgaccagtaaagagaatcaactgccggtgaaggggcctcggggcgctgtcggcagctagaagctccggttacattgcatagaatccacagtcagtctctggacaacaactggcgaagatgaggatctgagaagcgccattatgtcatggaggacaattatcttcgtctggaatctgaaacgggaaggaggaaaggcggcattttcgcaggtggcgggttgactcgccgtgtttctgttctgtgtgacttcacctaactcccaactggcgaggtctggtaaaacaaagtttgacttctcttgacaagccaaagcgtcgaccgaggcagattaccggtgtcctgtagctgtgctcagtggagaaatagtcaacggtagtcggcggtgcgcatcgtggatttgtgacagtagagttgggggcctgtctacccttcatttctgagaataaacccaaggaccttgtgccaatgaattgattatcgagcttctgccttctatggcaccacgtcgatcagtctcccgcagtatccagatgcatgccaccattcccttgaagcaaggtgtcgacttgcattcggggcccatgatattagtccacttgctcgaaatcgatttcattgacgtggtcggcagttaggacttcctgcccactcaagggatatcttggtctgtacggaattgatggcacttggtcatcggccggccctcggcttattgatctagcagagaggccagagcgattaccagcagtaattggccgcagctgaagtagtacagctaacttgaacagggagtaaaatcgtggtgggcgtcaggcatagccacaagaaattgcagaatcctggccgctcatgcggcgcccaaggtaattgcgcagaacaactgctgcgcacatggaccgattatgcgcctaagctaggacgcgacgcagacagtttggaatacggaagaggcttgggggtgaatgtcagccatggctgattattctcgtaccatgactctgagatacatcctgattaatctccgagtttaacttgatgtagagtcgggtgtaccagatccactgcctaggcagacccgtttgcacgttagcatatggcatgtaacgatccaaacctggggtctccaccaagtatgtttgtgttctggtcggcgtgaacgttcctaggaatatcgcaagtccaatcactcaagcgctctgtcttgggcgcttcagtagccataagtgaaagtggcggtaaatctgtctagagtctatgtttctgtgacggataattcgcagtagacctcagtctgaactatacggaccaagattcgagggccgcaatccgcaactgggtagccgggtcccagagttggaacctttccagaagatcgaaacgcgtggagatcaagggatcctggaaccaacggccgaatgttctggacacaaagagcacgagctcactgaccaacgtcgatccgaaaaaagccatctgacatacaccttggtgtttcagacgatcataacggcgagctgcatctcggtatgctatcgaccttcaatgttttgcatcgtgccaacacataacgatcgtgctatacagcggagaggatcgggaagcgcactagaagtatgagctcagattg

SEQ ID NO: 1760 - DNA, 3904 bp, Emericella nidulans
  unsure (1)..(3904): unsure at all n locations
atgccggatgtgtcgtcgccatgatcgccaaagatggggtaatcaggaagacgaggtggaaacttagtcgatggaggcaggcgctgcagacgtgaggttatgactggaatagatgaacaattgaggctactccaaaatattctgtatttggttggaaggtgagttactacagctgcggcagtttggagtgacagagaccgagcggcggctcctgttggtcgtttgtccctcggctcggcctcgagagtcacctcactctggggttggctggacgtagctcgtcacgggattctccagatttcgtgcttggcgtcaaacaaacaaccaacacacttcatcaaacatctcagtcaaaggagcaccctcttttctaatgaggacgacagcttgggttcggccagcaaagcagctgattcctgaaattgcaatatagcagcaataatcactaatcaatcatcgtccggaagcgaaacatattctatgacgcactcttttcattccatactagatccttctaatatactattccaatattcttctattcaaattctttttacctggggtatacttgctgataccattatcccactaatctttcggactagcaccaggaataaagaaaagagagagagagagagagatggcaagagaactattaaaaacaaatggacatggacgtcaatgcgccagacattcccattccacctagcacggatgttagaaaatctcgcatctctgcttttgtcgctatcgatttcgagttctccggcattgcattagctgcacacggaacaactggagctgggccaccacatagcttgcagcagagataccaggaattgaaggaatttgctgactagtaccaaatactccaagtcggcttaaccttttgtcaggaggatgttgaggcaggtcagattatctgcattctttttgagctctccgaaatatgtgatattgactgtctgtagggaagtatactttgaaaccatataacctctacctcagtgcaatcattgatcgtaggctgtacgccgagagaaattgtttattccagagcagcggtatgtacgctcagcgttattttcgcaggactgagtcttccatgcagcggtcgagttcctcctggagcacaaatttgatatgggcgctttgtacagaacgggcgtgacgtacgtatcgagagaagaggaagcacgggctatctcaaaggcccaagaaagatgtataatggcaccggtgctgacttcaatcaatggacgttgacgagaccgactacgaatctctagcacttttgaaattcgtccggaagctcatagacgaatggatcgcgctcggtgatataaaggttcaattttgattgctgtcctacctaatcaattatagaagcgcgataaatacctcaaaatcccgccaccttctcgccaaaaggaaacccagacactcgacagcgtgccttcgatattaaacaggttccaaaagagactggtccaccaagttgtcgaagtagagtatccagactttgtcaccatcggacggcctggattcgtacagattattgactatgacgagaaacgcgaagttgctgtccgggacaaaagggtccagtggtgtcaaaaacgagttcggaagcagacgggtttcagatggatcgccgaagccctggcttggggtgatcttacgcatctcagcaccaattacttccctggcgtcagaggcaacactgcatcaacggagcagggcaaatcactccaggaatttgttgagaacttcaaggcacgcctcaaagctcatcgacctattcttgttggtcacaacctcttcaccgatctggtttactttttccgctgctttttttggaaccctaccgaaccatgtagaggactttcagtccatggtgcacaagcattttcctattgccatcgatacaaagtaccttgctacacatgaatgcgggtccaccaatcccatatcttcttttacaggaaatcaataacagtctgctgggaatatctaaaccaatgagtggatgacgcaatatataactggcgacagacagacctctttaggcatacatcctcatttcgccaggtacgaaatagagaaaatcgatcatgaagcaggatacgacagtctactcactgcgcagatattcgtcaaactctcagcccagcttgggagcggaagtcaaattaggcccgcaggatcaccctcaaatacatctttgacggcggcacacggcctcaacaaccgattttcccatttgcacgttgaagagacgagcaacggactggccagcccgctcgtggttgctgaaagcgaaaggagcgatggggtcttgggccagcaaagccatgcagaggagatacgactggctgagaaaggacttttgatctccagaccgaattttcagttctggagagtgtatggcaacaatttacgcaactttggaaccaaagagaaggtttgccgtgtaaagaacgctgcatagcccttaaataatgcactacttggactcaatctcaaaccatctacaataacccttagtagaatctccaaaatatgaagcgagcaattgggatgtgcgcagcatctatctaacagtacaccttggattcaagaaggtaccgctagcgaaatcagctgcaagcactctctctgagcaccgcaatgaatgatcgactggttgtagaagaaactgaacgcagtgacgataaggatggtgctgtgataaagaagaaagagaaaattgagtgcagcgggaaaattgggtagaagtaggctgaagtggtcacgtgggtacctagctgtttttgggctagccaggcccgacggggacgggaaaacagtgaccgacgacttttctcgagacttgctgaagggaccgtaggagcctgttacgaccacactaacagccacttggagatgtcttcaggatccaatggtgccaggcgcatagcctcaatactgcgtaagtaacattaggctttattcccattgagtctcttctgatgtcgagttgcagggccttcgattgccgaacagcgagtgtgcagcagctgtcaagagacacttgtccgccgcaactatgcctccgcggctacacccatttcccctaaaccctcttcgtcgacctcatctacgtttcctgttgtgagcccgacttatactatcaatgctggcgtgctcctgtcccgtccgccccaaatcacacgcgacctcaccgattttgagaaagcgtactacttctaccagaagcgtctgaacgagcgactggcgctcccattcacgaaatacttctactttaagcgcggaacgccccttgacgaggattggaagcgtaaggtccgagagcgccagaccgctgcgcgcgatattggcaagtacaatgcgtacggtaaagaggcgtggaacgatgaactgcttctgggcgccaaggagtcggaaccggagcatattgttgaggcgttgatttcggatgccgagagcactgccaacaacacgtctcaagatacaagcaagcaagagcaaatcccaaggccgcatccccgggtaacggaggcggataagaagggtgacaccaagagtctggatcgggctcttcagaggaccctgtacttgcttgttcaacacanggaaggatactggaagcttcctagctctcctgtcgcttctggtgaaacccttcgatcggtatgctgtgtaccccacttgctgtgtcgtgcgcttgctaatattgttttgataggccgctgaacgtacccttgacaatctgctgtgtgaacatgacacctttatgtcgatcccacctgcgggcatcgtgtacacttcgaaacccagatgacagacaccgcgccacctagcgggagagcatcttatgaagaccatatgccggcagcgactt

SEQ ID NO: 1761 - DNA, 3356 bp, Emericella nidulans
gaaaactccataagattcgtgctggcgaactgaacaatgagagcccagaataaattttaaatacgattccagcctgatattgaataactgaactttgtacgctacccacgggggtgggagcactgtaatagactgagaattagacaaggttcttaagtaaagcaggaagctacggcgatttactagactgagatcaaatttttgttagttttgtcaagctgtggaaatactttgcagaggatatgccttaagttttgtatttgtgctgatgaggaataatacagccaattcatgggcaatatgatgacgctcttagcaagcgtcgaatggccctgcgagaagtaggcaagaataatcttattctttctcactgattttcatctttttcgagtcccccttctttcttcggtttcatccattcattttagacggcatgagctgttctatcttgcccctctatgctacgccagctgaatcgtcccaacagcacaatgaagggtttcaggctcgacaatgggggctcgaccatgggcaggccgggtagaacagcaccattgccagagcagttattccgagtttgaagaatggtaaccgacgagttgagcgctacaattgaatttattggaacctcaaacacaagcatcatgctcaaataattaaggaaggagggtatagcggccagagctcaaccatcctccgttgttcacacagtaacagcgccttgtgcgggactgatcttcgacggctctgtttgaaatgtatgcccactttgtgagacaaagacatcgatatccccgtctgtaagcctatcctcatccacggctcccctcccgataacaccccttttcctatccctcctctccaggtatgcaatcaaccctataaatggcagcgtcaaggccccagtaaccaagctagcgaaataaccccttcgatagtccggtgcatctgtgacagggtagaaaatcaacggccaccaagtgacaaatgcaaaatcaaacgagttcatgaaccccgtcgcgatggcgcgcagctgcacgtcatggccggtcacgtcggccaaccagccataccatactgcctgcggcgcgtacgtggtgccgagcaagtagaaggcgaagaagtagcctgctgttgggggatctgagaagagaatggcggagcctatgacaaaggttaggccaatggcaatagagacttcccatcgcgaacgcagtttgtcagagacgacagcgtagaggacagttcctactatggctgtggcatagatagcggttgggtagttgttctgttgcacggttgtgtatccgcgcgaggccatccacagcggcatgacgttgttagaaagactctggacgcagagcgagtatactagaatttgttagagtggagcgcctcaaatagtcaaggagactaacgcatgaagataagcggcaagagatagaactgccagctccaaagcacccgtttgaagaccgtcaggtcccatgactgcttgctgggagagccgagtcgagcggccgcatgctccttctcctccgcgttcaaataccacgccgttcgatggacaggcagatcggggatgaagaaccagcctgcattgtctgaataagcctaggttttattttttttttctttacttattttgagggaaggggtaccgaataacgcgacaggcagagtcatgacggagacaatgatgaagatccatttccatgcaggaaggccacccttgcctgccaggcttttcaacagtcctgcttgaatccagccaccagccatagacccgagatggccaaagacgcagaagatggcgtttctggtccccagttcagatcgcttgtaccatgaaccaaggatgaacagggctccgacactatcggggtcagccacagcccgagccaacaagaccagacctactatgcaatcgctgaaaacgccccttcgatagcattcaacagaatgacctgccaggcgtgggtcgtccgaaacgtgaccattgtaaggacactccaagtaacgtttgccggaacgaagacatgtttcggccgcaccagagtgagaagactggtccccggtatctggcaaacagcataggtgaccaggtaggcggttctcatgtaattgtagtccttaccttgaaagttgagggcctctttcattccgctgatatatgctgaggagtagctggctctggtgacgccgaaaagaaaccagatcaaggagaaatacggcagtaatgtagtgtccagtttcgccagcaaggcgcgatctttcccatcggagccccagagccaaatggctacctttgtgcgaatggacgccattgtctgttgagactcgatagaagtcaaggcgggggtatctcagttggagacggactgaaaatcgaatgtgaaaatggcgaaatcgggggtcagcctgtgtgaccggattgtgtgatcgagacccgataagcgtcatgccgtttagatatcctgcgtccttgacagagctacatagtctagaatttcaaataatggaggaccctttacgcgcaaaaagtaggttcttggtgtctgtatagggataaattcctttcatggatgcaaccttatggcaagtcaatcaacgtgctctctagacggcaacaaaatttagaaagagtatatgttactaagaatataagaaagggaagcagcggccaccggttgagcacagaggcagatatgtacttggattttcggctactcttttgtctttggctccttttgcttcttttgcacagacaaaaacgtctcctctcccctccgctgtaccttgatctcatactcgtcatccataaagtccttcagccgcagctctgtcgtcctcccgagtccttccagctcatccagtcgctcaagcgtcgccgccagatgctcctcaaattcagggtcactgcagaccgaacgaaaggcgttctgcattggcaccgaatccgctcttacaatggcgtcggcgtcgattgcaatgatgttcatctcatccagcttcttgatcagatcggctcgggtcatgagctcttgcgccttgtgcagggcgatgcccggtagtccagagacgtagtgcgttcggtctttggccttttccagctcgacgagcgtcttgccgaggagcattgcgccggactactccttgttagccgggttgattcttgatagcgtgggggaaacttaccgagagatcctgctggtcctcagccttgtcatccatctcggcgcccaaaatccagcatttacacaacagccagcgcttctctttctcacaaatggcgtgacaggtcttgagcatgtcctgggaccgggcgacctgatccctttagtagggttaattcg

SEQ ID NO: 1762 - DNA, 1206 bp, Emericella nidulans
gacctccccaggtcctgcaattagcctgctgtgctgttctatccgcatggcccaattcaacgcccactattatggccttctatttcctgactttcgccacggcggcatgggggtatcttgtgcactgtcatgacgtacggcaagaacctactcgtactgacctcttttgagagattccctcctcgcatggctgggagagatactcaaaaaggaaccagaagcgcgctcgctccttgtcggtgcctcggtgactcttgtttgtcggtttcccacagtaaccataaggcatacttttcttgacgggggaaattgtagatgtaggacacgcaaccatacctctccgtgcatggcggacagccgatagccccacgtacccattagggttcccccttgctacggcgtttgccgcaggaagcattgcggcgattctggaaatatatctctatttgaggaggtaggttcccgtgttcgtattctgtttggttatgctgatagctggtgttattctttgcagccaatcgtacatcttagaacgactagcgcctcaacactatcggatgctggggacgatgggcaggttcagaatgctgatactagcatgagtggcaagggagctgctagtggtgtgtgggaggtgcggtcgtagtgtgtctgggaaatatgagctggagaagggtgttctactgtaacttcagctatatgccggtacaatcacgatatgcacagagtttgaggccaattctcgataaactgactgatctaacatacttattaaggatgatatcaagagtataacaaattgggaaccacagtacagaagtctactgagctaaggatggataaacccaaagcttggtatggttatcccattaggaaccttggaaactgcacaattgctggcgggccttccgggccgaaccatgaagtaaaagagttgttctcaccttcaatgacatcacagcctaattcagcaccatcattacaacaaatccgcagcacaatggcattgttagacctcccaaaacctgctggctcaacagtcggcgtctcggttatagtcggcggtcatattaccgttcaaacgaggttcatggtcaaagagcaagtttcagggcacagctcaatatgcgcgcccagctacagctttccaattgaaaacaaaggcaaagggtaaaaagatcctagtattctatagtgtcacctaaa

SEQ ID NO: 1763 - DNA, 3066 bp, Emericella nidulans
  unsure (1)..(3066): unsure at all n locations
gcgaaaatgacctatcagagccaaatagtatccgaggctcggattcagactcgctcctccacatcccggagcagccaacagaccgttttcaaccgccatatcagccagtaacactatcaatatggctgccacaacaaacgaccagcggcgtaaggttggtttttttttcaaagctcactctgacccccgctaattatttataatgggttatcagcccagcagcttaagatccattcttgcgggctctacnagtggcgcaattgagattggtagaactcaggatactattcaacttcttcgaattggagtgctaacatgatgtagcaatcacctatccggctgaatgtatgctttgattctctcacgctcttccccagacctaggatctaagtgatttgtagttgcgaagactcgatcgcagctcaatcgcaggctacccgactcgaagaagctcccatggccgccttttggaaaacaatggtacgccggttgtacaacattgattattggaaattctttaaaagctggaattcgtgagtccctggtgttatgcgtatagactgttgtggtttggggcgctgatacattgtcgctatactcaggattcgtcgcgttcgatacatttaagtcgatgctgcaggatcaggatggaaagatatcaggcccgagaactgtcatagctggctttggggctggattcaccgaatctctgctggctgtaactcccttcgaaagcataaagacacaattgtcagtcttaccccatatcccagttgttctgtctatgcgcctggctttcaacaatcacgagacgggtagtagctaataccgtactctttccacctcctacaggattgatgaccgtaaatccgccaacccacgtatgcgcggatttttccacggtagcggtgtgatcttccgagagcgaggtattcatggctttttccagggattcgttccgactacggctagacaggccgcgaattcagcgacgcggttttcgagctacaccatgctgaagcagatggcagagggttatgttgcacccggtgaaaagctagggactgcaagcacgtttgcccttgggggcatggcaggcttaattactgtgtatgtcaaatatagttcacaacatcatctcaaaagacatactgacaacattatctagatacgtgacgcaaccccttgacaccgtgaagactaggtttgaccaaccagctcttagatttgggcgagatgctagctaacagcgaaataggatgcaatcgcttgaggcaagcaagaactacaaaaacagcttcgtctgtgccgcgcgaattttcaaggacgaaggtatcctgaccttttggtccggggctgttccgagactcgcaaggttgattatgagcggcggcatagtattcacaatgttcgttcacgccgaccaatcctattttgtgacttagtgactaacgcgctactcataggtacgagaagtctatggacatcctcgactccatagatccggaaggaaggtatatctgaaagcatagcgcggcatagagaaccagatttagagcaacgacgacgatccgagtaaaactgttgtgccgatgcagcacagcggcgtgtttctcgggtatgcaacatgcaatagaggaagttgatgtacgttcaaaattaaaatgtttgactcccaaaacgtttacactattgttgtttcttaattatctcagaggtgagtgccagtatttcgcggtcgatgagccaggatcgcacgctatccatgaccttgactagggtctcacctccctccaacacgttgtccaggttatggacagtgaaaccacttcgatgatctgtgcagcggctttggccgtaattataagtgcgaaccttgtcacctcggcccattcgccctataccgcccattgctcctcttcgaagctcgactaattcttgtcccgcgcctcctgtcgtgcttccgccagctttgcccgcagtatctgccacgcttttttgcgatttgcatgctgggaccgcgaatcctgcatcgataccacaatacctgtgggcatgtgagtcagacgaatggctgattcagtcttgtttacatgttggccacccgcgccacttgctcgcattttttcagtacgaacttcttgcggatcaatgtaatagtcgctatttgggtcgtcaaagttgaacgcgccgtcaccgccgcctgtgtccgggaagctgggtaagaccatcacactgaccgcactggtatgggtgcggcctttggctcctgttgtcgggactctctggactcggtgtacacccgattcggtccgtaagagatcgtacgccccctctgcttctacttccaaaacagcctccgttagagcatctgctcggttgtcccacgttcaagcttcatgagagtagaccgtaacccttgatgagcacaaaatgcgacatacatctgcagtaattcaaaggcaaagatacttgcttcatccccccctgcacctggacgtatctccaacaagcatgaaaggtctgcgaaaggatggcggggcacgagggcgcgcttcaaattatccgaaatcgcagtcagtttagcttccgtggtttgcaattcttcaacggcaatggacctcagctccgcttccgtatctggatcttctagcatggaatgaagctctgacattgactacaaagcgtcagtcaaagatccaatttggtcagggcggaagaagctgacctcgttggcattgctccattctgcccaggcttttgcaactggacctagctcaccagcgcgccttgcaattttgggatcaaaggaggttgtcagctgattcgaaagatttgcatgttcggctgcaaggttgcgagctcgcgtcaggagagcaggtgataagagtttgtctggcgtaaagggaagcatcgtcagcatgtatctaataaggtggaagtagtccgtggggacgctgtataccagtttgtagacctctccgctggtagagcagccgctggttgcatactagtcgcgcggggcgcaccagacatcgagaacacacacccagagtcgaaagcatg

SEQ ID NO: 1764 - DNA, 3362 bp, Emericella nidulans
aatttgccgcgtggcttgaaagtgttggaagatggacgcaggcggacgaagtgtacaggcttggcatcgaccgagaagcacgaccaactgaacgtctgatccgaaaatacggtgaatttcagagacgctatgaacaacaaccgcaggacaatggaccttcgtcaccggcgctccctgcagtgcgcccggcactggccgccaaagtcgacccgttcgcttcgagtgcagccgcacccacagatccccaatcccagcagcagggttcaagaaccacgaacgcgccgaagacaaaatcggggaagccgaagatggccatatttactgataccgagcctgcagcaaatcaaccggctttaggcgcacaaactaaagggtgggacagtcttgaatctaggcacgatcgacgaaaggagaaccaaatagaggccaaaccctgggccggggaaacattgaaagctggaaggaaagctccgccaaaggagaagctagctgtttttagggatgaggtaagttttgtgatttattcaaccccgttcgtcagcattccgtatatttacgatcataggactaattggtggcatgaacctggattggtttactgttatgtattcagtcaaagtcagatttaccaaccaaagaggaaatgcaatcaaacccagttccagagcaccgcatacgggaagccgtaaacccacgtacaggaaggagagagcgagtctttgtcgacctcgatgcagtgtaccccgattataagaatcctagcattgaggttagctttgaggagctgagggccatgaagcgtggctggatggacagggactggcgcaagaaaggacctctcaagcagatctctggcaacgctgtccaaacagagcctaatccatttaacgacaaagcccttcgagaccagttccaacaaaagctgtcgttgaggaatacagatgaccatgctttgaatcaacccatcgtctctgagaagactcatgacgccaaagctgccaaaggacggaagctgaaagtccgcgaagttaagggcgaaacacagacaagtgagaaactatggcctacctgtccctaaatgtcttattaggctaactttcgaaatagtcaaaatgaaatttgactctcccactggaggcaagatccgccgcaagagcaccgcagagcctacgatgacaatccatacgcgcgctgcaacagacgaaatatacagcattttcaaccagcctttgaaagcggagaccgaaaatgtggccgaaagcagtgatttcgatgatgatgactataccagtgccggtgaaagtacggttggacgaatatctgctgcgtcaagcgattttggggacgacacattccacaaatcgttcgatgaaggtgacggcgatgacttcgaaaacacgagcgccgacagcgttgtcaatggagaatggactcgattttccgctgctgaactgggcgctgaagcaacctcgttccactcagaagctgctgacccaacacaatcaacgattcaccatgccgaaagcgacgacacagaagaccaggatgctggaccagaatttgagcagccgcaaaggccgagattcattccagagatgccagaggattatgtaccacccgttggaccgtaccgagatccagtcgttgtggctcaaagccgcttgccattcatgacacctattgttgaacgcaccgagcattcattcccttccatgactgcagcgcggtctaacctatacagcgcgaagactccttcgaacgtgctgaacccgacgacaacacctcgcatgccccggatgggaaatcttctttccagtccgcttccaacggaaacaccttttcatggacaaaccatgcacggcctagaagatatcattgaaagtcccaccgcaaacaggtcaggttcttctagcctgagagtaccatctcccacaaaggattccaatccacaaggtactataatcaaagatactctttgcaatcccatagaccggtcgattcgagacactatccttcaggaattgcacaccacgctcgctgcgtaccctggctaccatgctcatccggatacccaatctcattacgcccctgagatagaaaggttcatgaaaagcagcagcaagcgttccagaagtggcggcgaggcggcgtttgacgtgccgatcatcgatccgccgggaggagagcgcagttatatcatcagacgggagctcggtgcaggagcctacgctccagtctacttagcggagagcattgacaatctagactctgactcggaaatggaatccgttggcagcaatagcgggcgctctaccgtttccaacagcttaacgcggcagaaaacaccccgttacagcttcgaggcaatcaagctagaggttggcccgccaaacgcctgggagttctacatgatccaaaccgcacatcaccgattaagccagcttccaacgctctcgcgtgcagccgacagtatcgtacgtgcgcatgagatgcacattttcaagaacgagagcatccttgtcgaagattaccgcccacagggaacgttactggacctcgtgaaccttgtccgcaacgaagggatctacggcccggcgactggagagggaggcttagatgagtctctagccatgttcttcaccattgagctcttccgcactatccaggctctccacacctgcggcattcttcacggcgacatcaaagccgacaactgcctcatccgcttcgacgacaaaccagaccccactcagcagatactcgatgaaaacacagatccccgcgaattctactattcaccttccggcgcttttggctggaaaaacaaaggccttgcccttattgactttggccgcgggatcgacatgcgtgcattcgacccgtctgtgcagtttcgttgcagattggaaaacaggggaacatgagtgccctgagatccgtgagatgagaccttggacgcaccaaattgatcttttacggtcttgcggggacagttcacgttatgctttttggaaaatacattgagagcgtccctaccgatgcaagcaaaaaaacgtatcggtttcgcgaaccggtgaagagatactgggaaaagattttctggcccgattttttgatcttctttgaatcctatacggaccgggggtttgatggagcaaaaataattgtacccccccaccttcaggccatttcaagcaaattccggaacggggaaagtggtctttccccccaaaaaagggtggtttaatccaaacgcggatttttggaaaaaaaaaagggagacccattcaattctccccttttgttcaaaacaaaaggaggggttttttttcctccttttaaaaatgggccccctgggggct

SEQ ID NO: 1765 - DNA, 2512 bp, Emericella nidulans
ggagacgctggggagtcacgagaactgcgcgcatctagaggggtcttggtagtagtccttcatgccctccttagtgacggtgcggcggatgacgaacttgcggacgtcgtccttcttgtcaagaccgaagaagttgcggatcttggtggcgcgcttgggaccgagacgcttgggaacgacagtgtcggtgagaccgggaagctccccctcaccctgcttgacaatgctgagggcaaggacggcgaggtcctggccagtgatggcaccacgaacactcttgcgcttgcgctcaccagtgcggcgggggcggtagcagctgtggccgtcggcgaggagaaggcgggtacgggtggggaggagaactgtacgaggaacgagtgagtttcttgctttgtcgtgggagtcggattgtttgcggcagtcgttacataccaccctgcttcatggggaaacctgtaaaataaaatcgttagccatttgttcctctgccgagtttgacgatctccccgcgcgacaagttaatttcggtgtcgtatccataacccacgcccaaacgccagaattgcaaccaaatatcggaagatccagtcgtaccttgcttgtcgttaccaccagtgatcttgaagaggtaacccttgaattcgtcaccgagagagtcgccgggaacctaataaccagaaagacgccgcatcagccaccaattctcatatcattcaccgtgcgttcttcatttgtgttttcttttgcgtaggacggatatgtgcttcgggaatagatggatggttcgactgacttcggtgcccatgcgcttctccatgaaaggacgaagcttgcgctcatcgtcaatttcgacgatcttctgcgacccattggccgggtaggaaatgttgagcttcatcttgacggtgatgcgcggtcaagacggagggcgcgggattgtcgacggtcgaagtggtgcgttcggtcgttcaagcgaaaacaagtgtggatttttgtgtcgatttccttttggtgtagcgagaattcggtctgtgggtggctgagtcagccactagcctaggacggttagtgcttcggtagggctcttagtcagttgacgcctgaggctgtcgcaacagaggtaatcctttattcaggcatcgattctgatcttctctcccaaaatcgatttgatcttcggaaaatcgttccaatgggacaagtctgtactccgggtcctagattatagcagatggacctttcaaacaatttcgggctctatgcttgcagactttctagtattccctgacaccttcctcttccgcagcagtacgtagactaggtgacgcaatccaccgacatcctccagtctccgtgcggttaaatctccagaaggagaacgtccatgatagttgccgttagccttacagcttacagggaaacctccccctttctctttcttccacttccccctgaggcatgtatataccacttcctcccaatatcgttagaatattacttttatcattcatttgcttccaccactcttttttctcttctccccgctcttctttcttcctccgttcgcggttcgaagtctcacgcgacacactggatatccaccccgggccatctccggctcttgattttccaatctccattcagctcttttaagtaaccaacaatacagagtctctagcctcgaattcccggcttgtgacctactttctagtatcataccgggcagttgggggggaggtccatatttctatacgaacgccgccaattcccgactctccggttttactttctagacgctgagcgactatcgcggatagccgaaacctgcgcatacgtctttctgtctgattatgcgcccaaaaatgaggcttaccagcaagtttcacatcgtttgcgcctttgcggtgtttagcatcctgctttcagccctgtttctcggctcgcagcgcttctactaccgcagggttggcaccgcggaccagccaaccgtggagttccaggcgccagcctcacctgaccgcagactggtcgtattcggcgatacatggagtgataacaatgctaaagagattcagggtgggaaagtctggaccgactggctctgctcttttgtaagtcttgactgcagccggccagttcggatataccggggtttagctaactgaatgacttcgcagttctcatgtcatcatgagaatcttgcgcaaactgccaaatctttgaaggggacctatataggatctgtcgtggataatgaggaacttgcaggcaccttcctcaacttgtacaagtcgccgttgtctgatttcagagcccaggtcaaacagtgggtggacactgagacaaaaggtatccagcaactggacgaagcagtcattcatgatcgccgcaatcgcaccattgtggtagtttccgacagggtttgggacttgtggaaaaagataaccaaggactacgagacagctaccaagtcaggagccacatcgttaaagttataatgaaacagttcgag

SEQ ID NO: 1766 - DNA, 4008 bp, Emericella nidulans
ttatgcgttgcgcttaatgaggttgcctctggtggaggttcgaatctcatgacacaggaggacattgataacctcacaccggaaatctacgacgaaagagtcaagggaagcaaatgggtgttcgtctcagagcacgccttcatcctcgctatatggtcaatgaagacatgcatgttgatcatatacgcccgtatcacgtatggtcccaattcaccggtttactgacttctcgcatctgacttgacttcttaaacagagagggattgccccaaaggaaatgggtcaactaccttgccatctatgttgcgctggggtttatcgcagtcgagctatccctcttcctcatctgccggccgctatcaaactactgggcagtgcctactcccaaccgttagtctctcccactcgtagccttatccacgctgttaaccacgctgcagcccaatgttccacttttcaatactacgagatcatccaaggatgcgtggctatcactgctgatatcgccatgcttctaatcggactcccactcctaatgcaagttcgtgtcccgctcaagcagaaattgatcctcgtcatcatcttcggaatgggagtctttgtcattgttgccgccatcttgactaaagtctactgcctcgtcccggagttgatttcgtacgtctacatgaactggtatttccgagaaactactgtcgccattctcgtcaccaacctacctctcatctggtcccttctgcgcgacgtcttccccgcgctcaagagctggacagggggctcgaaacgcggtaccaaccgctaccgatctggcccttggaacagcaacccttccggtcttaagcacttcgggaccggcactggcactacccacctacgctcgggcaacgagttcccaatgcacaaatacgatcgaagcgttgtggttacaccgcagaaagatatgtccgaggtcagcctggaacatacctactctcgcggccagagcgatgacggctcagaacgagctctgcaaatccgacaagacgtgacgattgaggtcatgcgcgagtcacgaccaccagcaaactatcacctccacgacccgcaaccttaagaaaaggcacgcctatcaaccttcgcttctttcctgtatataatttgtctgctaccccgagccctgttcctttgttgtttgtcatgctgttacgactagacccgattttccctgaatagattatctcttcggagttggaagtacacggataccacaatatcatcattgtttggcccgagctagaagtcagactcgctgaatctcgaatccaccaaacaacaaaatgcctcaccgatgatcggcatcccgtcccattctccagttttccccatttcctcaaccatggaatccgctctgcaactactcgatcgggaatctggtgtgttgtctgcagatctcccgagcgccacgtgatgcttcctgtacatttctcttgcctctcggcccatgccatcgggctaatcggcaacactgtcccttcctcttattaaacattttgttccattgaaagcagcagatcgatatctgcaggatattggagcatcgccaaattctctaacgatcttatgagcttcactgaggtgtcgtacctgcgccatgcaggagatgagcaattccaaatcttagcgcccaaatctcggcaaataagcggcggataaagaattcttcgagaaatgacggcaatgtgcaagccagtaaccccaatcagcatgtggagactgtagcccacagcagcagcgcatggttccgggaattccgattattcgacaagagcgatcgagtcaagcatcggttgacttcattcttggcggtccttgtttcgaaatctattagcgctcctgcgtgcttcatactgtgtggcgagacgcgtccgtctcaatatctgttgcaatcctgccgctaagacttcgaataatggtatggtgaatgcgggagaacctggtctcccactcacgacggtatacagatctatatcacggagtagaccgtcactatcgcggagcgtttagctttgggcaccggtcccatataatcatatctgatcaaagactgaacgtacaaggttacggagtatccacttagtacagggcaaagcaatcgcttaacagcagcactatgaatcattcctggctatgattgttttctggtgagaaccggcctcgacactatgcgctttagccaaattctattccatgggccgaccacgttgctctccaccagcgccagcccatacccaggaagtaggatggactgcactgtgtctgccgaccggaactgcgcatcatccctcagtccatggttgagattaggcaaatcggcatctcgcttgttactcgcaagtttttcaggcacactcgtggcctaccatggttgagagatcttccacgggcattccacaggcattctgcggccaggtcggccaacgatcttccgtctcgagcataagccgctcggtgctcaagcctactactgagcaccgattagttcgagtcggtccaacgtctcacaggaaatgctctgtaattacttgagattttcgacgagcaaacatcgaagctggagtattccgcttcccagtactaatagacgctttttccagctagccattgttcgaagtaccgccgtgcaaaaaacacacgatactaaaatggcgtccgagtagacctcgattcctcgaaaccagagctcggtaactattcctgtttgaaacactacctccgctcgcccgttctccagtggggagacttatcgctttgactccgattttagcgcaactcgttgaaactatacaagaaaaccaaccacactaaaatgcatagttcgaactttgacccctcacggcctcaagctggacgacacctttttaacaacgagtttctgatgaccagatgctcgccacaccttgttgttgcacagacctccggaacaaaaggtatttgtcacggactatccacgcgcggcgctggcgtggagcctgattcacctacgcgaggccgcttaaaatagttcttgttcgtcgttgttgcagcgcgtcgagagtttatgctactgaattcagtcgcctaactcctctgccatatgcccttgcgattatacgtgctaccagcctcctccaatatcccttgagtttagctggacgtttattcgaccgctggctggtgaggataagggcgacacttcagaagccagaagtccttcacgcttagaatggaattaacaacgatgtatccaggtcactgccctccgggcatccgtatcatatcgttccatctattagagtataacatccgggtcacacaagaaaaagagtcggtgaattcaagtgtcttgaagtagatttattacaacgcatcatacctactagaccacattcagtactcacgcaacattctaatgctgagataacccagcgatgctagggttacaagccattgaatgattacgtactacgattggcttcattaaccggtgataaatatatatagctatatgcctacagctgaacttctatagcagcgctgcatggtacaaatgtaacatcccaaatagtagcaatactaccacgatgaggatttcaggattgcgaaggggtttttcagatagaaaactctgtctcagtaaccacctcggactccgcatactgtattctctccccatgtctagtaatccctagggatcatcaatcttaacaagattccctaatttatggtagggggcgctacggtcagtattagccgtcaacatatggtcaagggatctgtcctcgccttcataagactattgaactatttctgtcgatctatcgacagtgacgattgaacttaaaattggatatgagagctagagtatactgggaatggaggcctttattcggtacaaatgtatatatatattaggatgctaagtggctaggagctcagtctctcatgagagctcgaagcttcatgtaggagtctgatgccctccgcactcag

SEQ ID NO: 1767 - DNA, 2052 bp, Emericella nidulans
aaaataaaaaatagaggaaacataaaagtctttcaaacgagaggaatcttttcatacattccaaggcaacgaataagtattctcccaaccatgagggtgttccaaggtcggcgctcacaacgggttgtattatgtcagcatggcaaggtagggtttaagggggagaggtggccatgttgtcctgatcttgcaattgggccagagcactagcaaaattattaataaacggaacagacaataaaataatcagcggacacatacctgaaagcgttgatggaggatgcagcctccttgtcttccttcttaccggcagggggtgtcccagtccggctgctggcaccactgtcgtcgctgccacgaaccaaattgccaccagggccgaggttcttacgtccactgttgctgcgggagccgagcatactagaaggcccaaaagacataggctggttggtgttgcgggtggtgcgaagtcggcggaggtcatcactgccaactttgctagacgcgtaatccggcgggggtacctgtccgtatccagacgagtagctacgggcatcaccacgtcccatggcggcgcgtccacctcctccgcggctggcttgctggcgctgacgttccatctcggcctcctgttgcgcacgagcagcctagaaaagttagtgaaaccaatcatctcaacagatgtgaagacacatacctcctcacgaatttgctggatggtcttaggacctttgtcagcatccttcgagacccagcgagcattacgcagatcgataatatcctgaaaaaaaaattagcatgctgttgtcaccatacagaaattggatgacttaccattagcataaacttcagacgactaggcaagttcggagtctgaaccatgaggttgatgcgttggaagtaggcgtccataaatttacggttctgctcattgtcgggagaatccaaggcagcaccaatggtgcgcagaagacttgtcaaactctcgacctcagcttcgtctggagtgccctcataatcaacaagcttcttgatacacatatgcatgatacgctccgtcaacatgcccagcttgaacaattcaccaatgaacttgacgagacccagaccacgacgtttggcagcagcagcagcgtagtattcgtcggacatcatagccgcttcctccgtgacaccctcaggcttaggagggaggttgaccttccaaccgcgctcgaattcttcttgacaacggttgagaaggtacttccggaacagactaccaccggccacaacattgccgttcttgtccttgatgttctcatccttaatatccatgctcatgctctccaacatagtcttgcagaacttggcgtagatggaagcccagtgtgcctcatcggtggccttctcgaatgtaagttgaatgacttgtcggagcgtacgtccgtcagactcatccttggattgggagacaatctccagaatctgactggatatacgcgggaagttttccggcgtcatcttatttagagcggccttgaccttacgctgaacaacatccgggggaaggtggccaccaggtgtaggaccagaagcagcggcagcctggccaatactgcgaggtttccatccagtggcagaaacttgcagacccgggacctcctttccggctgtgaggggcatggacttggccatatcctcctctttctttgcctgctgcttctcgcgcttgctgcctgtgcgggtgttagacctgcccgaacctgcacgaggcgacatgggttgagaagagttgctgcgactgagcggagtaacaccactgcccatgcccattcgtgggaatgagaatgcgctgcctatggatgcagggcgtgagttggataacgcaaaccgcatttcagacgtggtgcctggaggcaaacgggatggtgcaccaaaggcgcccatctggaaatctgaagtaggccccccacgagacgggttacgcgacgccggagtgcgggcagattgaggacgggatgagtcattatcgccgacagtctcacgtactcgcacgtcccagtcgacgga

SEQ ID NO: 1768 - DNA, 1510 bp, Emericella nidulans
gctccaccgcgctggcggccagatctagaactagtgcatcccctgcactgattgaatttcatgttaatctattccgtccacctcgatcttcaagtaccaatccgaacgccatcaaatataacggtatcattttctcgtagcgggcaacgagtaacccctcgtcatgaaatcagtggtttttaaactgtgagtctttagagtccttcgtgaagagactgctgatattgtcgttcgtccccatcaacttgcgccgcttcttcttttcattttcttcctccaaaacccgcgcggttagcattgccgtagctgcgttcttgatcccgtttggtgcggacggcgtcggcgtggacgtgttgcttcgacttgctgatgctgatggcggatccttcgaaagcgtagccttcgacgatgactctctgctggcagcattgctctcggctgccgttgttggggctacgtccgcatcggaattgcccttgttcttgcgcttcttcgagccaggggcttttttcaacgagtgggtgaggtgttgatcggctaaacgcttcaatcggtcaataagacgctgcttgtcgtcttcttttgtaggaagaatggggatgatgttttcttctgtgtagggttcgttgcactgtgactgttagtctcttgggccacttagatgtgggagatacaaacgaagacacacctgtaagcacttatcctgcttcaattgccgaaccgcctcctcagagaacacatgcccacatgggacaatataaaccgccttgacgcttggccccaactgtttcgccgtaacaggacagatccagccctcactctttccttctccattccctctagcggccgagttttcctccccctcagtatcaacttcgaacttcaattccacaacatctcgaagccccttgactcgtccagcgagaatctcctcacagtcggccttggagctgattccctcgacaacgtcctcgccgggcaagaggaatttcagaatcgcatctttattgtacaagttcccagcgcaatcagagacaatcggacgctgaagaggcttgtgcgagagtgggcaggtggtccaaaaatgtgtttgaagctcgcgctgtgtttctttaagttgtgctgtgctgggggtgcgggcggcttcacggacgagttcacggcgggttgggatgctgggacttgttaatgaatctaccgctatggctgcataaaacgactcacctgccaccgtcgttacccatagttgcagagactactttaatcagacttgatgctgcgtaggtaggatgtcatttcctccgtttctcaggtggcttgccacagcttgcgggatggtggatgactaagcgcatagttccccgatccccagattggcgtctccaaggtgtcaacagctggccagaacttggaactgaagctagggctgtcgagcatctccgcacttgccattgttggtggagtgtatcgttcacccggcatttgactcaccgcgttctgatgctgagga

SEQ ID NO: 1769 - DNA, 664 bp, Emericella nidulans
acgcacacgtggtgtttgatgactcaattctctgcagccgaaagctgttgcctgcatgaagtcacaaaggggcagggattttttcaccgctacgggcactgctccgagagtgtacaccgaataagataacaggcgatccagcagcccagggccagaaggattagacggactcgagagttatccctcaaggctactggaatgctcatctttggcagtgacatgatcacagatagccaaagcgttgcccgactcgcgtatgatactgccgctatagcgaggcatgctccgccgagaaacggtgacctttacgcttactttaggtgatacgctttctatgagggcagctataagatacgctcatgctcccagaatgtcagtattggtctttatttggatggaggtatacaggacagttgtcttggagatactttgcaatgacaacccacggtatgtatctagtgcatgcttatgatctcggtagactagcattccatgaggaggcgcctgatgcaccggacgcccgctgttgtatccagtgagatactgggacacaatgcatcgtggtggttgtagacggccattagctgtgaggactcttttgacagtttagtggccactgccggcccggcaagcaagccaccaaggcataggaatactcaaagtt

SEQ ID NO: 1770 - DNA, 3444 bp, Emericella nidulans
cccggctttatggtcggagccaaggccgagcacgccggcatcatcaagatgggcgctcagctcgtctcggctgtgagctgctctactgtgcctcacatctccatcatggtaggcgcgtcctacggagccggtaattatgccatgtgcggaagagcctataagcctcgcttcatctttacctggcccacgggccggtgcagcgtcatgggcccagatcagctatccggggtaatggagtctgtgcagcttcagagcgccaagtctaaaggtaaggtcctggagccgaccttgctgaagaaacaggtagagagtttccgccagagtgcggcgcgggatagtgagtgctacgcgaccagttccatgctcattgatgatggcatcattgacccgagggacacgagggacgttctagggatgtgcctcgaggtcgtcaatttgaatggggtcaagggaacggagacacatcatcttttagctagaatttaggtcttgtagcttttctatctagtatatagtctcgtcgaatttgaacgcttgcccctatccttactttaacaacgcccctccaatatcgaacctcagatcgacaaagtactattcctccccagagaatgggccacctcctgtcgttccggagtggagaatggtgatggtcgatctggagacggtccgacgagaatgcggtccgatatccgatgtccgaggtgctatccaagactaagtaacatagcaccttacacttgcagtgaaatcaaatagatatcgtcaggacacatctgagttacagtcgcatattttctactattgtgcttccattatggcaaatccctcccttaacggcgagaccgtccacgcggcacccttacggccgccactctacgtcgccccatcaccattaggcgaggatggccgaccgataatcaagaaggtcttgattgcaaaccgcggcgagatcgcctgtcgtattattcagacgtgtcacaagctcaacatagctaccgtcgcggtctacgtcaatgagtatgttctccctttttgcatgaagacacgttgtcgctaacagaagcagagacacatcatctcgccatattagagatgcagacgaggccattaatattggaagcattgatcaatgccctcgcaatccgttcctagatggagaactccttatccgcaccgctctgtctgtaaacgcggacgccatccatcccggatacggctatctcagtgagaacgctgagtttgctcggtccatccgcgacgcaggaatgatattcatcgggccaagtgataccgccatgtccactttgggcaacaagcgtgcggcaaaagagtacctcagcaagcatgcgccagatgtccccctaatacctggctacgtaggatcaagccaagacgcaccggagcttagtaggattgctgcacagatcggctttcctgtcatgctcaaggcgtctgctggcggtggtggcaagggaatgcgaatcatccgggaagctggacagttgcaagccgagttggagcgggcacagtctgaggccctgcgttctttcggatccgccgattgtattcttgagatgtacgttgagagcagcaaacatgttgagattcagctactgggagactcgtatggagaggttgtctcgttcttcgagcgcgattgttcagtgcaacgacgacatcagaaagtcatcgaggaaacgccgtgcacctttctgacggagaagacgaggcaagagatgagtgctaccgctgtgcgcattgccaaactccttggctacgaaaatgctggcaccgttgaattcgtcgtcgatgctgtgactggcaagttctatttcctcgaagtcaatgcccgtctccaggtcgagcatcccatcacggaggaggtgacaggcgtggacttggtctcgctgcagctctatgtagctgcagggggaagtctacgtgctctacctgcgctccaaggcctcacccaacaaggtcacgcaatcgaatgccgcctctgcgccgaagatccacgcaagaacttcttccctgagcatggcaagatccatttgtggctgccagcatccggcgtgctggggccaggccgtgatgttcgctacgaggctgcagtacagtcaggctcctcagtctcgatatatttcgactctatgattgcgaagattgtcgtctgggcaccgacaagagccctcgctatagagaaaatggtcaaagtcctcgcgcatacaatctgcgctggtgtccaaaccaatcagcttctgatgcagcgatgcctcctgcataaggcattccataaccctgcatacacaacgtctttcctcagcttacatctcgatgagctacttcacgagcctggtggcctaattgctgagatacgcaagtccctgccgatagtcccggcagttgctctgcgtcacctggccgccttatctgcgtctcaaaagcgtccttttcagaatgtgcggcggcgcttccgaaatcagcaccatgacccggtcaatctgcagtatgatgtcgttaccatggtcgactggccgtactctctaccggagacagacccgacgacaccactcatgtgcgtctggaccccggataacaccgggccatccgccactcaagaagcacacctgcttgctattcctgagattgatacctcaaacgacgtcaaaaagcctgcggggacaagtgcacgctaccagaaagttagcaaagtgctgcgagatgatctagtaaatctctcaggcacacggtacgccgtgaagattgagtcatggaagcctgcggagggggaccctgcactcaaggaatcatggctatcaagcaccttggaaatcagtatcaatggaacgaagctcctcgcctacgtatccgtggctatcaatcgactcgaagccctcgcagggtgtctcaatcgcacgcagactgtgttctgccatattccagcgattggagcgtccgtggagttcaagcgtgacacctctttatcctttgtcgagagcacgcgtgctgccgctagcggtgagaacaatcaggagcagaggactgtgactgcgccgatgccgtgtaaggtgctgtcaacgctcaagaagaacggggagcaggtcaaatcaggagacattgtaatggtgatcgagagcatgaagatggaggtgacgatcagtgcctctgcagatggtcagtttgagacaaattggaaggagggtgatgctgttgaggagggaaagactctgtgtactgttaagtaatatttagcattcgttcaatttaatatgcttaacgagttctggttgtcggatggggccactgtttcccgtcaatgtcgttctgcaatggcttacagcaggatcagtacgtgtttgtatacaggtagtcacgattcacgcaagtctcttctataaaatacccaatatgtcctaatatctacaacttgctcaactttcc

SEQ ID NO: 1771 - DNA, 5031 bp, Emericella nidulans
  unsure (1)..(5031): unsure at all n locations
cgaggtagagtctgttgtcggtagatggggtcgtggtgcctgggatacgcgtgaagaccctcgtcacagcatctctgacgtcgtcgtacttccaagtctccgggaacgattcgtcaaagtccttgctgtaaggcttccaccagagacctgagttaactgccgtgccgccgccaacgaggcatccggccatctggtcattatcggggcaggcaatgccatcgctgttcttccagatctcgttgcacagaccgggcacgtcgaaacgggtcagatcagtgccgttaagccagtctggcttcatggtgccgttccagagtccgatagagggtgggcccttttcgataagcagggtctttgcacccgcttcgctgagtcggtcggcaaggaccattccagcaggaccagagcccacgatgatgtagtcgtacgtgacgtttgtagggacaggcacgcctggggtcgtcccgttcccattatcaccaccgccgccaccatcagtaccgcaagtcccgtcgacgacgttggtcgcgagcgcacccgatgtctcgtagttggaggttgcagcgtcgccgctcagctttcctacccagatcccctgcgcctcgtgctggaccagactcaggtcatccgggcagtccgcgttcgtgggagactcctcggcctgcgcccaggcgaggatcagctgcccagcacttgtcgtggcgctaccggagacgccctcgtggtcccagcggagacactcttcgcaacggaagaggacctcgaacttgtcggcagtgacggtcgacgagatctgagtgagggtcgcgttgccgctgtagactgagggcatagcgtaaccggaggagaagcggaaggaggtcaagacggtgtcgtcctgcgcgtaggcgacgagcaacaggttactgttcatcgaggagcccatagagagaccgcaccagccggtgaactcgctcgtgctagatgagctgcaggactgccgatctgtcagcatctctgcccttctatttcgcatcctgcgacattgtcaaccgggcagaacaggatgacgcaccaggtatccgatgaactctgtagcatccgtatcaagcgcatcctcagggagggagacaccgaaggnaacccggccgacgacgagctcgcctcgacagtccaggtgtcgaagacgatcccggtgtcggggtctgtgtaaacagttgggtctccagactgggcgaagcatggctggaggactgaatcgctctgctgttaatatcaatccaattgagggttagggcttagacataccagaaccagccgccaccagggcagcgaatgaacgaaggaatgaatgcatgtcggagacagggggtttaaagagaaggtaaaagaaacgaaggaagggaggcaatcgtcaccaggacgagcaaaacaaagtgaactgcaaccttggcaaagagcaattgcagatagtgagcatccctggtcgagcgcatgggttggaggaatatatagctggccgacggtgagcagtgaccattccgagcagcctcaacctgcaacaacaaacccaccgcaaatgaaacgggcacatttaagcacccgcttgatttccatatcgtcccaggaaaggagcgatccccttcggcatattgcacggcaagcagggctgcgagtgcaggcctctccaactccagacgccaagaccgcagggtgtcgcaccttaaccgggcctgtctcatcttaagagccgtctctaattaggttcattccgcggcgaatacggttctggaatcatgacgggtttcccagctagggttgttttatgttgagcttgggttgggtccggcgtctctatgcgaaacggctcttatggaccgtgccccgagtcgggcgggtgggcgacgatcacttcagaataaattaaagcccatccaggagagagcgaataaggggcgtttgattacggataagaggctaggctcatacagggtggactgctggttaagtagtgatgaatgttaaaacgatggagtgatagagcaagaaatatgtacaggaaaagccagatatcatgcgtgctatgctcccaaaaataaaaactaaaaatgatacagatacccagactatgcaaagaggaagacgacgggatagatgaagggtgggatgttgctaatgtacagcgtactcgattgtgccaagtggtgcgggcggtggggatcgctctcggcgcctcagcattaccgtcggtgtcggtgttgctgtcactgtgatttcggtgattgctgcatgggaggatggggcccgaactggatctatcggcgactcgtagtgagtctggtcgtggcccacgtagagcagaggcactgtgagaagccgagacctggcgccaaggctagggtgggtggggatgctcatgtccatatttgaaacggacgaggctaatcatcaaccttccctgaccggtcacggcttcttatagccataccgccggtggttgtctgcaatccaccattcggccatatgtgcagcgtcgcgtgcccaacgcacgacctctggctcccaaggtgcatcttcgggatgcggacgagacggcgtgatcgtgatgggaggcggaggagggccgccgcctggagggggagggtggtgagggtgatgcccggggggaggtggaggaggagggtgtttgaagaattcatgaccatcgcgctcgacgggctcttcgtcatgctcttcgggagtattgctcttgtcatcccgatactcgcgccaaagcgtatccatgagatcgaagaagctgaagctcgtcaacggcttcgtctcctggggatccttttcgatgtcggtgaaccgccactcgacgtcgtcgatgagcgggacgactatgcgccactgaggccgtgcggccgaccggacggcgagccacgacccgccagtattcatgacgctgaactgccagtcctgcatgccgtttgcctcttggaagagtgggcggatgagagattggccctcgtagagcccgcggatgtcccgtgccgcttgtgtggagttggggccaagagaagaggattcgatcagtaggtcgatgatggtggggacgatctgaagggaaatgacagggtccttcacttcgatagatggtagtttcgggtgcgccaaaacgatggggacgtggaaggagccaatgtgcgggttgctgtagggcgtaatcccgccgtcgttggggagggagaggccgtggtcgcccgccatcacgaggagggtctcattacggacgcctttttcctccaggatatcgaggatctgagcgatccagcggtctgcaaacccgatcgtattcagatacttgttcatatcgttgttcttgcccttgaaggacgggcccatgatgttctcgtagttgtcgtccggcatgccccaggggtggtgcgttgttccggtgagatgggcgaggaagagacgcttattgttctcctccgcgtcgtcgaaggcgtcacggatgtactccttcagctctgtatccgggtagccatagtagttgacctctttcgacttgaccgggtagtgctttgcacccgggttctctatgcgctctttggtatagatatctcggaagcccaatcgtggcgtcaggagatcctgatggtcataggtgtctgtgaccgactgcatccagatcgactcccatggccaggtgcggtaatccgagccgttggtgatgtcggcctggtggctgagtgcattgacgacgtgcggcatgcacgggttgtacaagtgatacttgtactcgcggttaaagtcggcgacaagcggtgagatcccacacaccgttccggccaccgatttgatggtatatgtccctgtcgtgaaggcgttgctggcgctgatcccgccgtacgatttacgctcgccgtcgcggtactggtcaaagccagagtcgaacccagtcagatactcggccgtgcgagtgaggttggccactgttcgtacagcactctctggcatttcctttccgtcaaacgagtccacgatcttattccacatgaaggagccgttgcgcagaggaaagacatcgcctcgcgtgctctcgagtttgaggaggatgacatgcttgatgttcacctcgccgctggccaggacgtcctttagttcgtccaggaccggtgcctggaggttcgacagatgcagcgggtcttgcgacggagtataatgctcgcgcttgttgtgccagtccctgaacccaggcagtgtctcctccggcatccagtcccagttggggggcttgccaagcgacgtcttaccctcaagccaggcgtagtcggggatattccccgcctgctcgcccaacgttggacggtgcattccagcaaacggcgtcatcggaagggcgctggagaggaaaatatacgacgggtacggtggccgcacgctacgcaggaggcccagacaaagcaatggcaaccagaccaccagccgtttgatgagcgatatgcgctgcggcggcctctgggaataatccgaatattcatcctcctcgtcgctcttgtagtcgtgataatcctcgacggcgatctgctcgtagacgtccgggtcgggcagcgtctcgctgccgagccgcctgcgccagatccgcgacgacaggctggcagcgcgggtgaacagcggtctaaacaggatcttgaacggctcggcgagtatatgcaatacgccgccgacgagccggtgcaggaaaggggcaacaagccaggcgatgaccgtcatgatcgcctcgacgatcaagaatccggtcaagcccgtgagcagagtgcggatcgccgccgcatcgcggtggaacgatttcgcctgtcgccaattgatctcagcaccggcggtgacgaagaacgagatattggccgaggccattccggacatggtcagactaacacaaacaacataattagccacgcagttatctctgaagcagaaaccaagtacctaaaagaaatcacgaccagcgccgccagagcgtccagccatcgccacgggaattttgggtcagatccggacgtagac

SEQ ID NO: 1772 - DNA, 2553 bp, Emericella nidulans
atcgccattgccatccatatttctgcatacatcatgagcagtgtctcttctacgggatatattggctctttcccaccactgccggtctttcctggctaagaaaaatgcgtatccacgcgtgttcttgacatcatggctgctgcgtttgccgcattgcgccatatataatttgatatccgcatatttcctcaaagcaagcaagcactcagcgccatcgaggtcttccttggtgaggttagcaccactgaattgcagggcctcctcgcaacaactagtgcaggcattttcactagctgtattgcatatgctagtcacagggggatgcctgaatatagaggaggggttagacgcggggagcacggtatctccatcagcttgattggtactatgagtgctacctgtcccaaaagaactggtattgcctttcccgttaaacggaggagagcttggtgtagagcgcgcggcagtcaagtcactctgagcaaaggaatcgtaatttcgatgtgatgcgtttgttgagctatctgttatgcttggaatcaccgggaattctttctgccgcgaggtctccggacacagaagcagagggaggtctagagaacaagccagaggctatgatctgcctgccaacgcgcagtctcctagctccggcgattcttaccgagaaaccgccgtcatgatcggaaagtaaactagtgttagaagcacctgcatttacgcttgctcctcttctgactgaagcaggcctagaactaactccctcgttcgtactttcgcatgctctccctctaaccgcagcatgtatacacctaggcctagcgctgcccacatttacagcagtaactcgtgccctcctggatccgttagcaggagcaacatcgtggtgtgattcatggtcgcagtgatgagaacatctttcgccatcccttctatgcatgcattttggatcggctgggcatgtaccatgacaagtctgccagtcgcaatgctcgcagccgaccatgctgccctttgtgtttcgtttcccgcagacatcgcattttgccgttgatgcttggatctttttccacttgcatttgaagtgatcagaaggtggtaaaggaggaacagtttgcgagaaagtcctggcttctcttctgtctttggtgggcattatgatgctttaaccaggatctgagcaggctggggtcagacttggagaaaagtaggtaggactaggaagtacgcgtgtgtcgtgctcaactagaaatattagagaagacctgtgctttggaaacactaagccagggagactcagaacagtcttcaggaaacattgggattaaatatgatgttggtatgagggaggtcttgaagatgaatgggttggaagaataagtaggagaaaccgcatcgaacagggcggatagtagtgtaaacggctcactgaaagccagaactacaaagcaaccagctcttacagaaaagaattttagtcccggtgttgtcatccttgtggttctcaggaaaaaaaaatctctctatccatgggcctggggaggtagcaaccgtgagcgagacggatatacacgatctgtcttttgtttataagatatggagaaactaagagcgttatattgattctataggcatatatcaggagggctctcttatcctttgttgagattcaaacctggctccgggtaaaggagttacttctgcaagaaaatggcgttcccaactttaaaagaactcagcgttgttctaagtatgggtacgacatccttagggcagggaaagcggaaaagatcataaagtatattctgatgttattggggattttatttatctcttttcaatcagctcatcatgaaatctcatcaacaggcgtcatttttgcgtgaacccaagacttctaatgtctatttgtgagctgtgaagatgaaatttgttagctgagcgctccagagcaggatttatttccagaacttacggattccctcctcgggctggggctggatgccaacaacctcggctgccgacttgccctcagccgcggtcttatcatccttcatgaaggggaaggcaagaacctccttgatgctgtagttatccgtcaagaacataaccaagcggtcaatgcccataccccaaccacctgtgggaggcagaccatactccaagctagtacagaagttctcgtcgataatctgagcctcgtcgtcaccctggtccttctggcgagcctgctcctcgaagcggagacgctggtcgaaggggtcgttcaactcagtgtaagcattgacaatttcctttttgcagacgaatgcctcaaaacgctcgcagagaccagcgttctggcggtggtacttggccagaggagacatcatttgagggtggccagtgatgaaggtggggttaatgcatgtttcttcaataaactcgccaacgagcttgtcaagcatacgggcgttggtgaggggcggtgagcactcgactccagtcttctttaggaccttcttgaggaactcgccagtttcagcagtgtgcagctggtcaccgggtgggaacttc

SEQ ID NO: 1773 - DNA, 2096 bp, Emericella nidulans
ctgaccaagaagctcgctaatgtatgatctaatcatgtcagcgatatccaccttcagtattataatcgacgtactctgttcaataaactttgtcatattgcgtactgacaggacatatgatagtgtcctcagtacgacctgatagaacgctatccacgataaagctgaggataccgaactttggcgacagcagcttgccggttcgtgaccgtccaccttcgatgaaacactcaaaattataccccttctgcagaattgtgtcgatatacgcttggacaacggtattgtacagtggatcattcccgaaacttcgccgaatccacatggcgcctgcgtgttgtagaaaagctcccacaaaagggatattgaggttgtctccggcgacgacaacgggcaacgcaatgcctaatcgatagcagataatctggagcgaaacatagtcgacatgcgatttgtggcaaggcagaaagacgatggactgcttcttcttggccgcctcttctgcaaccgcacgtagccgcagaatttcctcactggatacgtggatgcctggaaaaatcagcatataggacaaaataccacccaatatacttaccctggtggtatgctcgagtgagaagctggctagcaaggtagtatgcgccgcgaataaacctcttgctctccattttgcagatcatgttatccaacatctggtccaccacctcgttaagattactctcgagttccttccgacgttgcgtgtgagtacgcgcaaactcgccagtcctgatctgtaaaagcccttctttgtcttccacctccagtcgcgcctctgcgagctcttttaccttctcccgcaggatcggactcgccaggatatgcgatttgatctgctccgtaaaaccagaatagtatatcggctgcccaatgatatcatcgtaggcgcgccagccggtccccgacatcatgtacgagctcacttcgcgcaagaagtcgaacgggttctcacgaaaccgcgccatattattgatgagattgcgttccgtaatccctccatcttgcggctctggacctccagtgtaaccgctgggatgaattgtaacctgatcaccaacgatttcaaggtctggggcggattcacccacagatgacttcgccggcgacatcgtcgcgtgaggggttcggctgcggggacgggcgaaggaacgaggatgggtaattcaagcagaggaagctttggaagtgtcagactttgcagacgtaggaggttgagagacccatgtcatggtagacgaggaccgtgaccgggaaaccccctctccgcagcagcagctaaagtcccaacaaattgctgtgatcgaccgggtcgccatttgccccagactgtctccgtggccccgacatccgaggatgctgatcacgtggctagctcccgcggctatctttgcctggattcctgcggtgtccatcagggcattctactgtgtgctgctttgaacgctgcaaacgtgggcacgacagtgattaatatgtcaagatttgtgtgaagaaaaacacttatctctggatggcccgccgatttcgtagtctttccggtacaacgtgaatttcgctggaacactgacaaccctggcacctcggtggccaaccaagctcaaaggatcgtctccaaaccatcgccatgtttcggcaagcaagactactgtcaagtacggtgctcaacactgtttattgaatcaagtaatctaattttatctcaagatgccagctcgctttctagaactcttattcacagtcactcctccctcgtccgccactactcgtttaaagtcttccgcgatgtcccacctctccgaagccttcgccgcgagctcctgctctccaagcgcactgttggcctcgtgcctacaatgggtgccctgcatgaaggtcacctctctctgatccgtcaggctgcctccgaaaacaccgacgtcgtcgtgagcatattcgttaatcccacacaattcggggtcaacgaggatctctccagctacccgcgaacgtaggacgccgatgttgcaaaattagaagaattgaacacagagggtagcgctaagacagaaatcggtgta

SEQ ID NO: 1774 - DNA, 5111 bp, Emericella nidulans
cacagcctgcgctgaggtaggcaggccatcaggttcggtcagacaggccgtgattgacgtgaccgtcggaagcacccgccagcctgcccgctgtattaattgctcgtaacttcttaccattactctacactcaaaacactacgttgacgagactttagctggcccggatgataatactcaagttattgttatccgcgccgcgatgaaagagaaggctattatgtctccctccgagacaactccacttcttgtgccggtccaggtcgctccccagcgccaccgatatcctcatgacaagctacgccgagcctgcagttattccctaagtctaatcctcgcagtagcccttgtcttattcctattccctcaggctcttttcccccgtgagggcggttcgctctggtcgtatcttcctggcgcacagccttaccccaatacctggccgagcggcaacggccttgatcaggaggagctccagaccctcctcctgggtaccccgtctgcggcccgtgcccgcgaatggagcaagtattatacttcaggaccccatcttacaggtaaaaacctcagccaggcgctgtggacaaaggagcgttgggaagaattcggcatcgctgataccaagatcgctacttatgacgtttatctcaactaccctctcgaccatcggctggctttataccaaggcggtaacatcagctatgaagcttcgctggaagaggatgtcctagaggaagatagtaccagcggtttacccgatcgcgtaccgaccttccacggatattcagcaagtggaaacgtcacggcttcgttcgtctttgtcaactttggcacctatgccgactttgaggacctggtcaatgcgaatgttagtctctctggcaagattgcgattgccaagtatggtcgcgtcttccgtggtctgaaagtaaagagagcgcaagagcttggcatggttggcgtggttctgtatgatgatccacaaacagatggagagtacacggaagagaatggttacaaaccatatcccgaaggcccggcgaggaaccccagtgctgttcagcggggtagtacccaattcttgagtgagttgcaccttttagttcctgactgcagtgaataacaggtataggctttgctcccggtgaccctactactcccggctatccatccaagcctggttgtgagaggcaggatcctcatcactttattccatctatcccgtcaattcccgtttccaatagggacgttcttcctcttctcaaggcccttaacggccatggtccaaaggcatccgacttcaatgaggcgtggcaaggcggtggtcttgcatataagggcgtggagtataacatcggaccttcgccggatgatcttgtcatcaacctgtataatgagcaggaatacgtgactactcctctatggaacgtcatcggtgttattccaggctcgcttcctgataccatcattctgggcaaccatcgcgatgcctggattgccggcggtgcgggagatccaaacagtggctcggctgtgctgaacgaggtcgttcgtagctttggtgaagctcggcgcgctggctggaagccgctccgtactattgtctttgccagctgggatggtgaagagtatgggctactaggttccacagagtgggtagaagatcatctcccctggctttccaaatccaatgttgcgtacctgaacgttgatgtcgccgcgtctggaacccggcttgcccccaacgcaagcccgcttttgaataagctcatttacgaaatcactggccttgttcagtcacccaaccagaccgttccgggacagactgtccgtgatgtctgggatggttacattggaacaatgggtagtggcagtgatttcactgcgttccaggacttcgctggcattcctagttacgatctcggatttagccccagcagccaagaccctgtctaccattaccactccaattacgacagttttgactggatgcagcgattcggcgaccctgattggctttatcatgaagcatgcgccaagatctgggctctggccgccgcgaagctagccgaaactcccgttttattctttaatgccactgactacagccttgggttggaggagtatgtggatcggatcagacctgctgcggacaatcttccgaacggcctgacttttgacttcggtcctctctacgaagcgattagcaggttgcagaagacggcaattgagttcgatgcctatgcagcggacctgacgtcccagctcacggaggagcttccatggtatctctggtggaaaaaagtccggttgttcttcctgatccatgaggtcaacactaagtacaaaaatatcgaacgccaattcctgtaccagcagggattagacggacgtagctggttcaagcacgtggtatttgcccctggtctctggactggttacgccggtgcttacataccccggtattgtggagagcctggaagctggagacgtagctaacgccgcggtaagtggctaattcagttgtctccgttccatatgagtatgctaacgttaacatcaacctagaaatggcagtatatcgtcattgagcgcgtcaaggctgcaacaaaactgctccagtagaaggcgctctgagtgtgcgtgcatgaaggcctgcttagccaagcagggatcgagacccatcccatgcagatacgatgaatcacacagtcggcagttgtcgaatcccgcgaatgtacaaacttaggcgccccatctgaaatttattgagccatctccattgagaccacttgtctaaggttcgatgtatgcagacttattagccagttgatatatatatatagagagagagagcacgtcgtcttcagaaccggcgcgatcggtttctggggtacaacatcgatacgggcgctcggatctctgtaaagaaaaaatgctgtgaaacctcagaaatggtatgggttgattagccgggttgcgaatgcagtcaccttctacatcatatattggctttctttcgcagatattaagacttcgccggcttcagaggtacggttgctggggcattgtatataaacaacctccatcggctcgactccgctgctccgcttaaagagttagacaatctcaattagcagctggcaacggacagattaggacccaagctgtagaaagaagcggtatgataagaggaggcactcaccatgaatcaatctcatccaaaagtgaaggatcgcaaaaagaggggaagatcacttgacgcagcctggctctctgtgcggaaaagcggcagagcagcaatcacgacagcttctccaagtcttgagtccttagctctagactttcttcttctcttcacactatcttctttttgccttcccatttttatcttttatttttgttcgtttctgttttcctttcaaaaagcctcgttgtccgaagatctttagctgtctccacagcatctactcgcttctcagttcctgcctgctctttgaatgcatgcaagcactcccaagctgccagttcggcagcttctcattctctgtaagaggctgaccgtgcccccaacaagttagatcttctgctaaaggctgtgcgcgcacgaatatgtcgctttgcagaacctagtacgtgatcgagccttgccctcagtttcaagacacggctaaactggtcttatcggacagtcgccgtgacttcgtacctaccgtaccttgtaggcttctctgttcatttttccttcggccctagtcactgcgctaacgggaacagcctgaaatgattgaaagcgtcggcgtcccgcaatctgaagtcgcaaaatgggcgggtcttacctcggccatctcgtccttttcccaggccgctatggccgtttactggggtacggcttcagaccgtttcgggcgcaagcccatcatcctgctcggactcactgccaccatggtcctgtctctagctttcggtctgtcgaaatcgctgcctatgctcatcacgtgccgcggtatgatcggcttcatgaatgggaatgttggcattatacgcactatggtggcagagatggtacaggataaggagctgcagcctagagcgttcagtataatgcccatggtttggactattgggagtatttttggtccatcgtttggagggtctcttgcaaggccgacggagaagtatcctgagatttttggccactcttggttttttaaggagtatccgtttgttctgcccaatatggttgctgggtttttctttattattggtatctcgaccgggttcttgtttctacatgtatgttatcccttctatgttagagcgccgctaacatggttaggaaactctacacacaaaacaaggttatcgtgattccggtctggtccttggccagatgctcactggcctttgcaccggtaattgccggaaggtcacaaaaaggttggaggatgatgagacgacccctttgcttggggagcgcttgcctgcatccaaacaccagatcaaggccgaagtgaaaaagcacagctggagagaggtgcttaatccgcagtccgttttaattctcttagcatacaccctaatgtcagtgcacacgatggcgtttgagtctgttcttccagtattcctgcacacacctgtgcagcacctccaggacaatccagacgtccagctgcctttcaagttcgtgggtggatttggcttgtgtgagtacctagccattcgccctctaccctaccataaattaactcagtaccttcagactcccagagaatcggctttttctacaccataacgggctgcatcggcatagtaatgcaattctacgtctttcccttttgcgcaaacgctttcgtgtcctaactgcgtaaagcctagccgccgttttcccatatctacccctgacgccttaatagcgcttgcccggatttttccgagaatcttatatggctttaatttgtccaactaccgatcgattttaacttccggtttacaatttgttaccaattccaaggtggctagttttttggaccttatgggtttcacagtataacccctgggaccccgtgggctgcatctggccattttttcttgggtaggttgttttaatt

SEQ ID NO: 1775 - DNA, 4663 bp, Emericella nidulans
aaaatataaacaggaaggggggacacagtaataggaagcgaaaaaaattcactttataaaaataggctttaagggtttcgttcccccaagtacaactttgcccaaggtaatgaaggccgccataaaagggttctttaaagttggctcagcagccttgagggttacacaaaaggggcaaaacttttagcaggcgtcctcgaacggttctaacggggaagaaagcttcaaaagccctaagtcagatggtgcatggccaacccccgtttagacaaagtggttgagtggatcacaaaaaggattgttccagtgacttcattctagcacctatttgcaggttcggtatttgctggatcttcatgaacgaaaagaccgctgcaggtaatctcgcacaacggaagacaactcgtgaaaatcttctgcaagccatagcccctccttgcgagcgaagaaaaatgcatgaggaccaagacttacgctatcgtgtatctatatggttcccggcattgccgtccgtaacaaagcggcgcagccgaggtgtctcgggctcccggctcgttcatctcagatgcatgcttgttacatggaagagtcgatcgtctaaggcgaggtgatattgagcgaggagtctatttagttttgattctggtacttcaatgcttatctgcgggttgaagcttttttaaagtcaatggaacgagcttgttgaaagtctagaacagaggaccttgagcattagctgcagactttccaatcctctccgttctctgaccgatcatcatagcctctcacgcatctcatttacagacaaattgccaccaaatatgaatgtccagaaccttggaatttccttgccttgctgaatggttgtttgaagaataagtaggtgtatgcatcgtttatgatgtggcatttagtgttgaagttatacttatcgaacggatgcataagtaaataagcaagagaacaattcaagagatgcattaaaattcaatattaaatcgttgttgagaacgcctttttctgcagatcccgtctatcgcgtgttcatcaagataatatcataatgtgatggtagcgccttttccacttgaagagtaatgtaagtagaataagcaaagcaaagtctaagacgttaagtcaaggacaacgggggtatagaaggttgaatcctaagtaatgataatagatgaagtcgaagagattttattgccaattggcgagagtagtgccagagggacatttatgagcgtccagaagtgtaggtttgcttggggaaggggtagctgtgttattattagcatgagtgctcctaagtgcttctgatattcaaagagggaactcacgaaggtcccaactcttggatgctcaacttcgcgagccactggccgaggtcgacgctctcttcaagggatttgccctgcacaactccggcgacgaaaccaccggcaaaagcatcactagagcgcgaatcgtcagatgtgttcagcgtagccagcttgaaaacttacccagcaccgttggtgtcattaatggcgtccttcgaaatttcgtgcacagggaactccttgacttcgacttcaccgctggtggtaacagtagcggtgatggtgggcagagtgccctgggtcacaacggcaattcgggagcggttggtgttcttcttgggcagctgagccagcttcttcgcaatctcgacaatgtcggtggtgccccattcgtggctctcggcgtaagcaacagcctctgtctcgttgcagaatgtgtagtcggtgtaggggaggacactgtcaagctggtccttgaagaactggggaatgaagggagcggagagagacagcataaagacctaatgagtcaggcttgattagcggagtctcaagccgtaagatacggacccagtgtttcataccttgttcttcgcagcggcctcttcacctagggcctggatcgcggggacacagactgtcaagtggtagccaccaacatagtagtactgggccttctcgacaagcgaccagatgtgaggctgcttgagatggtccaccttgtattcgttggctgcagcaaggtgagtgcacatgctgcggttgtggccggtaataatgacaccgcacttgccagtgggctgagcatcatcgacgcggtactcggtgtggacaccagccttcttgcaggcgtcctggaggatgtcggcgtacttgtccttaccgacacagccaatgtagagagtcgagttatccggaaggatgtactatgagcaattgaatcagcaattgtcatatgcagatatcacaaacgaaggcggattacctgagcgccacgagcagtgttctgagcggcaccaccagcaatcagcttggcatcacggtgctggagcaattcttcgtagaggcccatgtgcttctcttcggcaaggatagcatcgttggctttgagtccatacttctcgaggagagagtcgtcactatcgccgttattagttgggcccaatgccaacaaattagcgcctttgttcaacatacccgacagcttggatatctgagcgaagcacaagaagcatcagtaatttgttgtgccaggcaggttgggataaaaacggcttgtccatgcaagggatctatttacgcacccagaagggggttctccaagcagaggagagggtagccttggggagcagccataactgttaattctccgcaccgagatttctttttcttaaaaagaaaaaaaaagaagaagaagaagaagaatgtggtatagactcaaaagagggaggaatgacaggatgagaggagagtgagagggatggcggggagtcgcccggcctaaagaattactatggaggggcagcagatgaacacctgaaactccaggccgcaatatttcatccggtgcagccgctttgaggcttctgattggctttggggagcaccagaacatcatctcagtcggagtccggagttgcgcattcttctagtcttctgccctgaagaagaccccccaaacaagtacgagtctctgggtccttcccatgatacatgcccaaaatgtcagatcacgctattcaagtcgcggaaaccatccagacggcatccgtcaaccgagcgccatccgctgcccgcgacatcaacaatccgacctcagccccggagaaggccgcagtcgagcttactccttctgatgctgacagcataccttcggacctcgttgatccccatcgagcactccggccgatctcgcgccgacatacgctccctcccttacctgatttacggttcgagcagagctatctttcaagcctaagaggcgcggatacatgggggcgggtagcgtggatcaccatcagagaccaggtacggacgcctcttctagtccattcccaaatacttcgattggaattgttaagcactccaaaaagggaaaaccatgtctgactcaacttacatctaggttctgttaccgcttgttcaaggaacgctgtggacacttgcgctctcgggttggcgattctggaaccgtacagcgtccctcagcgggcagactctgggtagcagggttaggagatggtggtatgaggtcaacaactggaaacttcctcctcttatatcgaagaatcccaagacagcggccgcgcaggtagaagacgtatgtggtccacgcgatgttttcaaggttgactgactggtttccgcgaaggatgctgacactgagggagttcttacagttctatactgcgcaattttccaatgctggcgccgattaaagccttgcttgttgtattcaaaggactaagtgatggtcatttctcgtgtttggcattcctggcgtttaggttgcaaacctttgttcaatttcgctcatatattaagcaatatttattacttcggagttcagaaggtcctcagaatcacatttggtacacatcaaagtacagcatccttcagcaccgcgctaactacccactttagatggtcataataaaaaatcaagcatgtctatcaagaacatctccggcctggcactcaagtatgacagcccgttgccattgagtttcaagatcacaagaattccccattcaagtcacaagcttttctagatactgaacactctaatcccagtacaacctttattgcgcccttgacaaaacagtaccagaacaccatttgcttagacaaagtcttgatattaccagacacttcatgtaatgtgtaagtggctttacccagccagaattgttagactgtcccatcaggttgttgaactgaaggcatcgtagtgccaacggggccaccaagaccctgtgtggccccgccacttgaagccagaggagctgaagtagcaggtgtttcggcaggggcgttcttggtgtcaaggctagctggtgtttccggaatggaatcctggggcgcgttatccactggcgcgggctgttgcaaaccagttgtggccgccttctgactatcagaggtagtttgtactttttgttctccagtattgttatcatcaccctgtttgccgtccctgagttggacaacaaggctcggaggtttcccgttcatcaccgattcatctccactcacgtcctcaaaaaaatcgccttcgaaatcattttcgtcttcctcctcgccaccctgccagtcgtttccgctggactgtgcgtcgt

SEQ ID NO: 1776 - DNA, 1651 bp, Emericella nidulans
tggccgtaacacgcgggaaccgtcctggtgtgagacggcggaggacatcctggtaagtggtcgaggtatgattgaatgtagatgcaaataaagatacagctcacatcgatccggaaacttctgcacagaacagaggtgcagacaatccgagtaagcttgtttatgaatacttcctgcggtggacacggcagtgacggcagggctgagttcttatgttggagtgggcccggcataacatagcatcatagtcctcgcgagggctgccctgaacagggatcatcgcggacttggccactcaggaataacctcctggtttcctcaggatgacctttgccccgtagcccatgcaggaatacgaccggacgaaccggtgccattgattccggaatactgagcctgagaccaggtttccgagactctggttcctcacgcttcgcgcgttccgcctgtgcatgtgcattgattgattactactggttatttatccacttcataagtgatcgctcggcgcggtaattgttacgtagtgagacgactgacacagtccagctgacacttccaacattgctgcctgacattccaggaattttaaagaataagctattccacgtgatacaccctgagctaatcctcaactggaaggagcgccaagagctggacagccagatcgcattcaatcacgcagcgactcggccaggctcacctgtgctccatatcttcattgcttcaccttcgttttaccccgggattgcgtggactggcttcttcgcatctctcttacatcttcaggtcgcttcttgctccagtctccttttccgcgttttttacctttcccgcgggggatctttgtggccgccgccatggcatcccgtgagtttctgcccgttgtttgatccccaccactcctattcctggcctcagctgcagttcggttttgctcacaacaagttacccggatcaatccagtgaagcaattcattcgcaatgttcggtcagccaatactattgcagacgaacgagcagtcatccaaaaagaaagttccgccatccgtgcgtcgttcaggaaagaaagccatgattcgagcattcggttagcattcacaactatactctactatatgcttcgctttgaaccaatatctcatatgtccggacaggagaaacaacgtcgctaagctactttacctattcacactcggcgagcgtacacatttcggccagattgaatgtctgaaattattagcgtctcatcggttcgccgacaaaaggttgggttatttaggcacgatgttgttgctggacgaaaaccaagaggtcttgactctggtgacgaattcgctgaaaaagtgagtggtctctgagttcttcgtccgctcactcgtctgatctcttcatattctagtgatctcaaccactccaaccaatatatcgtcggtctatccctctgcactttgggcaacatcgcttccgtggagatgtctcgtgacctgttcaccgaagttgaatctctcctttccaccgccaacccctacattcggcgaaaagcagctttgtgcgctatgcgcatctgtcgcaaagttcccgatttgcaggagcacttccttgaaaaggcaaagaacttgttgtcggataggaatcacggtgtccttct

SEQ ID NO: 1777 - DNA, 4121 bp, Emericella nidulans
ggactgcctagttttgccccaggctcacatgtcatccaacccggcgtctcatagcttacagaggcgatgttgtgtgttttcacggccttccacggggggcgccatgggccatcagtcatttttcacacaagttccttcagccgctggagttcctagagatccacgacctctccgagacagatctttccaggcacgcattgcgcaggaactgcttgagtatttaactcataataattttgagcttgaaatgaagcattcacttggccaaaatactcttcgatcgccaactcaaaaggatttcaattacatcttccaatggctgtaccatcgaatcgacccgggttaccggttccaaaaggcaatggatgcggaggtcccaccaattctaaaacagctgcgctatccatacgaaaagggtatcacgaaatcgcagatagcggctgttggaggtcagaattggcctacatttttagggatgctccattggttgatggaactagcacaaatgatggatcgattcgccatgggagaatatgatgaagcctgcgcggagatgggagtggacgtctcgggagatcgaatcatcttccggttcctcacaggcgcctaccatgattggctacaagggggagaggaagaggatgacgatgctgctgcgcaaaggttgataccccacattgaacttatggctcaggagtttgagaaaggcaatgagaagtacgttcaggaaatgcaggttttggatgccgaaaacagggcactacgcgatcaaattgaggagctggagaagaacgccccggatatggctaagcttgacaagcagttcagaattctcgaggacgacaagaggaaattcgaagactatattcagaacgtgcagggcaagatcgagaagtatgagagtcggattgctttcctggaggacgagatcagaaagacagagtcggagctgcaagccgcagaagaagaacgggcgggacttcaagctagcgtcgatcaacaaggcctaaccattcaagatatcgaccgcatgaacactgaacgtgaccggcttcagaggagtcttgatgatgccgtcagtcgtctggaagagacacatgcgcgtgtgatggccaaagagtccgaagccagcgcgaagctcgaggatttagaggaactcgtcaagacctacaatacgctgggataccagaacagtctcatcccgtcaactgccgtcaatgcgaacggacaagaatatgagctgggcctaaatgtgaacgagcgtagtttctccacatcgcagattggtggcattcctagcaggatctctccagaagcagataggcttctagccgagcctttcactggctatcatccagcacatctgttgaacttggaccttcgaggtattgttcgcagtaatctccaggcactccgcaaggagataaacgagcggagaaagcgtggtattgacgcggatctggaaagacggaacctgttggacaacattaaagaggccatggatgagaaacggagtgaagtcgaggccctggaacataagcgacgcacagcggaggaagaatttgagaggctcaaagaggtgacaactacccagaaactcgcctcagatgcacagattgagaaaatggagaaggagctggcaaagatgcgagccacgatgagtgagagcgttcagctgatggagcagcgcgaaatgaacactaacatcgagtatgaacaactcacactacgggcaaatgcactccgggaggaactacataccaacgtcgagagtatgttgaatgacgttatccggtttaaggtccatatacaaaaaggtctagaagactacgagaactttgtggtggatgaagtagaacaagagttgggtggcgacacgcaattggacgaggatgccccaatgtcaaccgaggaactctgaaggccacaagacgcaacacgatcaccttcacctacactactgctggacttcgctcacgtgctttagcacaccatgctccaatacagtacatcgatcccggctagttgagttctccggatgacactgatgacgtgcccaacatggtcatgaatgcggtagttgaaatctgcgctcaactggttggccagcagcacttgtctggggtttgctattgcaattcctccttcttgaggaactacgggggtgctttctttgatgagcgcccatgatactggtgtcggatacttagcacctcctgataccggcaacatgtgatgttaatcggtgtattagcatcttggtatcgtttggcgccattttcttgattttgtggacgggactttcgtctcttttgctcagctttaccttttttttttttggacggatacatgcttgtatggtttgctttaggagattatggacattatggagagtctgataccatttgtgctttggtttggtgctatacggtttcatttggttatacatattctaccaggtcactggagttcaatgtcaatgacaacatatattccacaccacatccacatgcccaactcccaggttccacgcaagctgagtcacaaatcttccgcgcgtactctcctaatcactcgataagttctgtccgagcaggcccaatcaccggcatgcttgagatatacaccggccacactaggacgcagggctacgacctttgaacttacctttctacaatagcttcggtttatttctcaccatattcaaggcctagatgttatcgggttgggagggccaaaccacgcgcctgtcttctcaacaacgaccatataaagcgctgtgctgccggccctccgattcccatctatcattctcagcaggacctccgctctgttctcaagctcatttacaacttctagtctaccgtctttccaccaacatgaagtccttgactattctgggtgctgtctcggcccttttcctgggcagggcaacggctcaaataactgttgtgcgtgcaatgccagaacattcattcatgtttgtgtgttcactgacagatttacagactattcctccttttccagatcttcctaccatgtctataccgaccttgactctcccaaccagtatatctcttccttccctcccaagcattgcgattcctacgcttcctacctcgcttcccgaatctgtttgctttgctgtcccgactattccaacatcgatttcagtgcccactcttatggctgccgcacctaccgctgggccagatagcaacaccacgcaggtgcttaatgaccagtttgagcggatgcacccgcggcaaattgcaccacttggcgcctgaaggatcttttgcttattttccgaggctcaaatggtgtggttcaatctgtactggctccatcaagcttcaacacgattgtgttcggaagttgatatgttacttttttgcttgatttaaagtgcttgattcgctgctcaaaagttgaatatgagcgaatttgcactgaatgcaaggctatattggaataatactgaagccgactgcgctacttcgtgacttttacctcaaacatgccccttttgaaagcgtaaggtatctactagatgctccttgtattctgttcagctggatggagccctgcgcttctcatgcttaccggtctccaacccattgacaacctctctaagccatacacagatagtagacagttagatccatgaggcgttgagtctttcgttataaattttgtcttgtcctaagaacaagattaccagagtgcatactttgggtgcatctaaagataagtgcctgaggcagaattgtcattatttgaacgcagccgattggttccttatttgcttactcatcgctgcccttggagcccaaaaaagccaaagaaatcacgacttgagtaggactttgaacttgcgtgacaagaagccaattattactgcgaaaactcgaccccctccaccttctacctcgtcacacgagttgcttggtcaccagagtaatccgtgtcctacgatctcccctttagcgagccccccgggaatgcagtgtcaactcaattattagacatgcgcaacagggtatcactccgacggcgacaccgagatttggatcaccttgcgctcgccttattaccttccgtcgtgtcatgacaaggtg

SEQ ID NO: 1778 - DNA, 1337 bp, Emericella nidulans
  unsure (1)..(1337): unsure at all n locations
acttcctccagccggggggaggagcaaaaaaaaaagatgggtcccttcagacatgcccaaaaacacgtattgggcaaacagtttctatatgggattgtttgcgatccaccctatagtgttcgtgagggtctctcggtacttggttccagggatactagccgtcgtaaggaggagctcattatcgacggggtcctgcgcatcggtatgtcctcttctaaggtctagcccacgccttgcctgctaatctttcccagtcgacccggatacatcccgccgaagaaaccctacggcttcgaagccatgatgaacgatatcctcatttttgcagcacgtactctcgtcaccggtgggcgtttatgcatgtggatgccaacatccggcgaggaagaagcagaactctctgtcccgatgcaggaaaatctcgaagttcttagcatttccgtgcagccgttcaacaactgtaagtatcttgatgctctgaacaatccatcactttaatgagcacagtttaatgctttcgatttcttcgttagggtcacgacgtcttatcacataccggagactccctgagggcgtattgtccgacgtatcatcggggcggcggaaggatgatgccgctggtgtgtcggccgatgatctgaatgctttcaggagaattgtatgtccactgtttcccactcttacttctccattaggggcacgtcctaacctttcgaaagtacttcatgaaaaatcccaaaagctcaagtccggcttcccaatgacatgcactatatacatagcttactcaataaacacccaatatctgtaacacctgtatcccgagatgaggccattgtcgaacatgacatctgtggaggaaaaggtagcagcaagtttcgctcatcttctaggctcacaaccttcccttcccttcccgttcaaacccttcattttcagtaaactcctcctcaagatccaacccctctactgatctaaccctttcgacctcccttgcaatctccatcctcagatcagcattaagtttttccgcctcctcatcgaccaggtcttctctcttcccccggccaaacatcacaaaactcattttggccgctgtgcccgccgcgcctaacggcggtctaggcacgatgtggaagtgtacgtgcggaacgacctgagcggccccgacaccttttacatatcatcactttagcatcagatgctcgtacggatatataggaaaagagaagagtaccgttattttggaccacgttccagttccagttggatctgtggtagtacatctgtgatctggctttactctcacaacacngtnctcatcacgctcagacaga

SEQ ID NO: 1779 - DNA, 3603 bp, Emericella nidulans
tgcagagccgctggttacgatttccactgcgcgaaggttatatctcgaggtatttgcctgttttgcgagcgtggccatgatggctggaacggaggccatgaaattgatgcggtaaatatccatgtagaggaggtattggtcgacattaaaggatttcatgatgaagacttttgcgcctaggcgggccgcgttgaggcagtagtatgtttggccctgcaatcacttagttctcatgcaatctaaggaagggtacaatgaaatgggcaagaatacataggcatgatacataggcagcggagccagccaccgatcccccgccatgtcgagccgctctttgcggctcttgcctctatggtcattcgatataatggctctctttgcgaggagctgagaagagttcgcgatagcattatagtgcgatatctccacgcctttgggaagtccggttgttctttcaacgtcagagcgatcatcacttggcagagacatacacacccgctagagtagttgattattgcagtcgtctcttgagcttctttgagcgtttgaatcctcttccatgaccaagagcgaacctcatcagcaggcctccagatcctcgtccaaggctggactggtaatgacgagtcatttgaaatatcttcaggatcgcagaagaggtacacccgatccctcggtagaccaactctggatgccgcatccagcgcaacagggacctgagtcgaacccgcaaggatgagctttgcatctgaattgcgcaactgatattcgacctctgcatgatcaatacccttggtcataaaacccctcagaaacactgatggacaatgtagttactcacccttaacactcgcaccccccgctacggccgtaaagacacatcttcctgcaagaaccccccacaggaggaccgggaagaagagagcattgtgcgagtacagcagcactttatcgtttggctgcagaccaaggtcttctaacccctttgcaatctgtttcacgagcacttctgcttgcgcaaggctgaagttcttggatgggttggaggcatcaaagtactgcggggtttggcgggttgtaggcgtgcccgaagaaaagacgaaggaggcaacgtccgtgacgggaatgggaattcggagaggagacgtcagaactgtcattattgatctggcactggttttgtagatgctggtagcttgaataacaggagaagagtgcaggtacctaaagtaaagataggtgtgttggggtaccgaggtagtcttctctctacttcgtctcctcgcagtgattcggctatatgccaggaaagcttccccggggcgaggatccagcttgctttcgtgattgcaggtgcttgattggccatgaggttttctatcgaatgcttctatcaggcgatgttttgttgttcaatacaactaaatagccggttctagaacacgccctggcgattcccagccgcaatttgacgacagtaacggcctttcaactatttacaattgctctgtagaggccctcgccactggccaattcagtaatatacatggacaatttctttagggggtggagagcaggcttcgtaccacttatgaaacccttcagtagcgttacgcttagaagacaagccttaagagtttgtgtatagatcaaccacgatcccaagtggttactctttggtttccggaagattggaggctttgcacaccttcagggcgccttgagtaatctattatagccatattattgctctagtaaaagtacagttgccaataagtataaccaacgctgatatgcaaccatcgacgccattataggtttgccaaatcaaaaacaccgttaatgcaatagtctagcagtctcccaaccttgggaatgcctgaatatcgtcacatatgtcaagtcttatgttcaatcctcaccggcggggagtggacggagtcaatccttcccgcggactgcgacttcgggcccttcgtcatcttcttcatcctcaaaatcttcctcatcgtctgaagccacgctctgtgtctcggcttcctcgtacgagtccgtagcctgggagacgaaactagccccaagctcttcctcagcaatttcgtcatcgtcaagttcgctaccgtcgtcgctcagctcgccgtcatattcattgtctacttcttcctcttcgtcggcttggctttcatcctcgctatctgtcgttgatatgtcgtcaaaatctcgaggaacatccctccaatacatgaaatcggtatattcttcaccgccagcttgaaccagcaagctgactggaggaaagaagtgatccaccagctcacgcatagagacatagctactcttgtacttgttcaagcttaaaagggtccagctgaacctccgcgttcgagttaattgtgaagatcctgctggacgggatgttcacagatcggtagctgagagcgtccgtaagcctattgccaaagcccgcgtagaaaggattctctttcccgttgaagaggccgagaatatcccgcaagcacgccatcttaaacacttcgggcttcctcaagtagatttcccttcgaagcgccgccatcgttcgatccggactcatgatcgtagggcctttcggaagcctgtatccgtcctggcaaacgccatagatatacgagcgagtggtatctgcttgtccaacggatctactggtgagatacatgatgttgtaaccgttgttgacaatgtcggtatacaacttggccacaccagcgtgagtccagtctcgaccgatcatattcagcacgtgacccaaggcatccgacctggtgaggttagtggtatgcagacagacagcacaacaaaaactcacttcgtgatggttccatcaatatccgagatgacaattggggtatctccgcgccatagatacatgttggccgtacacgtggctttgttcacactgaaggacatgtcattaatgccaggctttaatttcagtgccttgagctggtcgcttgtgagccgtagcgtctttgcatagctgcgaaccggttctgctggggcggtgttcgggggcgattgcggcggcgtggggattccgggctgcacgtcagatttcgcgcgatggtgtcgcatctggaaagacgggtcgcgaagggaattgtcgctgtcactatggtagccagggtcagaaatcgcattctcgctcatagcggagccgggccgcatggcgttgagggtcgctcggcggttggcggcctctttagcctcttcgctactatatatccacaagtttccatgctcgtccgctccaattagggccccgatatcatagttcccttccagttcctccgcaagaattttgcgtgccacgacttccgcacggagagcatcctcttcgttactcttgtaacctgtcatgtccagcatgaggtcgccgctgtcagtaacacgggagggtatattcgacgtagatagtttctgggacaatgacatcgcacgtgagacagcctcttttagagagattggaggtggactttgggatcgacggatgagatccggatcttcgtttgaactggctgatgcaggccgctgtagctggagactataatcgcccgtactggtgcg

SEQ ID NO: 1780 - DNA, 2530 bp, Emericella nidulans
tgttctcgtacagcaggatctgcgtaaagtacgttcgttaatactgcgagcctttactagtagagctgacgcattcgatgccgagtactagtgttgcaccaatcacactgaaaagtcagtcaaacgtgtttgatttagaagcaagtccataattcataccatcgtggacgaacagccctcgttgtgttcgatgcaatagtcaccttgacaattttggcagttccgttgacagtccaacttgcatgcggcgcactgaacgaggttaatagaccacatatatcaatttggtacatcgcttaccgttggcccgcactcccagcagtctttactcactccaggtccgaacccctcattgccagcacggggtcctctaacagctgtctgatgaggcgacagtttgctcctcacacgttcggggcggggaagacagctgttgcaaaaccacttattacaacgatgacaccacctatcggcgaggcaatcggcgcaacgagcgatcagcacagggtgctcaccgaagacgagtgctggccgttttgctgcagccaaagatgacgaatgaaatggtggtggtgtgagaaggggaaaatgttcggctggggattgtccccaaatagccgggccttcttcagaagtgtggcaaccgtcgcaacccataggacccagggcaattgttgcgatagctggtccgagcagccgttttccaggttgggcatcttccgtgctgggggatacagtggcgcagaggtcgacattgtgtcgaggaccgcggcagaggacagcatcaaaagcaatgattccttcacacttttgaagagtctctgcccaaccttcctcaatgcgatgcttgagcagtttaccggacgagttataccaaacgttttgacgctgtttttccttttggttctgtgtgggcggcacgtcgccgagcgtgcgttgactgacgcactgtgaactccaccaatccttgtacttgctccgaactgcagctcgagggcgatccgtgggagtgaagtagtagatacctttgatgcgaggcgtaccggcgggccgcgtaggccgaactgcatagttgagtacttgcatgagtttccgctcattgagatgtcgacattctcgaattgacagtagactcagattgaagcggtccgacagcaccaggtccgaaacaagatcagctggaacgggcaggccatctaaaataagcgtccgtacatcgctcatgatcgagcttcgctccaaattggcaaagatgcctctgagaggcccagagtagaattcatcttcagtcagtgattcgtctatgcgctcggcccgccacgtctgaccaccacggtcaatcgggggctgatcagtcaaccgagcgcctcgacaatgagacaaatcaaggtgtcggaacacatatggcgtctccatgattagcgagcgcacaaagcgcgaagttgccgacagggccaggagagtacctggagtgagatatggcaccaagtgatcgaggatcaagccattccctaaaacatcttcgatcgaggttggctttcgctctaccaccggttcaggccgctctttgacagtttcctcctcatcactgagctcaatttcgcgaacgaccggaacaagccccaattccttgggggtcaagcggcgggcgccatagaagaagtcaggagcaaagctaatgagattctgtcggtaagcggccacggctccaacagccagttcctcgccacgattaatcattaaaccggcatttggttggatctcctgtagagcagctctggctttgacgagctcggtttcgagaaggttgatggtggattgaagaacagcagacatgttctttttgttgtcgggatcgatgctagtgaccaagacagaccacagtgcttctgacatgctactaatgtatcaggttagaaagcaacaacggatctcaaaaagagtggcaaattccggtccgcgatttgtttggttgggaaatccgtggagcgctccacggaatattgtgccctagtcgagaaatatatattgctgctgtaaaccgggtggtggattcagacgtcgaacggagtcgtttgtcgaaatgataaactggggataatagtaatgagtggtaataagcggggaagtacgaagtataaagacccgatatggggagagaaaaagctactacggaataggaagacgacggagttgggaagaataaacctaaggatcaggggctgccgaaagcttcaccggacgacaagtcgggtattactccgtatatgaaaggatcctatttatccgtatgatgtcctttttaagatatgtgataatcccatccgcaaaagtactccctacaacgtagaggctgcaaaaagcaagccaacttggcacagtagtggaattttactgcataatcacgactgtggaaggtgatacagcagccttctagccaattcaagcactgcatatctcctcggggttcggagtacaaatctgtactctgtacagtggtgtagaaggcgaggtggaaagagagtatggg

SEQ ID NO: 1781 - DNA, 2339 bp, Emericella nidulans
gccttccatggcaaaaatatgtacctcagccttatcaaagacaaccttatgggaaaaacttaatttaggcgccagattcaacctctggtcccctatcttattatgaaaattttcatccacaacattgccgcgagtgttttttgtgcttaaacaacggtaaaggcaggaatcctagattgatatcagctcacaagttctgactccggctaaatccttgtcggccagaatcaccgaccccagttcaataaaaattgtttctcggccggaacgtgctttaagttagatcctcaatagcctcactccgttcccggttccggtaatcaccgcgccagaataagctagcgctatccccaggatttgtcgattaaagatgggcccagatccgggtcttgctcaggaaccgggttggtggcataatacccgaataatctatacttctcttggttcgacggagcttgaggcggaaattgcggggatacgtagctacatataatagtcctaatactgttccacaccgttcaagtaatttccttgtccattgactatatagaccaactcccttagtcatgaggctcattcacgctgtgcttggtcttcttgccggtgcggctcccgcccttgttgcagccagccccgcagcgccaatcggcaatggccgagaccaggtatctaaagcagtaggccgacactttgagattgacggcaaagtgcagtactttgcgggtacgaactgctggtggttgggcaatttgctcaatgatttcgaggtcgagcttgctgtctctcagattgccgaagtacgcctccaacatgacggatatcggatcgagtactgatgatggcagaccgggtataaagtcgtccgaacctggggcttcttcggcgtcaacgatccatccaaccccggccagcctgtctactaccaggtcctgaatgaaagcttgtacgagggtggcttggggatcaactacgggtctaatggtctgtctttcatactccttcgttcacctgcaatcaagcgcagccctaacagacatctgaacgcaggcatccgccgcctcgacaccgtggtctccctcgctgagagatacgacatccagctagtcctgacattcatgaacaactggaacgactttggcggaataaacatctatagcaacgcattcggcagcaacgcgactacctggtacacagacaagaaaagccaaagggcataccgcgagtacatcaaatttatcgtcaatcggtacaagggctcttccgcgattttcgcgtgggaactaggcaatgagccccgctgcaaggggtgtgatccatccgtcatatacaattgggccaagagcgtcagcgcatacatcaagaaattagacaagaagcatatggttgcactcggagacgagggctggctctgtccgcccgagggagacgggacctatgcgtacgattgctcagagggagtcgactttgtgaagaacctcgagatcgagacgctcgactacggaaccttccacctctacccggaatcctggggttacaactacagctggggcagcgagtgggtgctgcagcacgacgccatcgggaagaggttcaacaagcccgtcgtcttcgaggaatatgggactccgctcaaccatacgcagctcgagcggccgtggcagctgacaacggtcaaagagacgcaggtggcggcagactttatctggcagtttgggactgtgctgccggtggagggaacggagtggggagatgtcaattccatctactatggaacggaagagtacgaggttttggccgtccagcatgcgtgggagatggccaggaagaaggtgccgcggcactagagctagtgataacagggtacttgctatctaatcaaagacacatctcagccattattagagttcaataagtggaaaggaaaagtttttcgcaagcagatcgcttcgggtaagccgtggttatagtatttcggcgacttcagcttgcaattttaaatcaactcccatcgcccattccctgccgccagagacgcttagtagcaggcattggacgcagagtacgatgccaatggacatgagcggcgcatgtcgataactgagttttccttggatggtcagccccgaacactaacctttgggaaccacgttggctctaaagatatggacaaccgtccaatttagcaacgttcagtcgcaggctttgagccaacggcgtgagaggccgttatcattttgacggcctggagaatcgagctttaccgactgcacgagaccgcatctggtcttgtttcttgattgcagtccagttcgcattcgttgaaaccggatccaatagtg

SEQ ID NO: 1782 - DNA, 2078 bp, Emericella nidulans
  unsure (1)..(2078): unsure at all n locations
tgttcaagtaacagtacatgcatcagctcctccgctcgtggcgttcgccagttcttagcgatcgaggcgccggttctcgctcagagcattgacaatagcgcgcatgcgttccttcgctgggattatctcattggctcgacgggtgttctgatttgggctttgagcttgtaccgggctggccaccgtctttgtgtacggcccaggtggggtgcgtcgggctcgtgttcaaggtcgctgcgttgacgattttgactgggccagtcggagcggctgttgagttgatatgggagagagatgagttggtattcaatgagttggggggcgtgaaaagagcggccccagtgggtaagaagcttgcgtaattgcaaatcggtctgttgagtctgctcgaggcgacggaatgtgtcgcatcgaaatatgtgtcaggtggtgagacagcaatgtgtggcacaacctatacaaatgtcttctgtatgtaggcaagcgagatctcaacaaatttgggtcgccacttccattgatgatctgtcagctcataactagagcattttccatttcactcatttcctaatacaattaacagatcctgttcacctaccgtctttcactatatacgcaacatgtcagacgtccttagcagttgagtctcactcctagctgtcatccttaggagtgagtatcttttcttttttatgcgaaattctcaggtttatggaggaatggctgaaacgcacgaggagatcgaactacttggtcacttcacctcttgcttgctgaacacagcctattagaacggtgcaagatagaggacgtctgttgataaaagacagaaagagagagttctggggtaggaggagactgtgagttgagactagtatcttgacgccagcgcacaggcttgaatatccccagccgactgaagagtccgcccgctaaaataataaggatatgaggtactaccaagcagtaatgctttctcccgtcggtttttccctaatagggttttcgatcaggggattgccggtacggtggcctatgcagcagtatctcacataatgcccgtccggaactgtccagctcctcgaatgaaacgttcttcgaagaattgctgcgtgaacgcactttgacccattctccttctccagaacaaccccaaactccgtgatcctcttgcgataacaagtacggcgagcgcatggaggcacattgccttcgaacttgacctgacccagcttatgtaccgttgaccaagaaaacaacacaatgccgacatcacttgaccaaatttacccagctttctgctcgtttatgccccgagtgggcactacatcgacaggtgttgaccagcagtttttatgtcgtcttgtctgttcctaacttgtacttgagtttttttttttaatttttttattcttcctttttttttttatttttatgctttttatttcttcatttctttctctctttattttcctattttcattgttttctcctttattttttttttcatacttattttcttattttcctttccttttaatgtacaattttgtttctttcttcttttttttatctttactttatcttttacttattcttttcttcttcctctctatctttttatatttcttaattttctatttttgtttcttattatttttttctttttttttctatttttttctattcaaccttctctttctctctattcttttttattttccacattatctttttttttcttcatcttttaattattataaacccatttatttttttttaatttatttttttattttatttttctctcttatttttttttttttttttactatatttattttttcccttttccttattaacttattattaatcattttatctattctttctattatatttcatatttttttttatttttatcatttatcatatattctccttctatatcttttctatttccatttaatctttttctctctttttcatcttttaccatttaactctattctcctctctttttttncaccctctcctttcctctcctcctcattattcctactattttttttttatat

SEQ ID NO: 1783 - DNA, 4341 bp, Emericella nidulans
cgacgtggtagagagcgtcaagagcggcacttgcaagacgatagcagacgttaagtcatgcaccaaggcaggaacgggttgtggtggctgtatgcctctagtgcagtccatcttcaacaaaaccatgctggacatgggtcaagaagtctcaaacaaccgtatgtgcttcggcccagtttctgttttatcgctaattttgtgcagtgtgtgtccatattccatactcgcgggcggacctttacaatgtcatagctatccgtcaattaagaacctttgacgatgtgatgaagtcggctggaaagtgcccagactcgctaggatgtgagatctgtaagccggcaattgcgtctatcctctccagtctcttcaacccccaccttatggacaaagaatatcacgaacttcaagagaccaacgatagattcctcgccaacattcagagaaatgggactttctcggttgtccctcgagttcctggaggtgaaatcacagccgacaagttgattgcaattgggcaggtagccaagaaatacaatctttactgcaagatcacaggtggtcagcgtatcgatatgtttggtgccaggaagcaggatctactcgatatttggactgagctcgtcgatgccggtatggagagtggccatgcgtacgccaagtcactccgaactgttaaggtgagatttattcttaagtcaatgcaaaccgagttaacggaattcagagttgtgttggaacaacctggtgccgattcggcgtcggagacagcgttggaatggctatccgcttggagcaacggtataagagtatccgagctccacacaagttcaagggtgctgtctctggctgtgtccgagagtgtgccgaagctcaaaacaaggagtgagtaacgtatcactttttggtaaaagcgccgttaacgtgaatagctttggtcttattgctaccgagaagggattcaatatcttcgttggtggcaacggaggtgccaaaccccgtcattcagagttacttgccaaggatgtaccacctgaggaggtgattccgatcctggatcgctacgtgatcttctacatcagaactgcagacaaactccagcgaacggcgagatggctcgagagccttccgggcggcattgaatacctcaaggacgttgttctcaatgataaacttggaatagcagcagagatggagcgtcaaatgcaggagctggttgacagctacttctgcgaatggaccgagacagtcagaaatcccaaacgtcgcaagtacttccaacaattcgccaacactgacgagacggtcgagaacgtggaaattgttaaggagcgcgagcaagtgcgcccgacttactggcccaaggacggagccaacgaagacttcaagggtcaccaatggtccagcctctcgtggcagccagttatcaaggctgactacttctccgacggcccacccgcaatctcgtccgccaatatcaagcgcggtgatacccaattggccattttcaaggtcaagggcaagtactacgctacacaacaaatgtgccctcacaagcgaacctttgtcttgtccgacggtctgattggcgacgacgacaacggcaaatactgggtatcgtgtccgtaccacaagcggaacttcgaactcaacggcgagcaggctggccgttgccaaaacgatgaggcgatgaatattgccacattcccagttgaggagcgggaagatggctggatttacatgaaacttccaccagttgaggagctggattccgttcttggtacggaaaagtggaaggtgaagaagggtgaagctgtggacccgtttgaggcgtatgacaagaagtacagcgggatgaaagggaagagagccggcgccaagggaattgagggcagcaagcccactcggtctccttcaaacacaatagactggtagactgacgaggatacgttttgcgatgtgatattagtatggtggacatgcttattggtttgcatggcgtttttctattcaggcggttctatgcattatacctagtgttaaacaatctatgattatactatactcgaatcggtaacagtccatagaacgctgcctacataagttgaattgcctcgcgacataaatgcttctctgtacaatgcagagtacggagtagggcctgatatggttgatgcctgaggccaaaacactcgatgattaaactctacttgattggccggtgaggttgttatctcttcgacgcagccagacccattttccctccgcaatcctccatctgccccgataacactattaaaaagggcccatttacctcttaagatctccgcggagccaattcaactctggtttttgatttctggcctcagagactaccgtcatcatcatggcacacaaaaacggcaccggaacggtccccgtggagccgtcagcacatacttgcagtcgacgaacaacaaacagttcaacacttgaacttacagttccgaggagatcgtggacatttttgtcattcttcatgcagtgacatccagatatacgttaaagttgcacggaggttgctttttactgcgtcttcaacgcccacatggacgagtctcgacccataacagccagttccgtttggttccaggttctaaatacccgcggagtctgtactgcgaaaaggctggattgccttatcggaaggctaaaactctgtgcgagatgtagatccggtctgtgggtcatatacttttcttatctcgatgtcgttgatagcggtcagctccatcctcagccacaccacatccacgctgacggccttgactcctccgctgcctattagcctgcggaatatgcggcatggctttgacactcccacgggccagcgctcccatgaagctcactgagtgggtgcggaccaacaccgtttgaaggcagccttgcctatttggtctgattaatctcgcggctttctcgttacaaataccaaagagacatcactcgggttgccatttctaatcgtgatcgggttcgggaccctgatagattactgcctgattgttcttgtgctggctcccgagtgtcctagccctgacgacatgctgatatcccggggagatacatgacacttccttttcagtcagacatgagttgtttctgattgacgattgtgcctgttgtttatatagcaggcccgtctctcattgatctggctatatcccaggataacaatcaagcaattgtctagcctatttgatatctttctacgaactgcagttccctttcttctaatatcattcgtcttattggttaaaaccatatatatcctcgaggtatagaatagcacggccgatccgttcttctacaagtcgagtttagatccaacttcatccttattcaaccagatcaggcgaagtcgttgaagagatggacttcgccaagctgctggtagcctctcctgaggtcaaccctaacaacagaaaggccctcactattccagtcctgaacccattcaacacatatggccgagtcttcttcttctcatggtttggcttcatgcttgcattcctctcatggtatgccttcccgcctctggtgagtctcttcttccgacaaccggactgaaggaatcctaacagtgaagccagttgactgtcactatccgcgatgatctcgacatgtcccaaacacaaattgcaaactcaaacatcattgctttactagctacgtaagttccctgcatgcaaggacaagacgcagagccagccctaaccctatatcagactactagttcgacttatctgcggccccctatgcgatcgtttcggacctcgactagtctttatcggcctactgctggtgggctccattcctaccgcgatggccggcctcgttacctcaccccaaggactgattgccctgcgcttcttcatcggcatcctcggcggcacattcgttccctgccaagtctggtgcacagggttttttgacaagagtatagttgggacagccaactccctagctgccggtctaggtaacgctggtggcggtatcacatacttcgtcatgccggccatcttcgactccctcatccgtgaccaaggcctccccgcacacaaggcctggcgcgtcgcctacatcgtcccctttatcttaatcgttgccgccgccctaggcatgctcttcacttgcgatgacaccccgactggaaaatggtccgagcggcacatctggatgaaggaggatacccagacagcatctaaaggcaacattgtcgaccttagctctggtgcacagtcctcccgtcccaccggacccccttccattattgcgtacgccattcccgacgtcgaaaagaaa

SEQ ID NO: 1784 - DNA, 4903 bp, Emericella nidulans
acacgggaccggataatagaccagcgtaatcctctgagccgatactgtaaccacccctacgccagtagttgaaggtcaggcgcacctggataaattagaactcagttgagactggtagagacgataaaacatacgctccatatgacggagatagctgcgatagtatccaagttgagagtacgaaggccggaaaggcgtgcccaaacagcaaaatgaacgttgaatacggacgggaggatagaccagaagcgatcgacctgagagtagttgcggttgatctcagagaagacgatgaagagaacagagaggaagatagtaaatgcaagcgcggtcgcaagcggattggtggaaagatagatgtccttaagagcatttacatcttttgctgcaatcgcaggctggagacgttcagggagcgcagccacttgcgacagaaatggtcgcacggcatggttgaacgaaacgcagtctgccagagactcgacgtcaggaagtggaagcgtcatggttgttgacgaagcagaagcaggagcagaagcagaagcggaagcaagaacagcaggcacccgactgcgaaatagattttcccacatagaggagataagatacttggttaatcgattataaggatatagacgcagataaagggtggaatacgttcatgaaatcacaacaaacaaggccgagtcacactaaagagcttaagcggggtgcgctaatccgcattaggtagtaagctgtcaagtgtcgagtcccgtgaccggtgtcgttttcgcgtttgctcgcgaactgaagatcaatttgccaataatacctatagacaaccccagactgtcgtagggggagcatggtggaaatgattcttagctcatcaacttctactgctcatagtgtgatttgcctggctgactgtcatggcgggcaccaaagtcttgtgcgtggctgagaagcctgcaatcgccaaagctgtcgcacagcacctatctggaggtcgtatggaaactgtaagcgaatgacctaacttgctgaatgtgaactgaaaatggaatagaaaaatgtcactggaaatcgatttgtgaagaactacgtatttgatttcaatttcgggaatcaatggggaaacagttctgtcacgatgaccagcgtcttaggacacttgacaagcttggaatttgagcgccagtacagtggttgggcatcttgccctcctgcagctctgtttgaagctcccgtcaagattgctgtcgacgacgtaggttaagccgatgtctgtccatcagccgtctttgctaagtcctaattgcaggataaaaaggcaatcgcaaacaacatcatgaagcaggcgacgcatagtcagtacctggtcatttggaccgattgtgaccgggagggagagcatattgggacggaggtacgcgatcaggcgaaggcgggcaatggacgaatcgtcgtcaagcgagccaagttcaacaatactgagaagatgtaggtagatgcaccacccctttcatgtgtgcttcgttaaccgatttaagccacgttctgaatgctgcgaggtctctcattgaacttgatgagcggcaagccaacgcagtggcggcgaggatagagctcgatcttaggattggggctgcgttcactcggctgctcacactccagctacaaaatcttcatgccaccctgacacagaaggttatcagttatggtatgccacgccgtccattttgaaacgcgctcccatctgacagactactatccaataaggatcctgccagtttccgaccttgggatttgtggttgatagatatctacgagtgaagcgattcaagcctgaaactttctggggaattaaggtcatgcacactagggatggtatcaaagtgagctttctctggaatagagtccaccttttcgacagagccgctgtcactattatgctggagcgctgtctgatggcaacaaaggcggaggtcacaaaggtgaatcagaagccgacaagcaagtggaggcccttaccattgacaacagtggacttgcaaatgatgggaacaaaatatttgcgcatggacagtgcaaaggtcatgaaggtaaatgctctatcacgtaaaatgctaatatggtgactaatggaacctagattgcagaaaatctgtacactaaaggatttataagctacccacgaacagagaccgatcagtttgacaaaggaatcgacctgaagaagcttatcgagaaacaactacctgatgagagatggggagagtacgctcgctggtgtgttgctcactctctaagctctatcaactactaaactgcattactagtctcctcggcggcaatttcagaactcctagggctgggaggcacaatgaccaagcacatccaccaatccatcccgtctgctgggttaaccccaccacactgactgaagatgaaagaaaggtgtacgagtttgttacccgacggttcctcgcctgttgctcagacgacgcaaagggacaatcaaccgacgtcgagatacgttacggagatgagatgttccacgctcacggactcctagtcttagaaaggaactacctggacgtctacgtctacgacaagtgggagagtacccaacaactacctaactatcaagtcggcgagctattcgaacctacagaagcgaacatgttcgatggaaagacctcgccgccaaactacttaacagaacccgagcttatcggactcatggacgctaatggtattggtactgacgccacgatggccgagcatatcgaaaggataaagagtcgtgaatacattggcgaaatgacccgaggaagcggccgaaacgcggtgaaattactcattcctactcgtttgggtattgccttgatactaggctatgaagatgttttcgctgggctcgcagacagcccctccctcagcaagccttttttgcggaaacagatggagctggaaatgcgggacgtctgtgctggcacgaggttacgaacacatgttgtccagcaaaatctggatatgtaccgggagttgttcattcacactcaaaggcggatgaatatgctgaaggctgcatttcggaaatacattgtcgaaggagaggatgtgtgaagtctaccattcgtctccgatcgactgacgcccttctaggactgggtcatagtccttgcggaagtccattgagcctacagtccttgctgtggacatatacacttaactgccagaaatctgactaattcagatttctcaattgaatataagcatgcctttggggtatattctgctgaagcctacgctgttctatgaggaaagaatgggttcttcaagctttcgagtatgtctgcttaaacaaattcttctttcgcaaaagaccttggatcatgtggctgctagatgaagattcttacactacacaaaataattaggaacatccattcctcgagatactaccacatccaacatcgcacgctcctgcgccgcgccgtttaaatcgtgcgtaatagcctccttcatcaatgtccatgcacattttggatgagataacttcaatatttcttcttcccatttctggggattggcaattcgctgttggctgctgagctcgatattgccttgtgcatgagctggatttcagacttattgaccttgggagggcatgcttgcgcggcttgacaatgctctcttgtgtatatgggcgagatagaacaaccctgctgaagatgacttatactaaactattttctcttccattgctctccagtcaatctgaatgctctttcgcaaagtagtaggacctagcgtagtttgcggattagcaagctcattttaagtattctctatatcagatagactcagcacaagaccatgcttgcgtgagaccttgtcagcaactgagacttatttcggttgactcgagttttacgcttcttcatcagccctcctgcctctggtctcattcggccgcatgaaataaaactcactctctcgttgccactgattgatggattctatcctggaactgaacctattcaactgttgttgaatctgctcgccgcgtttctcaagagtaccgcaatttttcttcagcccgtcgacagatatttgcagttgctctatccgctcatcgataatggccttcaccatggcggcttccccttcttgcatacccttggttggaccgaaggtctcgttcaagacgagtatgttcactgctttgactagggcaaagaatcttttgacagggttgagagatattgtgataaatgggctgaagactttcttaatcggataaataaccttcttgacgactgggtcgaatgtttgctgaactgaaacgaagcttcctttgactggtatgagactcttatcagctatgggactgagcaatatcttgaccgaagcaaggaccttcttgactggaccgattttcttttcctcaacactctgacgaacctgcgtatcgatagccatccaccgtgccaaccaaacccacaatactaaaccaaatactcccaacacgacgaaaagcataactgcgtacgtctggtcagagaaagattccagaccgtcttgagagaacttcgcggaaactgaagttgtcgagttcggtaaaacatcttccagagacacgatagacgagtttctgaacccgcctgcggacgacctatctttctcgtagggcaagcgtgagttggtggaggaagacgcactactccaagggagctttgacagagaggaccaggctgaggccacaacgtggtggttgaccctggggaccggtccgcctggccagatgaagtaggcagccgagactccgatgagtacttgggctgagaatgtgggattcatggctgatcttagagtatttaagcaggaatgattgtagtgcaatgagtctgtt

SEQ ID NO: 1785 - DNA, 4456 bp, Emericella nidulans
cgatccaggtccacgtcgtcgttgttgctcgggctagggcactgtttgtcgggactagggtgaggcttgagcagaccatgggctgcctaactcaactgttagtctgctaagtcagacacacatagagtttgctgaacggggctgactgaaacaacgtcgtattggtctgtatctgacttcagaatgctatcagtctgtacgctgtactagatcacttgttcttccggccttccagcacccccagcacgtctgccgcactgtccttattcccctttctcttcttgggaccacgcttcctcttgttcccgcctcgctctgattctaggactatcccctcgtcatcctcgtcatcctcaatcctactgcctccaaaaccgtagtccaagtccatggcgtcgagcgcttcgcggcgctgcgcttcctcaaggaacctcttacgtcggaggagcgtttctttgtccacgccttcttcgtcgtcggcaatgtgatccgacccctcagcagcttgtcgtaaggcagcggccctcttgagcgcggcaaggatggtcgggtccttggttagcgggttggtgcgatgacggtcactctccacttgctctgcttccttccctgtactgcccgttgcgaaatagttccgcggtcttgccggctctgttctggccgcctccatggttggttcttccgttgtcttttccttcccgagttcctgccgtgacttcacttcagctgccacgtcgccttcttcctcatccgattcggatgaatcctctgacccgtcaccgcccagaggattgtagtcagcacccacgccttcgaagatatcatcgtcttcttcttccgcagtctgggcggctttgatcttggcggcaacgtcggccggcacttccattcctagaggttttggcttggattccttctccttctccgagacgggatcgccagcggtggctgtggctgtggcaggcgccgtggtccccgctttatccagccatctggttttcctcttcgtcttgccatccgcgtccgtaatcaggaggacttcccttcgccggccgttctcgtcctgctcgatgaaccgcttcttctctggcttcgtatccccaatcttcttgaaccgcgcaccgagaacggattctggcgcttgggcagctgcaggggcagaagcagccgccctgctcgctttcagttctcgtagaatctcatcgcgcgtctttctctgagtttgagtaggcgctggcggcggcgccatatttccccttttcttctcctttcctttcggcgcagacggcagggattcaccccccttttgctcgagcactttatcaaactcctcatccacgtctacctctttctcgggctcatcatcagcagctgctcctccgtctccctcttcatccctcttctccttcgtccgctcaacatcctctccggctttgatcctcctcagcaaatcccaatccaaccccttaaccatatgcgtactgctcaagtcccctccaaccccaagctccctgcgtgacctcgtaagcgtctcctcatcaataagaccctccttgaacttctcttccagtcctttcaactccgcctcgcgctcagcagatttggcgtcctcgctctcgcgtagtcgcgccgcggcgcggtcttcatacccaactggtagcttcgttcccttgggagcagcggaagacttgaactttttgttcggtggtggcttcccgtcgcgctcgcgtcggtattcggctagctgcgatgcgaagttaggggctgtcagagtgcgtctagacagaacaaaatcaaaagatcagctcttggatgtcacaataaggacaatagatattaagcgtgtgaaaacatacggtgtcatagggatgctcgagcgcatccgcgagcccagcaatgcctgcgctggtttcggtgtctgtccaccgctatcgctcccaccttgcggtgaagcagcgccatgttttcctgcatgcgagaagccggtcggactcgcgctagttgatttggatgatcggttattgtcgagaagtagccggcggaattgctcgttgttcatggtggaaaggtgagtggtgcagatgcgggcagattaggcgttgaggagtttgagctatatacgtggtagatattgacccgatggagctagttcacgtgtacattgcgaggatgatgcttggacgcaaatttgtagagtagataggaggttgatgctgcagctggcaggaaccaaatttgcggaggccgagaggtaccttagaaagcggcgacgtcagtgtcgcattcggccgtagaagcgcactaacttctgaaagctacaagtataaatcgataccaaaataatcccgtaacaagtaaaccccaagtttgtagttcatcgattgtatggtattgtgtaatgttccagtatttcagttcttctactttaaatttttagaggcgaaagccggcaattgttggttgattatggacatatagctcaaaccaggaacttgagtcatcttgccgcatgggataaatacaatcaaatgcaaatcccaatagacagctgcagaaaccgtacacctaaactatgactcttttgcgcgcaacagcagcaggaatgagcaaataaaccaatactattcagaaagcaaaggttgccagaagaagatacaaggtagaaaaagattccgtctaattttgacaagccattcgtcgtcctcgttcctcccatccacgtatactcatgcacaaataacgatagatgatgaagagggatcagatagtctcaaaccctccattattgatgtcagcctccatcctgcgactgatggtcgccggaacactatgcgacaaccagacgtcgcgaagaagccgatcgtagcgtttctggtttagcatgagcggcctgttgcggcggagacccatgtcaacttcgccgtggcggtcgaggtagggggcgttgtgccacgagccgctctggttgtggagatagaggacggcgcatttacggatgttgatgaagaggccgatgtttttgccgcacctgaagacgaagggttagtaagctaattaggttactagagtagggcgaaaacagaatgcactggagtttatgacttacttcacaacatgctggttgcacccgccccatctggtgttgctatcctggcaacaaacggcctgggagcaaaagatgtctccacagaagaggcagatgcttggatcggtgagctccttctttgaatttgggcaccggcgccggttggcgagctcaatcaagctgtcgaagtacttgggtaggccgactagttcgaagatggctgggtgcgaaaggctaggccatagtttgtggtctccgatacgaacgccagcacgagatgcgttccagtggaagatccagcctgagatcatggcgtcgaggggcttaccgctcttgcgagcaggcttcactgaagcaaatatttcgtcaagagaaggcatattcagaatcttggttaagcgatccagctctgacgcgcccacgtcgccgaagcctgtgctggggaactcgacgccatgttgcacatgaagtaaaatgaccgcttttcgcaggaaggttagggcgtagcttgatatgaggcggtgtagagcaatgatcacgccgggggttgctgaatcctcgccctctttgacatagcctagttcagttggatgcgaagaccctattcctctgcctacggagtttgccttgagctccgagaccacagtgttgaagaactgccgagtgacctcaaaccgttcgtcagaaagttccatatctaacaagtaatgcgcatcaccattctgggccagctcttcctttagtcctatgggccagacaatgtacgtggtggcaaccttgacaatctcagcgacatagcacatctgcaccaagtggcggacatcaatatccaggacaggaagaagggcaagtgaacattcggcaagaaacacgaacgtgtccttcgcgaatagtggctcgatttggtggacatcagcgaggagtgatgtaccttcaaagaatggatggcccacaaacagctggcatagcttctggtgatgcatctcacggaactcttccagggaccgactttggtttccgcctttgctctgtaaaccaccgactgatgcgtatgtcaatgcagtttcagccaggacacgaaggtgcgtcaacgttaattggggtattttgtcaaggagcgtgcagcctggctcggattcaacaccacgttgagcgatttcaaccgcagcaatactgaagccgaagctctggaataaagagtctgtgtgaataatatcatcattgcccagagtctctggcggatggctaaaggttgaatagatctgattcagccgaagggtctgcttcagccgtgcgtagatctgcagaagctcagtcatcggcgtatcactggaggccagggattgttggggggaattcggagatgaaaga

SEQ ID NO: 1786 - DNA, 4077 bp, Emericella nidulans
gatcgttttaacatcatcaacaacatcttctagcactttatctttgacttcatcgttgacctcaacaaccacaatctcgctcacctcgtccacctcgacaactagggcgaccctgcatacgacctcgttgccgatgaccacacattctagccttcccaccccctctggctcccatccaacctcctccgagtcccaatcttcagcaagaatgacccccggctcacaagccggaattgtggtcagcatccttactcttgcatttgtcctgatcgcgctgatcaactggcgattgcaccgccgaaagcgtgctctgcagacggccatcctcggggagaaatatcgacccccaccaaacaagcaaaattcaatctacaagttcgcatcgaatctgtacacaagcagtaccctgacactggtcaatgtagctgagatgttcaagcatcagagcagagacagtcagggatccatcagcggccgtagcagcagtatctattctaggcagccaacgccgtttccgaccttatcccaggcagacttactgggctcctacagagggggtctgtggaggaaccgtgtgtatgatgcagcaagtcgtatgtattttgctctttcttccgtcgcaaacatggccatggacaaggtcaagtcagtgccgcagaagcagaaatcagcggcgataaggaggagtcgggagtcgtacgagtatggcttttccgaggattatctgcatattcccccaccggagccagctgctcttcgaggtgttgtgtcaagacttcactctaacagttcctctgctctacgctccattacaaggaagtttaacccaccgcggccgccaaccgacactgcgtcgccaacatggtgcagcacgaacagccctagcccttgcctagaagagtacgatcggaacacaccgtcacagcagttccaaggcctatgcgaagacgcagatattcaggacctagtcaaagtgcgaagtgtctcttctggtatggtggccatgagcaatcccgccgacatcagcgtagattccttggctggtcgtctctcaggagaaaaggaacgccagcctcagcattcgcctgaagaatcactgccgacgcaagatccaagtaagaacaacctttctaagccacaactgaagttgggtcaatcagcaattcagcgagagatttcaccggtcaagttgtcgacggttcaaatgttccgggttgagatgacctttgtacctcgtaacgacggacatatgtaagtgagcgaaggacagcttgtgcggttggagcagaaattcgatgacggctgggtaagtctgctgttggcatcccgataactaatgatcactgactttcgtgttcaggcgtggtgtactgtggtcgaaaccggaatgcagggccttatccctcgggcctgtctctcgacctggccccttaaggaaccccggccatatacgcccagcagcatctgctcagaccgtggcccaggaagcacgaccagcctttctcccacagactcccagtctgttcggttctaccagcggcattctccgggaacatcaaagtctggtttgggatcaaagccgccgagcgtgaaatagcaagtattattcccggcactaatatgtccggtcaatcctgtaaatataatactgcatatattctccatgtcttatgcgtatggtcagaagttgtgtgtatatgcctttatgaaccgtattcgacgcaatgttttatccaagatcgagcccgatattgcactgagcagccccatgatcatctagatttgtgccaggcaccgccagtcagtaattcctagctactcgtactatggtcacgctgataagaggctctatgccgcgggtgtcattgagtatattcgactgctcagacagtggaaatgcagaccagatattacacctgcgcagaggcaccagatggtttccacatgaaactcgtctatttgtcataagtaactactatgctgcactttgccgtttttgctgctgcgcatgtcgaatgaaatattgtgcttcagccctcagttctaacatcaagcggtcgtagtagtgtgtgtcactccccatgagctctttctgtctatatagtactgacaacgaaactattaatttgcaataaagcccttcaatcttatctttagtattcttatacgcttgttgagaataccggttggcctttctcaacacgttgctcgtcagcttctggattccgggcaagtggaattcctgtacagaagcggaatcatgaaccgctagcttaaacataatcataccgagctgaactacgtgaagcggatcacataggggcaaggagtctccccgaacccagaaatgctgttctcctgtactttgttgacccggtcgttaggcgcattccacatccgatcgtcagaatcgctgttacaaagttagctggttaaccggaaggagcaggggaaaaaatggaaaatgtacatcattaacccaacatggtggatactgctgctgtcattctcgcagtcacatgctccgccgaagaagacagcatcaccaggctggcgctcttcataagggtattttctgtgaggctatgtgagcgattttgatcgaatgttacttgctgcagacgtacttgtacccaagtgtctcctcgctggcgcagtacatggaggacgtgacgcggaggccctccgtgaagaggtcacggccggttacctggcacactgcccagcagacaaggccggaacagtcgtatcccacgtcgccgtagtcatatgggggttggtcatcgctgggaccgtcgcaagagccgccgccccaggcgtagggagtcccttccgcggtcagagctttgtcaaggatagcctggcctacggtgccctctgcagatggggcggccctgacagcgcaggcgaggagggagaccatcgcgagatacttcatgatagcgttgatttatgatcgagtttgatgagttagagtctgtcgttaattgggagtcaatacagaattctggttccagtctatcgagacagtagcccttttatatctacttcgctggagtactatcaccatcatattcgctgatcattattaggctgagatatatttaacaagatcagcggctttcacgttacattcgccttatacattattgaacaggaattgattgtctcttggtgtcgtatcgctaaaatgatctacgctgaatacgagaaaccaagatcgagataacgccgttgatggggccgcgtgaacgggaaagaccaagcccaatggctagacgagggctgatcttcgctgattgctactctgctgtgacaacggcagggccgctaggtatatgagataatggcaaggggcgacaggaggtcaaggtcatccccacgcatcccccgacgagaatagtaacaactaattctggttatgagggcaccttgaaaggcatttgttagtagtttcgaacatctcgcaccagcaacttactaaacctagtactcatagacatttgcaaacgacttgggaggaattccggacagcgagttccctaaatagtagcaaattcctgaacaacgtaagagctccatttccagtggaccagtagtcccaggcacttgtcttatcatccagttatcctatgtaccaagtaggaactcgactggatcttggaggtcctttcatctgctgtagcaggtgcttcacagacgattgtacaagggttgaattcgtctacctctccgctcaagggtccgtctgtcttgtcgagaatcaattggatgcaagtcgcagcatcaagagcacgctaatactcttatcaaagcggagcgtagaaggcaagaagggctgggcttatcttgttgactgacctgagtttaatgactcctctaaagtatagcttcggtctctcctcccatcatattgcattttaacacaggcaaatgaatattattcagcagatctacttgcctgtagaatcacgattttctctttgcattccgccatacagaagcacaccatactccaccatgaccttgcgttgacgccagaatcgacatgtcgggaagcctttaccacaagagcgt

SEQ ID NO: 1787 - DNA, 2400 bp, Emericella nidulans
gatatgaccatcaagtcgtaagttgattcacgacttagaagacttcggaatgtgtgccgcgcatgcaacgtctgaatagcaattgcatatgggaataccatggctgtggattctttctcgatcgcaaccacctcatcaaagctaatgacaagcgtggtaacccatcctaagatattgcttgaaaagcaaatatggccctcagaaatgtaaatgcgtccggctaagatgatctcacgttgcaaagcacagctataatcttcaataaggtaatcgtcttctgggacactgcggaaaagctggtgaaagtccctgttgcgttttttgcttgcgacggcaaatccagtcagtcggggtagactagcattagcgcctggaaccccaagtgcaagggcgccagcgccaatcgcaccaattgttgacgaggttgcaccagatgagcctctgtggcgtcgccgagctagccgactccgtacactaccgcttcggaaaggtctcgtgccaacttccccctcgaatgcgctggcacctgagggagtctgggcgcctgtaggctctttcattgagctagcttggacatcagaaccgtcgtccgccaacgcgctatccgccttttcgtacgccatagtgactgcgcgtgcaacccgcatatcttcaagctttgcagcagcatcatctcgctgggaaacggctgggcttcggcgcgtttctggtcctagatcgggcttcgtaataacgacaccatctggagttgagatagatccacccgggggtatatcgagatccaaatggctgaaattgagatcaccagaacctagagtgtcaatagccatgggcttcttttcctccggtggagctttgttgatttcatcagattctcgcgcagtctcgtttgacggctgtgcttcggagtcattggcttccggtatggttggattacgggccttttgggcattgagagtgtttgtcagggtagaggcggcagtctgtgccgctgaaaacacggaggaaaagaacccagtctggggattcccgaccttcccttcttcaattgtcgggctagcagctatcgaatttgatagcttactcggcttcggatttacagaagaagtagacctaacacgccgatgagagatcatgttgcccgaacgtcacaacaacgccggccggtaaatcgcgggatgtgatagaggacggagactctgtgataccggagttcacaacaagaggtgcatgttcaaggtgaggggtgggcggcgtcactgtagtagaagggaatgggatggcactgtgaggaggtgtttgaagacggggacgctccggcgaagatcgaaaggtctctcccatgagatccgtacgtattggttctggaattgatgggatcggcgggggcgcctcagctatgctacccggggccatcttcgaggacaagctgcttcgtcggctcgcgctccacgaactctcacccgacgttgattcggctcggtcacggtggacgattttcttgtcggagctgaacgcattctttaaacgctgagtctttgatacgtttttcttcttgtggttacggtccgtaggcacactcagatttgagcttgctggctggctagccgggcgcactggttccgtgtcaagattcgagctgcgaagatctgaggttgagccactgacggccgactccgcatcaccatgcgctccatctgtatcattagcgtcagccgaggctgttttgatgagaggtgaagaggccgtatagaaaccagaatgcgaatcatgcgacgtcaggggaggggttctgaaagccgcattgagcgtcagtatcctgaaacaatccgtggatctaagctgcggacttaccggtcgggctcagagtcgtcggttaggagattcgaggggtcgtcttgggaaccattaccttccgggggaagcaacgaggcgctagacgctctcgcgcgcggattgttagagtaactggacaaacccccatcattggtctccaattctagagtggctggaacttcatcgaccagtctcaagtcatccctcttcttcttacgtttctttctcgatgcgaggagcttcgacagaccgctagatcccgatttagatgattctgcctcccccgcttgcctgtcggacgtggaatcgatggaggaccgaccattgctccgaccagagcttccaacagtctccaagtcgaccggaattgtctttgagcggatcgatctatttaagggcggagcatcggttggcgcgggctcgggagggtcagggagggcggggatcttaagcagtgctacaactctctccctctagggggttaggtaagtgaaagagaatcacatccgagggtggtagtatgaactaggaagattgaatattaattacacatgatcatatggg

SEQ ID NO: 1788 - DNA, 3711 bp, Emericella nidulans
gaagagaagtttacgactatttagcctagatgaagtatagttttgtgcaatgctcgatagcgtagcatacaaccctacctagtaatgagctacttgggctgctagaataaatctcccaatccaagctaatgtagtcagagctgaacgcaagtctcgtacatggccctacgaggcatcacaatagccctaaagagtatcacgtgaccatactagcaccgcaatgagttcaggatccgacaatagcgaggctgtatccaagtgcgccgaataatgtctatcactgtagaaatatatctgattcgctcagctggtcgataggcgaagcatcggagttggcggagttggcggagttgcaggacttgctggattagggctgaggtcagacggactctcactctccgctatagacactgggcgatgttgtaggcagcgatgggagaatgtgcattgcacatggtccggagatttctggagtcaggtcatgcagtctagatcctgactgcagtagaatgtgcagattccggagcttggggagttaacctgcagtaagctcagctcaagcaatgatcggtaggtaggcctggtggccatatcagctatagatgcgatccgcgcctcaagcgcatttcaagccctccctcttcaatacgtttgcgataccttagagaaacaaatcaacatccatcaactggcacagattcatctaccaactcaacgtgattacccgtccagctttgacctaaacctccataatccccatccacaaggcaccatgggcagcacatcttccgagcccacatacgacagtgagcccatcgagattattggcctttcgtgcaaggccgctgggtccgcagacaggcccgagaaactatgggagatgcttgcggaagggcggaatgcatggtcagagatccctgatttggggtttaaccacaaggccgtgtatcatcctgatagtgagaagctgggacgggacgtctttccttctagacttgagtttcagtggtgaagtggatgggaagcaagaacctggccagactaacgcggaatcttcgcagacgcatgtcaaaggggcacattttctcgagcaagatgtcgggctcttcgacgcggcattcttcaattattcggcggagacagctgctgtacggtccctatgaacgatttcaggatgaatggccaggctaactgagcatgatgtacggatagaccctcgatccgcaattccgcttccagctcgagtccgtctatgaggctcttgaaaatggtaccaccctccccccaacagcccttgcgcaaggctgaacagagagtacagctggcctgacgattccatccatcgccggcaccaacacctccgtctacgccggcgtcttcacgcatgactaccacgaaggtctgattcgcgacgaagacaaactgccccggttcctccccatcggaaccctctccgccatgtcctcgaaccgcatcagccacttcttcgacctcaaaggagcaagcgtgactgtagacaccggctgctcgacggccctggtggccctgcaccaggccgtcctcggcctgcgcacgcgcgaagcagacatgagcatcgtctctggatgcaacatcatgctgtcgccggatatgttcaaggtgttttcaagtttgggaatgctaagccctgatgggaagagctacgcctttgactcaagggcgaatggatacggacgggcccagggcgtagcgacgattatcgtgaagcgactcgcggatgcgctgagggacggggatcccgtgcgcggcgtgatccgcgagagctatctgaatcaggatggaaaaacagagactatcacctcgccgtcacaggaagcgcaggaggcactgatcaaagaatgttatcggcgcgcggggctgtcgccgtcggatacacagtacttcgaagcgcatgggacaggcacccccactggagatccgattgaggcgcgctcaatcgcgtcagtatttggaaagaatcgagagcagccgttgcggattggctctgtcaagacgaatatcgggcatactgaggcggccagtggtcttgccgggctgatcaaggtcgtgctggccatggagaaggggttcatcccgcccagcgtaaactttgagaagccgaatccgaagctgaagctggatgaatggaggctaaaggtggcagatactttggaaaagtggcctgcaccggcggagcggccatggagggcgagcgtgaacaactttgggtatgggggtacgaacagccatgtcattgtggaaggggtgccgaagagattatacacaccggcaaatggaaatgagaccggccagataaagcatgagacagagagcaaagtgctcctcttctctggccgcgacgaacaagcctgccagcgcatggttgccagcacgaaggagtacctgaagaagcgcagggagcaggatcctcccatgacacctgaacaagtcaagaccctcatgcaaaatctcgcctggacattaacgcagcaccgcactcgcttctcctgggtctccgcacacgcggtcaagtactcgacctccctggacaccgtcattgacgccctcgagtctccgccgccggcctcaagacccgttcgcatccctgactctccattccgtattggcatggtcttcacggggcaaggtgcgcagtggcacgccatgggccgcgagctgatcgccgcgtacccggtattcaaggcaaccctagacgaagcggaacagtatttgcgccaactgggggccggctggtccctcatcgaagagctgatgaaggatgcagccacgacaagagtcaacgacaccggcctcagcatccctatctgtgtcgccgtgcagatcgctctcgtccgcctgctcaaggcatgggggatcactgcctcggccgtgacatcccactcgtccggtgagatcgccgccgcgtatacggttggcgctctctcgctgcgccaggccatggccgccgcctactaccgcgctgccatggcagcagacaagacgctgaagagcgcagaggggccccaaggcgcaatggttgccgtgggtgttgacaaggctgccgcgcaggcatacctggaccgcgttgagaaatcggcaggccgcgctgtggtggcatgcatcaacagccccagcagcatcaccattgccggcgacgaggcagccgtcgtcgcggtcgagaagttggccactgaggagggcgtctttgcgcgccgactcagggtcgagacgggatatcactcgcaccatatggagccaattgcgagcccgtaccgggaggcgcttcgcgccgcattggcccaggaagatgctgagtctggtaccaaggaccagactgatgtcccgggctttgcggatgccactaaaccgggcagcctagaccacaccgtcttctcctcccccgtcacgggcggccgtgtcacagatgccaaagtcctctctgacccggagcactgggtccgcagtctgctccagccagtgcggttcgtcgaggccttcactgatatggtgcttggctccacagatagcagcaatattgacctgatcctcgaggtcgggccgcatacagcccttggcggaccgatcaaggagatccttgccctgcctgacttcagcagcaggaatgtcagcctcccctacatgggctacctcgttcgtaaagaagatgcgcgcgactgcatgctcactgctgcc

SEQ ID NO: 1789 - DNA, 3423 bp, Emericella nidulans
gtattacaatgttgactgcgcacgattttccgagcgcgcatgtcgccgacgcagccggaatggacatgattctcgtgggtgatagcttggcaatggtcgctctgggcatgcaggatacgagcgaagtgactctagatgacatgttagtgcactgtcgcagtgttgcccgagctgctcagagcgcctttacagtttgtcaagcctgatgaagactttgtttgtgcccacgatcctaacaatcgttatgcaggtttcagatttacctatgggttcgtacgaggtgtcgccagaacaagctcttcagtcggctattcgaatcgtgaaagagggtcgggtgcagggggttaagcttgaaggtggggaggagatggctccagccatcaagcgcatcacaactgctggtattcccgttgttggacatatcggtctcacgcctcagcgtcaaaacgcgcttggagggtttcgagttcaaggaaagtcaacgacggacgcactgaaactgttaaaggacgcacttgcggtacaagaagcaggtgcgttcatgatagttatcgaggccgtaccgccagagatcgcaagtattgtcacacaaaagctcagtgttcctaccattggtattggtgccgggaacggttgctctggacaagtactcgtccagattgacatgaccgggaacttcccgcctggtcgcttcttacccaaatttgttaagcagtatgccaacgtctggaacgaggcactccaaggcatccaacagtatcgtgaggaggttaagagccgagcgtatcccgcagagcagcacacataccctataccgaaagaggaactggttgaattccagaaggctgttgatgaattacctgaagagaaatgattatggaatagttgcgtcttatgttttgctccgcttccttcatcaactactttggcagtggcatttcagggtgtggtacctactataacctttgtacaaattgcttctaaacgcggtttacgaaccattgcacaaatatttataagctgtagtatatatgaatttgatttgtgatgctgagctcgtgcttaacgtgtacccgatcccgccgccaactctttggaactttgaaaacaagaactccattaacatcaaaaatgcatcaagtagttagcgagtaacaacaggctgagaagcgctgcctcgtggaaatatttcgaagacccaaagcacgttatcattacaattaatattacaaaagtcccagtggtgctaggtggtatggatcataagattatgtaatttagaatgtatcaacacgtgacatatcatgtgactgactacctaaccacgcatgttaatcctcgcgtgcctattctcatccaacacttcttcacgcatcactgctccagcaataaggaagctacctcgcgcactagtgttgatattgagtatgtgctatagttgtgtctcacatcgccagatctaagagctttattgccttgttgtcgtagaacagatctgggtggcgcgcgcgcaactgtctccagaggcacacctgttacctacaaccgcgccgtagaaatctgaacctttcaatcgctacaatcgatcgccatggctggtaagctcagtactatacgctggatgtcttgcgccaaccacattgtccttgtttaggcgactagaactccagctatacccctcacgtggattagtgagctaactccagcgccagatgaaccgcgtcgctccggtcgctcgaccaagggccagcacaagagcctcgacatggtcaacgaaacgccaacaaagaaaacgaaagctaaagcgcagcccagagataaacccccgaaaccctccgcagagcctacccccgcgcctagcgaggaggaagagattatccggtgcatctgcggcgaatatgaggaagaggaagacatcgagcgagatatgatttgctgcgatcagtgttcagcatggcaacataatgattgcatgggtttgacattcgcgaagggcgaagtgcccgatcagtacttctgcgagcagtgcaagcccgaagaccatccggtgctcatggacaagatagcaagaggcgagaagccatggttagaggtagcggaacgaagaagaaaagaagctgaagagttgaaacaggcacgacgcaagaagggaaggagaggaggcaagagaggcagaccaagcgaaccgaaagagcccaagccctaagaagagcacaccctctcgtacaccggcacctccgagcgtcaggtactcctcccgctgaaccacccagcgcctgtgatcgctaccccagctcccgagaaaaatagtcattcgcctgagaagccaccatccagttctcagaagcgaaagctgagtgaacaggaggtatcgacgccggagtcggtaagtagttacattccccatcaacgctagactgaaactctaactcacatcaagggccccaagacgaaacaggcaaagatttcgccgcctgctgcaagcccggcacctcacgtcaaccagtcgccagaggataaagagccagttggccaggatactaatcaaacgccggccgcggacactacgaagactgaacgactgaagactcttgaagatatcaccaatccggctaggaggaatgctgctagcgcgctaactaaagtgtttgtggaccagatctccagtgccctggcgggagggtctttcaaaatgtctgaaggcaagacgggggaggaagttggtcagcaacttggcatctcagtcgaggaggctttgtatcaaaatctaatggggggaggtggagaggctacctcagaagcttataagatacaactgcgggcgattttgttcaacgtaaagaagaacccttctctacgggatcgtctgctcgtaggtagtttaactcctgatgccctctctagaatgagctcccaagagatggcaagcgaggagctacaacagaaagatgctgagatcaagcgagaggctgaaagacagcacatgatcattcaggaacaagggccccggattaggcgaacccataagggagaagaactcgttgaggatgatcagactaatgtttctactgagcctgtcttctcaaacattcctcgtcgcgttaccgagacggatgggagtccggcggcgcagagtccaactagtccaagtgctaagcagccagagactgacggccataaggtcaagacagacgctacaccagctgaacccacgcctcatgacgaacatttcccgacccggagccattctcctggcgccggtcaggaccaagtcttcccggaggtggccacacacattagccagccaatacccactggcaacgtccaggccgatgcagagattgatcagttgttgaaagacgacgacgaacccgagtctccaccatattcaccgaagaccaccacgatgagggagctgtctgg

SEQ ID NO: 1790 - DNA, 4183 bp, Emericella nidulans
gacgtcgctggcgcaatacggacatactacgtctggcagagtatgattgcctcctacgacaccacttggaaagggtggcctgtcttgctggcagcaacggtggaaatcaacctcggcctggtatggcagagaatccccgctggcttttcagatagctaattgacatagatttgcgcctctgctccagcattacgaccactggtcaactttttcatcccccgtcttcttggcacctcatatcgctacggttcggatcgcggataccgctcgagaaatttcgagaactcgcgccagtcgtggaggctcaagtcattgactggaaactcgtcgaaaccatctaggcattcgaacttctacaatgtcgatgcaaaaatatccagtgatcacctgaaggttttccggactgtctagatgaatccgcctgcctacacttgcacgtgttatgctccaccgtgatccgcctgtgatcccagcaggcgacttcaattggcttatatggggacgtcgcgcgtctcaccaacgacagtgaaactctcaaaaaccctacgttgagcgaaaggtcaatatcgcctccgactccgtctatacgaagtgatgtaaggagtattcccagccgtcacacgaaggaatgtgtgtaacctcgaccttcactatttctaacatctctttgatgattcttgtctatctttaattatcttctacaccataacatatgggatggttctggaacctagcactctacacaaataacgagtacatgtaaatatgttatgagggcaaatagcctgctcaattgccaataaaaaaacgttcgacttcgaagacggtaataattattggtgatagctgctcctccgcaggtcaacttctagaaaatatagttgtgagccgatgacgaggacacgttggctaagatcagtaagtggccattgcgctcgacaccccaattttatgttataatccccgcagtgacacaacatattatagtcacatgttctctaagaacagcttgactggctgatggatacgactttgcatacctcaattatctacttaaacgggtagacaaacaattgtcatctggatagcgagtaatgacagtcctcgctccctttaggcatctgtttccgatctagcaccaaatttgatgatcgcggacaatttgccgataggtaccccgtgactctcggtggcttcagttcacgcatcggcaccgaaggaggaattccgtgatgtctttcgccggaggtggaaccgccacaccatagagggaaagaaaaacggaccgttgttatcaattacttctggtcttggagatctggatgatggttcggtgaagctgacgaatattattggtcgaaatcgccgaagctgccatagcttcttctccgcagggctgctgggatcacagcagtccatcaaaataccagtggtatttaagaccgcaagcccgcatttcgttcgcagagttggtctgaatttatttgtatctcaacttactcttacgatcttctcatattattcctccggtttcgtatacagtcgagtggtcgtctcgaagctgtagtatacttcttatctccccgctcttatcggagcttgatcaaagggctctttctcccacttcctttacgtcgtctttctcctttcaacctgatcctatccgtcaagccacaatggcttctgccttccgctccagcctgaagctgcgggcttcagctcgtctcccagctgttcgcactattacaaccacaccccgccttcgagctgcggagaagccttacttccccaatgagcctactgctcccaagctggctacggccattcctggcccaaagaacaaggccgctagcgaacagctcaacgaggtcttcgatgtccgcagcttgaacatgctcgccgattacaccaaatccgtcggaaactagtacgtcaatttgccgtcaatctaccccgcgcagtgtttgccagggctaacaccgaaccagcatcgccgatctcgatgggaacatgctcctcgatgtgtacgtggtcaatcatattttatccctacttgtagacgaatggcatttctaacccgactgcagttatgcccaaatcgcgtccattcccgttggttacaacaaccctcacctcctcaaggtggccgcttcgcccgagatggctacctccttgatcaacaggccagctcttggcaatttcccttccgctgactgggctcacatcctgaagaccggcattctgaaggtcgctcccaagggcttggaccaggtgtttaccgctatggcgggttctgacgccaacgagaccgcttataaggccgctttcatgtactaccgtcagcaacagcgtggcggtcccgagaaggaattcaccgaggaagagattcagtctagtatgctgaaccagacccccggatctcctcagctgtctatcatgtctttcaaggctggtttccacggccgtctattcggcagtctttccacgactcgcagcaagcccattcacaagctcgatatccccgcctttgactggccccaggctcccttcccctccttgaagtatcctctcgaggagcacgctaaggagaacgctgaggaggagcagcgctgcctgcaggaagccgagcgcctgatcaaggaatggcacaaccccgtcgctgctatcattgtcgagcccattcagtctgagggtggtgataaccatgcctcccccgccttcttccgcggtctccgtgaaatcactaagcgcaacaacgtcctcttcatcgtcgacgaggtccagactggtgttggtgccaccggtaaattctgggcccacgaccactggaaccttgagactcctcccgatatggtcaccttctccaagaaggctcagactgccggttactactttggcaaccctgccctgcgtcccaacaagccctaccgccagttcaacacctggatgggtgacccctctcgcgctctcatcttccgtggtatcattgaggaaattgagcgcttgtttctggttgagaacactgccgcgactggtgattacctctactctggccttgagcgcctcgcgaagcagtaccccgagcacctgcagaacctgcgtggtaagggccagggtacgtttattgcttgggatactcccaagcgtgacgagttccttgtcaagggcaagggcgttggtatcaacatcggtggtagcggacagaacgcagtccgcctgcggcctatgctgatcttccagaagcaccatggtaagttccctgttatcgctactaatgtgaacatggctaacttctcacagctgatatcctccttgagagcattgagaagattatcaagcaactgtagggtggtctgggctaatgattgcttattgtgcgtttattccacggcgttataatggtaaagtgggagcaggttgtctcaaatcattgcatttatcacaattatatgagttcgagttcagaaatttgaagatccgatgatggatagttcaagctattgcagctggtcactgaatgctaccaaagtcttggcctcccagaatcgcttgtaatatatgtaaaccagtagatatcataactcccgcggcgaaatgaaatcggcttccagaaagaactacccgtaaactccgattcgtgtgcaaatatttagcagagacagagcagaaagggtatctcttgcgttctctggtatccctgagcaacaaaaattttcggccacaagccacgtatgcctcgcttttacgcataaagtagcagatagcccaacaattacccctcttcctcagccgtacttccatctctcggtatgtactttattccagcatcctctagatgcccaataacttcggtaggaagcgagcctgtgactttcaccgcatatgtcccagggacataaccgtccagtcgttgccagcgagctacccagcttgttgccgggtcattgacagtgactaggccctcaaatacctgtgaggtgcactcttgaatgttgtcgttgttgccgcggaggccaaggacattgtcgcagttcggacaaccttcacgcatgaatttctgattgagaaaaaccagttaactattgatgctgatagataggggtgcacacgatcagggggcttacgaagtgtagctggacgagtgagcagaccatgcaggcgcggagagtgcgctgcaggctgg

SEQ ID NO: 1791 - DNA, 6447 bp, Emericella nidulans
caggaggattgttagcgaactccttcaacctatccgtgatgatctcaaaaaggtcgcggatgtcaccatttttaacttcccaaataaagcagaacgagcttctgagctccggcgtctgcttaacaagattggtgactttatcaacagcaacttgcagggagagaacactggttctctctcctctctcgaaactcgactatggtatgtcgaatatcgcacatctttaagaacgatatctaatattatgcttaggcactatgtctctgtccattactggcccaacaaagacgcgggaggagctaaacttcaagaaatgtaccacaaactgattgaagtccacaagaaatctgccgaacacactgtcgcctcaaaaggagactaaactatctcgatcgcagcgaaaagcgctttttccgaatctgtttgaacattcgtttttcttaccatttctcgtttatgcatacttgggaaagcatggcgagcggcgtctggtgtggtccacttcagggaactctgaacatcatcccctgcagtggcctcgataatgatgttgcatgagatgtctcttgtttttatctattttgctcccttcgtccacttttttttttggctcttcgtcttcttatttggaacgatccgggctcgggttcaggctcaactgtatttgaccaaccatatcttcttcatcagcgctacctctacttacctccatcacctatactattatcatcatctagatccgaaccccttcctatctgcgctggcgttggggtcagatgtttacgggcattcatgtatcctactcttattcattctgggagatatgctgaaatgttgctagacgttgtttctatctctactgcgccaactgtgatttagcatgttctgttatgattcacctataccttcctgggcgaagtggggtgctttggtggctggctacctaccctgtcgggtaacagatataactcgagaaaagtgttaggaacttgagaatacatgatgggacagactctacttcgtgtaatcttataattagtggcagtgtgtaaccctctgattaggtatttatagtccaggtatgctgtgataataagaccaagtactgaaatgatctagcgccagaataatgaacaaagtatgaaaacccgccgagcctaagctcccattacccgcactttcttacgtgtaaagacagatagaagacagaaagcgtaaaaaaaaaaacctcaaaacggtccctggcttaggaagtaaaggagagcgtagaatataacaggcctacaaggcaggagatatcacggcgggatttggtaacctgcggccgctatagggtgcgctggattttcgggcatcccgtttgctggaacaacagacgtctgcccagtggcgccctccgcgctgaccagcgtgctaagaagccggagttctgcgtccatcaagtcatcgaatatagcttctttctccaaccacgccagtttcctcttcggtctaattttctcccaagtgctcttgagatctgcaccttctttttctgcccagtggatttgcctgcggagaagcctgtataactgatgtgggttcatttcgagctcgtggtcgtcgaatccagtgtcagaactgaactcaggaacctcaaactcgtcaaggtcctcagtgccggctgtgtcgtcgttgacaccttcgctgtattgctctgaatcgtcgcgaggtgggtgtgatagtttcagtttgatgcgctggagcttggaggctggggtgccaacaggtgtgccgccggacgagaggatatcgtgacgtttgggaacagggtcagacgggcgcagggcctcagtctcgtgtacggttctcatgtgctttgcgagggcatcggaacgggtgaaactgcgatcacattctggtcggattgtaagcatcgcgttgagctcattgttacgcgaaacaaatggtaaagaagcgaaggggtaataaaacataccagggagcgcgcagtagaagggcttttctctcgtatggctcctcatgtgcgcacgtagcgcgtagccgcttgcatgcgtttgacccttccgagtacaatcggaccattcgcaggaatatttcttctgccggctaccgacatgctcgttgtggatgtgttggaccaagtcgtccatgttcccgaggtctttaaaatcacatccttcccatcggcacacggtaacctggtcgttgcagaacccgctgtagtcctcgtcttggtttgcccctatgagcgacagagtgttgggtgagttgggaatttcgccggacgtatcggacgatatagaagacgacggggacggaggcggaggtagctcatcctggaaggaagttgacacgggtgtgttacggtcccaggaagccatgccggtgcggcgtcgctttgacgggggcatgttagatgatggtgttgagacgccctgcttgggatcgtcgcggtccgacatgtcgtcggaggcaacggaggagaggggggagccaggagaatcggccattgggaacggggagtaatgtggacgggcggaatgagcgaattgatgggtcaagagcgggggcaataaggtagcgagcagatttggattggggagaaatccagggtttgcttgacgtgatgctggcgtctggagtcgagtatacagccggcacgtgatgaggctattgtccaccacttttgttctttttagcttcgcacacctccaacctccaacccacaaactacaacaaaacataaatcaacaacagcacattagcgttactgagtaagttataaccaggttatccttgcctcaacaccgcactgcttcaatgatgatcacttcaagaattctgcaattccgacaatctccaggcttctgtgagattgcgtgttgacctactacacttgacctgattgaaaatactcttccgtggcacgctttgtccaaaacgctgttggatcaggctaacaataatcctagttcttccaggttcaatttcaatatggttgtcacactgccttcgccggcctgtaggtgccgttgagactgccagctcgcgctgccaagctggcgtttcccgggctaccacatcaccgatgacatgatttagatcccccggactcttcgatctgatcatatctgctaaaggtgcgagggtctccttgcgtaactgtgctctgtgtcacccggatcggacggtctcaaggtttgcgggcagccactcataggcacccaatcggctttgcttcgtataacttgtagtcctcgaggaaaacgcagcgaggtggaggtgtcactgcaccttgaaggacggcgttctacaggtgttggacccttggaaattaaccctgcctacaagttaatggtcattcaagagcgacaaggctagaccttgttagacgcggctcatgctctcatctcaagcgtagttctcatcttggcctaggttattccgtcgtcaaccgggacgtggcctattgcagttgggcccaagaaggcctgatggaacgaaatctcagcctaaccgtgccgcgaaactcaggagaagaggttttcacccttctgccaggctaggatacttttcctgacagcggactaatagccacggatatgcttaaacatcctcttctgaaatataatcgttgaagcaaccgcgttcattagtgtcatttcctgcagtatcgtcactcataacgctaaactcttccaatactccaaacagaaagacctatcccaacgaatccataaagagtagctaaaatataataagtataatagtcaatcggcgctccaccaactacaccaatccaatctcgtcactcccattgatcgcctctcgaaactttttcttcaaaacttcaaagagcgtatcaacaaagccttcagggtccttcgcggcatttgcatcatccttagctgtatccatgcccttctccttcccattgtcaacgttgttctcaagctccgtcacagtgggcgtagatgcacggctatcgtcaatcaccatcgtcgcaccactatcctgcccattcatgtccgtatgcaatttgttgaatttctccagctcctgcatgcccagtcctgcgaggatggctgccatcaagtctgtctcgttggggatcaatctctattgttggtattagtggtttgcatctatttcacaatacaaataaagtagcactggtccggtagggcatgacgaggtttgacgtacggggtcagggactgcagatcgggcttggatctcccccgctgtttcaggacgtatagcgttttctgctgggatggggatgggaaaggctgttaagggtgagataaagatggtgaaaccaaggactaaggtggcccatgattgttgtggtgtcatcgctgtcgtcgtcctggtagtagatctatacaagtggttggagatggtgagatgtggccgtacgaagcgaatcccaaactgcaagttgcctaaatataaccactagctagatgctccatcctgacggatatatcgaacaggcgtgtggaatgaaggcgtcgtttcgttgctaggggtggcgtcgctccgctggcatgcaggcagttcccaacctaccctgcccatccccatagaagtagactcagtgcctagttcgtccgagccaagcacggtccgttttgaagaggcaatgcataaacgtctgcactccaattaactgaccaatttttggagtatctctgctgaccatattctgtctagaaattggccttagatttgactcgactcaaagccatttcctatgaaggcgggaatttccgctgaaaatcctgtctattcagtcaaagcttgcacttgaagcttggatcagttgaaacaaggggttctagcaaagccctgagcattccatggctctgagacagaggcactagcttggggctttcgcgttggaatgtccaactcgcgtttcgatctagtggtttgtttacagtcgataatcgagcttgtagagtgcctggaggtggcggtcgggatctcgggatgtgtctgatatgcccgtctgcaactgccggttctctgactctagcgtttgggtttgtcattcgtgtagtatcttgacgttcttgacgttgtaaattgggtagataaggtcaaattaagtatgtatccttgtctatacactcaaagggtttgatatcttcgaagtagaaagggtagagttgttttgatcgcgaaaatgccccgccatggatctgtctccgcccgcgatgactatgacagcattggtgcaatcgacgtcgaaattcaaacctagctaagatcaacgaagataatcagtggtgctccaagtctcatcggcaagataccttaccttgactgaatcgaacagcataacatcaccacaatgtccgcccagaatgaaccgcaagccgaagcacaatcaccatcctcgggagaggaggggtcctctcccttaggctcatccctctaccaaaccggcttgcaaacccgccaatccgtcctcggcagcgcgcacgttaaccgctcattgtccaacagcaacgcattcacattcccaatgcaagaagccatcaccgagtttgcctggggctcgatctggaaccggcccgggcttgaccgtaagcagcggagtctaatgaatattggaattctgatcgcgctgaaccgccagctggaattgggagtgcatgtgcgcggggctgtgagaaatgggctgtctgagctggagatccgagaggcggttatgcatacgcttgtttattgtggggcgccggcggcgatggaaggaatgaggactgttgataaggtgctcgaggagctagaaagggagggggagatcaaaagggagttgaaatgatggcgtttgacttggattggatgaaagcaggtgcgaggacagaggagggaggatgaagagtgaacaatggaaggacctcgggctggtatgggctatgccagttgaattagaactacggtacacgctgtgagtatttgatcttgtaggggtatacctattgagaccagagctctgcccagcgttctgagttggactgcatacgttctgcaggtactatgtacctacccgtttgcactcataggcagtacaagctatgattaaagctggtctgaatacagagtatagcatagtataattgaatgatctggccggagagacagtcaatcaccgctcacgatcagataagtgcgtcaaaggttgtaaagctacgagataccaaaacctacctagcgtcccggttgccgtgcaccagcattcagcaactcttatccgtagcctcttgccggatgggaagagcatctagtcataggcgagatgaacacgcaatcaagcagcgagcatgactcttgcttctgaacttcctggtggcttggacaagccctgcagttgcggcagctcaggaaggtgacgaagccacggcatccggagctcatgacatccgccatcgg

SEQ ID NO: 1792 - DNA, 1620 bp, Emericella nidulans
aagacgaaaagaaaacctgatgttcggatgtacacatctcgagcctttctcattatccgtcggaggatcggaaagtttgtctgtttactgagtcacgtgctaccagcagactgcgcagggtagttcatcgatgcgaccgatgtccagctcaagcgaacatccgtgacgagtttgaaaatacctaaatccttcctcgatgtctccagatgtcggcgggaatgagcttcataaatatggcacgatgtaattttcctggccgggaagcgttttaacaatgtgcaagcgccctagccgctcccggtctcaagtagctactactgattgagtcaagggaagtaccgtaacgaaaacaagctgaattgagaaggagagtaagaaaaagaagtaagccattcatacattgccgcgttcacctacaggtgtgcgaaagatatgaacgaataccggccggctgtagagcattcaccacgctccatcgacgagacgaaatcgtccgcagtagagaccggacagattgaaatcctgccgacccaataacaccgtcacaatttgcgcaaacttgagtacttctcagcttatataaataatgcataatatcatattttgtctatacaactaactccgcccggttttcctttccttttccgaagagtcaccgccggatcctaatactccaacggtatccccagacctaactacatgaaagcatgtaagacagttcataacagagtggatatcataaaggacgtcgtcaactgacgattgtagcaaaaaatcaaacgaaaataggtgaaaaagtgtatggagaaaggatgaaggtagatgccagtcagccacaatccagataggtactcctccccagttgtaagactaacatcagccaaatgaaagtcgggtctcccaaataaggtactatattcgtaaacgtaaggtcgtaatcgtgtacaagtcccggttggtagacggtcaccaacctcatcgagacatcatgcagttgcctaaagcagtgaagtgtaaggatgggtttactcccccctcaaccccttgatcatgttcttcagcgcgtcaagaagaacagcttcgtccggtggctcgccaccagggaacgaactctctgttgcctcgcctaatgcccgagcccgtgcgctcttaagaacacccttgatatagtctttgtcctcgtagtcttccagaaggacagcctcaaaatcatcaatggctttgttagcacgctcgttgaaggaagcttcgtcggaagaggtatccatggggactggaccggggttctgtccacccatattgtagggctgctgctgttgttggttgtgctgttgatgctggtgctgaggttgatgctgtggcggacccgggtttgaagggtagctctgcggtggattgttgttcggcgggagaggctgtgtattctggggaggatatggagtcgaatgttgtgggggaggtggcggctgcatgtgctgcgtctgcgcttgtgcttgctgagattgttgatattggaggagctgcggtggagggtcggaggcgtagggagaggtgtatgtagtcggtgtggtttgcgcaaacgcaggaggaagatgtgttctatcggaatggtatcggggc

SEQ ID NO: 1793 - DNA, 5777 bp, Emericella nidulans
atccatattacactgattgcctcccttgctccccaaattgctcttcctgatccccgtccctccctgtggccgcccaccccccctccctggacgaccctccacatgtcggagtgtgcatcttacccgtccagtatcaccccagatcgcacccattccaccactcctcgtccgacggctcgaagggaccgcaagagcgcaccgcctcacccggtggcttcccccttccctccaatcaagctgttgagccctgtcagcttgcctccaactggccgacctgtcactcccctccaacccccctaaatccgcgcgccatgaataacgattctttttcatccttcaaatttcgccgaccatcgagcaaactccataaggaccctcccggttacggatcccgcgcccttaacagccagcagagcaccacgtcactaaaacggcacccttctgcccccgtttacccgcgctcctctgccgctgggagtcgagagcatttgcgaactaggtccaacgcatacggctcgtcatcctcgtcactcgatcagaatagcgcgggcgcttctccggttctggggagcagcgattctggccatttccacagcagtcattcatcccggtcccgacctccatactccggccggttttccttgaacgatcagagctcagatgaattaattggcgcccccttcgattcgcggggtatgttaagcgccctggaagaacataccgctgagcccgacaataggagttatcaaccaccagaccccgccgaaaggtacactgaaaagcccccgaatttccgatcgcagactacaccaaacccacgagccttgagacaatcagccagtttcactactctgcctccccgtatggaggcctttccgaacgccgctggcaatgaccgcccgacaaatacaaagcgtttttccgatgaggccacccctgtcagacctccggggcccagccgaagcaagaaaagcagtttttcgagcttcgttaatagcatgctaggttccccccgtggaatcaaaatttctgcaccagagaacccggtccatgtcactcatgttggttacgataaccagaccggccagtttactggtctgcctaaagaatggcagcggctgctccaggagagtggtatcacgcagaaggaacaggaggagcatccacagaccatggtcgatatcatgagattttacgagaagaatgcccgaggggatgatgaagtctggcataagtttgaccatgcttaccctcaacagccaaccgccgcgagcccaatatcccagccagcgggctccactacgtatggcacgcaacgaacgtctcctcccaccagccctcgattccctcagaaccatgaggggagcttcgaaaacccacgagcaccgcctccgattccccgcgccgcgcctatcgctgcacatgccatgtctccgcccttaggagggcttgtccctaaccgcgcacctcctaaaccaccaactgctgctgctaacttagttccgagtcggcctgcgccgcaacctcctacgtcgagcccttattccaatatctctaccaggccatccccggagacgcagagccctcaattcagcacgcctcccattccagaaacggagcccttgccttccgagtcgcaacgcagccgatcgaattctagaacaaatggggcgcaaggtccatggccgtcggtgtcaccgagtcattaccaacaacagcaggagcaggcaatggccgtagctcagcaagcccttgccaataagcagcttgaacggagccgtagccaacgtcagcagcaacagtctccacggccagaccagatgccgatcgcgcagcccgcactcccgcagcacgctccttcgcctgaagatgttgctctgacacaagcttcccagactgcgcgtgctgcaccggcagctcggcctcgccaaagaccccgccaaagtaatgccatggatgtcagagcacgattggtcgcaatttgtactcccggtgatcccacaaaactttactacaacttgaataaaatcggtcagggtgcatctggtggagtcttcactgcttatgaacagcataccaataattgcgtcgcgatcaagcaaatgaatctggatctacagccaaagaaggatctcatcatcaacgaaattttggtgatgaaggacagcaagcacaaaaacatcgtcaacttcttggacagttatctccatgggctagacttgtgggtggttatggaatacatggagggaggtagtcttacagatgttgttaccttcaatatcatgagcgaaccccaaattgctgctgtttgtcgagaggtacgtttctttgagcgatatttgagttctagtactgatttcgtctcttagacgcttaacggcttgcagcaccttcactcgaaaggtgtgatccatcgagacatcaagtcagacaatattcttctttccttggatggcaacatcaagctcagtaagtgggacattgcaacattacgctcagactgaattttaatgattcgcagccgatttcggtttctgtgcccaaattaatgactctcagaacaagcgaaacaccatggtcggcacaccgtattggatggcccctgaggttgttacgagaaaggagtacggacgtaaagttgacatttggagcctcggaattatggccatcgagatgattgagggagaacctccttacctcaccgaatcgcctctcagggctctatacttgattgccacaaatggcacacctaagatcaaggacgagcacaacctgtcgcctgtcttcaaagatttcctccattttgcgctcagggtggaccctgagaaacgagcatcagctcatgacctattgaaggtatgattatgcatctcaacacagcagactggctctaatcctttacagcatccctttatgaacctttgcgcgcctctcaatcacctttcgcctctagttaaggctgcacggattagcagggcgcaggaaaaagcccagaagggtggtgtttagatctcagcctgttggcgtccttatatgtcgatgtctactatattccttcagatacccattatcactgatgtttcacttttacccgatgatgtacctggcgccgcttatgacttccccattcttttccgaaccttctcttcctttgcaggtctttcggttatttccaaaccaaaatgatagacggcgatgacttgatgctcgacatgggattacaaaccttcgactacttgatgctatgcttagtatctctctcctttgcttgacgacgtttttgcatacccgtattattgaccttcgtgatcagttgcctgtaacatgatgactcgcgtcaggctgatgcactcccttctcgcgcctgtggttacagcagtttgttttggctttggttgtatcggccaccgaaactggttgatgctgcgaacatgagacgcttgagtcgaaaatccgatgcgaatgctggaggcctatcctatggctttattcctgttcaagcagttgtacttggttcccgacgttgctcgagattctagatgatatatcgatatactcgatcgtatgacgatcgaacaaaagtatatgggggttttctttacggttctaaatgcttcctatgtcctctcaccatataataccgctagaggcttatatagctaagcactaccataataacatctggaagtaccaagtgggccaagactaaaggaaagaataataacagtattagtggtgccttaactgtgcccggggccaaattaggtaagctagtggtctccgcccctcgaccttcgtcattcggatcaggttccagcaaccattctacatcttgttgcggttgcaccttttgcttctcttagaggtcctttgcccagtaccacctgaacctttggacattagcttatcttcaaacttgcctttttattgctgcgaaaatctccggccgacttctcttgagcttctgattccccgcaccaagtgttctccggaccttggatcgcagcctgagctccgtatccacgcagcttgcagctgagtgtcgttctaataacatcttatcaaggatcgcaggagcacaacaatcaccggcaagcttcggtagcctccattttacggaaagatttatttgatcaatacctatcggctataattcgatttgctctgaaggcggagattagaaagttggacactcgcgatgttccgcgcacagcagaacgcttttgacgatgcagtcggtacggtgcttttgagcagtatcctttttgatgaaggggggttcttagcttctatatgctaatcgctcgtttttcgcaatagccaaagcaacggatgagaacttgacctccgagaactgggagtacattcttgtatgcaatgcccgctgcatttccaagacatgcctttttggatcagttaagcatagatcatctaacatttgatgtcgcgttcacaggatgtatgcgataaggttggggctgaggagtcagggtaggatactggtctttgatcattgacaagtgatgctgttgaacaactccactgactggaatcaaatacagtgcaaaggatgcggtcgccgctttgatcaagagactcgcacataggaacgccaacgtgcagctgtacactctcgaagtgcgtgtcacaatccttccaccaactgcgcgagactgacgttatttagctggccaatgcattagcgcagaattgcggccctaagatacatcgcgaactggcgtcacgaagctttacagacgcactcttgcgtctcgctggtgatagggtatgcctccaccttagtctaacggatcatttttactgactggtggaacaagaacactcatcagcaggtgaaatccaagattctggaacgtatggaggattggacggagatgttcgctagcaacccagatttcgggattatggaacaggctttcatgaagttgaggacacaaagtacgcactattccgtttcctgaataggtcttatagcttacatctcccaagacccgaacctacaacccccgtcgaagcccgggaagcgggagattaccgacctagatcgccagaaagaagaggaggaattgcagatggcgcttgctctttctataagagagaaatccggttcagcccctcagccgcaggtggagagtagtagctcggtctcagctccagaaaaccaagcacaagctgcgcctgctggaccagttccttcaggtacttctgctgctacagtttctagagttagagctttgtacgattttcagccgtctgagcccggagagttacaatttcggaagggagatgtcatcgccgtcctagagtccgtgtataaggattggtggaagggctctctgagaggccagacagggattttcccgcttaattacgtggaaaagcttcctgatcccactgttgaggaacttcagcgggaagctcagatggaggcagaggtgtttggccagatcaagaatgttgagaagctattgactcttctaagcacgcgcagctcagaactcaatgtccaggagaatgaggaaatcacaaacttgtacaactcaacattatcaatccgccccaagttggttgagctcattggaaaatattcgcagaagaagggtatgtctcccaactccttaggtcagtctctttcagttactgacttacactcgcagatgagttcactcaactcaacgaaaagtttatcaaagcgcgaagggactatgaatctctcttggaggcgtctatggctcaacctccacagcagcaatttg

SEQ ID NO: 1794 - DNA, 6582 bp, Emericella nidulans
  unsure (1)..(6582): unsure at all n locations
gcgaacggggtgaatggagctgagtaggagctttgattttgttttcgtgttgtgttcatatcagactgtacttaatacttactgcgcctaattgatcccttgcacgtttgtacgtttttgttcttgaccatcgctcttccctaagatgaagacagacggcacgcaactcgcgctgaggcagtagcgactgtgaaaggcactctcgcctcccagaaaaacccttactacttgttactatatacaggataaggctccttagccaccactgactctaggcgntctttgcattgagcagctgctgtctacctcaaatccagcgttccacatcaaaattctcctcagcagatttattatgggcagcacaagcgatcttcagttgctcactgatgaactccgctccacactcaagtgtcccatacttaccccagactctgatggttacgcaacaagtatcctgcgatggaacgacgcggtgccgaacgctgcggtatcttttcgctttcgcttgcccgtgcctggaacttgtcgtgctgactttctaggccctcgtggtataccccgaattagtcgatgacgtcgtaactatagtccgcggatgcgtcagacacaaggttccatttgcggtcgcctgcggtaaacatacgacaagcaccggctcctcgtgtgatggcggcctcgttatcgatctggcgcacatgaaccatgtggcggtggactcggaatcgcgactgatcactgtcggcggaggctgtcgctggaaagatgttgatgacgcccttgagggatatgggctggccatggttgagggtatagtgaatgatacgggggttggcggaatcgcgcttggaggagggtatggctggcttgccccacggcacggactgattcttgacaacctcgtcgctgcgaccgtcgtcctggcagacggtagtatcgccactgcgtccacagaggagagacccgatctcttctgggctcttcgaggcgccgggcaatgctttggcgttgtcgtcgagttcgtctttagggctcacgagcaccaggatccggtctgggcgggcttgcttggattctcgctggatcatttagaagctgtctttggctttgccaatacgttagtcgagagcacgaatggggactcggctatggttattcagctgtccagataccccttctcgcgacagggccgcgatgtgggaatcatggcaatcgttttccattacggcgatgctaaatcggccgaaactgtcttccagcccttgttcaacctgggacctattgtcaacacgaccaaggctcagtcgtacgcatccgtcaacaacatgttgacggccgaggcaaaacgcggtggccgcaacgtatctaaaggcgccgcgtacacgacaccccttcgaccagcgtttgtgaaggagacgatcatccctgaaatggaaagacttcacctcgaagtaccggggtcggatcggtcattaatagagtttgaattctacaagccagacaaatggtgtgaggttccagtgacggccacggcacacgggcaccgagggcatgtccagaatgtcatgatcggcctctactggaacgatgagcaggacgacgtgaggatggagatgtggtcgcgccacatcgctggcctagtggctgcagagcgagccagccatggtaggccagccgagggcccagttactgagtatgggaactatgaccatctgtctgcgcatgcgcgcgatgttttcgggatcaactactcgcggctggtccagctgaagaagcggtatgatcctgataatgtcttcaacaaatggtattccttggtggagtagatctttctgtaactgattccttcgtattgcacggccattcttagactcgtgtatctttacgggcggtctattttattttgagttttttttccttatcaacagctttagtaattcgatcgaaaaatcaaaatctatacactcaactcgcgcccttggctgtttgagaggctgttttgtatggagaagccagcacttgctgcgtaaacttaggccgctcagcgactttaggcggtgcggaaaaatgacgaattagggctcagctaaccataccaatctcgacagcaaacaacagcaaaagctgacatctcaccggaaaagagccggcaggaaacgaagagaaacccagtgacacaaagacccttccttccaggctgtattcgaatggtgtcgacgcaaaaatcaggctgctagccgcctcgtgcacagccctgcaaccgcactgaagaatttgccgctactcgcgacggaattgatttccaacacgcactgacagaaattcaataattagtggagcgtacccacatcgatctcacgctgatgcttagcccaattgatcacgaaagctgcgcctacacctgcctttcgattggcatcgggcccctctggatgcttatctccagtctccggcgccggacaccacatctccgggattactggaaactccggtcacgagagacatgacaaaattagacactggaagacccggagctgggcagaataagacccaggcattccgtgcttagctagctagctgatagctttatttggtagccgaacgactgccgcgttgctttttcccctgacggcttacacgtaacacataacacgtagcacgaagtcggcttacggagggccgttgtgcggtgtagcaccaagaaggatcggtacagagtacgatcgtatcgaggctgattgcttgaagggagtctgacaggtctgacaccgctggactgggtgcgagttacactgccggttcggttctttagtgtggagcttatcttgggcaggttgtctcctttccccctttcagtgtagtgattgggtgatcagtaaatagataagtagggttgacagaggcagacgggcagattgaacggcgggcgttgtttcactatccaaaattctggtagtgtaccggggttaatgcctgagagttgggagatgcgcacggattgagacggaaaacatatctattttgtagattataaattataaagtagccgcccagcagataccgaattcttcatgtagaagagagttgatatggaagtcgcaaaagaagcacaaggggtataatgagagaatcgatctatagccagggtatccacgatctcactgcgtcaaattttacctgcgtcttccactgcaggtttgcaaacagtggggagagaaggaacgtctcgtttccaaacccggaattatctagcgcgcagtacctcctgtcaaattcctggatcaggacgcctagcttggcgagctcggcacggagagtgttggcgttgctgatttgctccttgcggtggtcgatgggcgacgttgaggtcgctctcgatgatggggttggcggaggtggaggcggctgctgctgcccgctcgtatcgcctcgcggaagaagctggtcaaaggcagccgtcatatgatgcaggagagcaatcatctgcgtaagaagaatcatgccgtgagtacggtggggatctgggcagttcaggacgttggtgcagagggccatattggcgcggtgctcggttaggaagtcgtcgaggatgaaggtgcttgatggtggttttggcatgctgagctcggtcaacttgaagctaatgctttgctggcaccagcaggtgactgaggctgggactggtgagttcaggccggatgtcgtggtggtcgtcgggcctgtggctccataatggctgtggccgtcccgggagcttggcggcgaaatggggctgagagggatcgtcatcgaatgcgggaccatctgtggtgcaaccgcaggctgagtcgaaggaacaagacgcgagtctggaacatccagtgaaaaggggaacgctgttggatcggagagcggagtatcgaaggggttcagcgagaggaggccggcgagatcatcatctacaaatccttcagagtagatatcactatttccgaaattgggcggacacgctggttgcactgtgatatcgacagtcgtggtgggcagcgtttccgaagagacgggagatgggatggagaggactctcttcttttcctttggtgggcaggtctggtctgcttcttggcgaggccgtggccttttgattccgcgcagcgagatgctgtaaacgcagggtgtattccgtgtagcacagcgccggcaggtcggtctatccttagagcacttaacctttgcttggttgcactggccacatgagcttctcagaggtcggtcgtcgcgatgcggtggcactatagcggtggtggcagccgtaggcgagaagattggtgccggcatctcggccatttcgggcatggggaaggcgccaggctcagagtgatctgggcacgccatctgcgttatgcaatcgtgtcgttgacggccgaacctgtaggaaatttcttcagaaatggtggaaaatatgtgcaaacaagatggttagccggcgagacagctcgccctcttataagcttgttaccaccgccctacacccaatcgtcggcagtgctcaatcacatattcctcattggtacagtagccagccactatcttggcaccatgatctgcagtgggagagatcatgggttcgatcgaccgcgactgatttactctgctcctgctctcgattgtttgcctgatccggctcagttcttgggctgctgtttccttcttgggctaacggatctgaccgaggtgggtcacggctcgtgtgaagaggatccaagagtcctgactccatgggtttcagccagcctcgagtgcgtacatgttcgtgcagacagatacagccaagaggatcattatcacgtagatcgtgacccaccaatggcccgtctcgcttccgtcagagcggcgggatgagctcgggagcgtcacaaccgactcccaaggtatgcatttttgctgggcatgcttccataacaacaatggcctgtcttacgtaacgggccctgacatatactggattttgactgcaagcgctacctgcagccagccttatcttgcatcaggaatggttcgccctctgcaacctcgtcacagtaatacaagttgcgacaggggaatccagttggccttcgagctgaggtctcgagagaggagcacgtcaagtggcgacaatgcgcctgagtattgtattgcaggaaccaatggcaacaataagcagtatgggctaccgtcctccggtgcgcaatccggattgttcacattcgagcggcatgactcgctcgatatgatcagcgatccttgaattggcgtcagaacagtaaaagatcgcggggcgtttatttattgcaatagtcctcattgtgtggttcaactggatccttcacctcaaggttttgacaatgaccaagctttattcgtcatgatactcactgcgatccgtgcagcatgcggcgtgactggagtcaaattccaaaaaaaggcgatctgagacccataatcatggcagcagcgattgtgctgggcgagatcggaataagtatcttgaagcagcggatcctggagatagtagacagcatggtcaaggaggctgacgtgcagtcggctttcgccgtgttgtgattttgaagttccagggaagcactctttgagtctagacaacggcacgtgtcgctgactcatcgccgtaatcggcgcacaaacactggctgagtcagccacggcctccgaatatcgctagttcatctcttggggtctccacggtctacaccgagtcgcacactacaaccacgagagaaagacaccaccacgattagtttgcgagtgcataatgtccttcacggcccgatcattacggcaggtgcttacatctacttcacgtaatttccattgttcacggaccatggcggcatccgactggagtgccagacaataccttaagtttgaggctgaacgcacacgacctgctcgtgatctgctcgcccaggttccactcgattcaccacatcgcgtcgtggatctaggctgcggacctggcaactcaacagccgtccttgtatcccggtatccagatgcccgagtgacaggaatggactcgtctccagatatgattggaaaggctcgcgaaaccctcccgggaatcgagtttacagtcgatggcctcagtacgtatacacctagagaaccggtagacctattcttctccaacgccgtcttccagtggctaccgcgggaccaacgtctggaaatcatcaaacgccttattcagtcgcagccttcaggcggcgtctttgccttccaggtgccggataatttggctgagccatcgcacgtcacaatgcgtgaaattgccgccaatggtccgtggtcgagcacgctacaatccgttgctcgcgaaagctttcaatcgccacatgaactgtacgatgaactgaagccgctctgtgctgaggtgaatatctggcatacctactataaccattcgctggagaaccataaggctgtcgtagaatgggtcaaggggacgggcctgcggccgttcattgaccctttgtcgcagccggatcgggagtctttcttaaggcttactgggtcgtcggagcaattatatctgagagcaca

SEQ ID NO: 1795 - DNA, 1065 bp, Emericella nidulans
gagcttggtgctttcgccaagcttgagcccgagttcactgctcgtggcgtcaagcatgatcggtctcgtgcgtggacaccgttgtgcccctcatactaggtcccttactaactcctcatagagcgccaacggactgaatcccacaaggcctggatcaaggacattgacgaggtcaccggctcaaagctgaccttccccatcatctccgatcccgagcgcaagatcgcccaccagtacgacatggttgactaccaggacaccaccaacgttgactccaagggtatgtgggatctaggaatatgctgaacttgagcttctctctaaccactttcccgcaggtatggctcttaccatccgttccgtcttcatcatcgaccctgccaagaagatccgcctcatcatgacctaccccgcctccaccggccgcaacacggctgaggtcctccgtgtcgttgatgccctccagaccaccgagaagcacggtgttaccacccccatcaactggcttcctggtgacgacgttgtcatccctcctcccgtctccaccgaggatgctcagaagaagttcggcgacgtccgtgttgtcaagccgtaagttcacccgagcctggagcattcatcagttgtttggagcagttgagcagttgctaaccatctctcgtgcagttacctgcgtttcaccaacctcaagaaggaataaattggaaaatgatacctcataacctatctacgactaccgatctcaagggtagggagtgaacggtggctatggaaatttgcctggataacttcctggtcgcagcaaaaagaaataaaatctcaggcgtggatttgtttatttcgatacctaatgatacaatgatcaaagatatcacgttatatgaacagtttgtggtcttagttaccctccgtaggatatgcaaacgcacatttaacccagagtgcagctttgaccctaaaattggtggttatatatattgtggcgtagcaacgaaccgaaccgcgcaggcagacaggaatcatactcgtcaccttgcatacgaccgtggaaattaatgcacctac

SEQ ID NO: 1796 - DNA, 3275 bp, Emericella nidulans
gatggagatgttattatggctgaggccggagacactgatgggaccggccctgccgagtgagagcttcagaatcagatctgctcgccggcagtctatgccactgttaacactcacggaaacagagttggacagcactcaaaggtcgccaaacggcttagatgagcacactgtattacgaccatcggatccagacccttttctcaacgtgggcttagataatgttcggctccgcagccgacgagggtctgtcgctccgttaaccccggaggaggtatctcgagatcaacagcggccatcctctacggaacctccatcaagtagttcatcgtttcgcagtcttccggacactcccactaccccagtagcgcaaaaggcacggcgcgaaccaagcaaccaaaatcggggaatctttcccgacactatacttgtgcggatcttccaaaacctcgaattgcatgatcttcttcgtttgcgcgccgtgtctctctactggtctgagatactcaattcatccccggatttgcttcgctacttggatttgagcgtgtataatcgctgcctcaccgatgacgtactggcgaaaatcgtctgtcccttcgtcggcaatagacctcgctacattgatatcagcaactgctttcatatcacggacgaagggtttaatactttggcgaacacctgtggatctaacgttgtaacctggaagatgaagagtgtttgggacgtgactgcatccgccatcctggaaatggctcaaaaggcgaacggcctgcaagaagtggatctgagcaactgtcgaaaagttagcgatacgctcttagctcgaattcttggatgggttactcctggtccatataaacctccagatgaaactacaaagtctggtaaatccgttatcaaacccacgattcttaccccgaccggaacggcagtctttggatgcccagagctgaagaagttgactctgtcctattgcaagcatgtaactgacaggtctatgcatcacattgcatctcatgccgcttcaaggattgaagaaatgaacctgacacggtgcacaaccatcactgatcacggatttcagttctggggaaacgttcagtttactaacctccgaaagctctgcctggcggattgcacgtatttaaccgataatgcgattgtatatcttaccaatgctgcaaaacaattgcaggaattggatttggtacgcatatctttgtctcttattgtgatgtgctcgctaatgcatgttcttagtcattctgctgcgctttatcagacacagcaacggaagtccttgctctgcaatgttctcaattgagatacctaaacatgtcattctgtggttctgccatatctgatccgtcattacgcagtattggactgcatcttctgcatcttaatcggctctcggtgcgcggttgcgttcgcgtgaccggggctggcgtggaatcggtagcggatggctgcacccagctgaaagctttcgacgtcagccagtgtaagaatttggtaccctggcttgaatcaggaggaacccagaaatacaatggtaaaatatcattcgacactgttgctgtgaatgggaggctttaccgatagccaatgctttccgcagtactatccaccttggcacttttgtcgcatcctcccctataccaaattttattgcttaatacagctttcatcacgatatgctcttattcctcccatctcgacttgattacgacttcttgttttggtactttcgtttgggtatccctgctggatccccgccggagttatggtacttgtcttcactggtccttcaaggttttggtcgatggcgattacgaagcttactgcattgccttcatttccttggcgcgttggtcttggaatgcttatatcacggccttattcgatcttcgttcagtgcgtaccgtccttctatcctttttttttttgctacttttgttcaggtgctgggggggacaggcatgggaggagtttgagtctgacacggttataacagtatctcctattcatattgcatgttggagctggccaatttctgaagattctacgtgtatcttagatttcttttctttccattgaatatgtggagtagggagttcagcgccgagggctttttctctgtctgcattctattttagaattcattgaagctcaaagcgtgtagatgaaccatttatctttgttgtagtaaaacaggatctttcgcattcactccaggcctcgttggttgttccagcagccgcttttgcgaccactggttcttatcgcggaatcctggtctattaatatttgataaggaacaggctgtgaacggttcgtgcccgttaagacattgtgagcctcaaatgcctttagtatgctatttttgaagcggtcaggccaacgcagactcgactaagtattcagaagtttatctcaacatccaacatcgttatctttatattttaatcgcagttttgagcatttgtatcagttccttactgctttaagccttaatggcccttaccttccatcggcttcaacaccagaaacacgccaccgattctccaggatgtcaccgaagaggcaacgcaatgtctacgacgaggatgacgaccacgattcatccgctgattcgtatctaagtacagagtatcttacggtcgtcactattgatgctcctacctatactcttaccgaaactctcacggaggctacaacaaatactgatacacctgcctctccaacagaggttatggcaaaagttcgcaagccatacatgcaaaaggctggacctaaaaacgctgctaaaacactggctagaccaagagagatagcaggcagggaggagaggagacttctccctgaggtcacaagcagggtcacgacagatgatactgagtcctggcagtccgcatacatcccggggccatccgaatacacgggagtgctagacacacaaagcccaaatagcccttccatgcaaacgccagttaacaaggacgacccccaacctgctaatactaacggcaggctgtcagaatgcagcgccttgccacttgcgtacctcgtttcgcctgatgtacgaagccctggaaccccttctgcgcggatgactgcccctgcccaacataggtaggaatggtgtctgctcctaaccaagcaacttttattggtattcctttcccccaagcccctttccttttacccaccaacacccttggttttaacccattgggcttgaacctttccggagtttgttggacagatacctt

SEQ ID NO: 1797 - DNA, 1459 bp, Emericella nidulans
ttcccggtcgataatacgactcactatagggatcgaccgagtatactagcttttactaactgaatatatccacaattgttcgtcgaggataggaacagttcgaaatggaagattagtatcaacaagcttctggaagtggaggagcacgtctggtcaccaatgtatggcctcaaaggcaacattgattgcaacagttcaagttgcgtgcaatgaaggggaatgtgacaaaaacctagacgtaccccttgagcttaagaccggctataaggagacgaattatgcccatcgggcccaaaccgcactctataccttgctactttatgatcgagacggacagcataaactgggctttacttgttaaacggcatctagctaactgtgctttctttataaggggaagtaacatttgggcttctatattacctcgagacgtcaaaaatcatgcgaatccggggcatacggcacgagcttttgcacatgatacaggagcgtaatcgggttgcgggatatgtgcgggagagaacatatttaccgccaatgcttaggaagccgtcgatgtgcaatcgatgttactctaagacagcctgctttatctaccacaaacttgctgatgacggaaatggcgaaaccagcggccttggtgaagagttcgataaagcaatggagcacctgaatccctcacatcgtgactttttccggaaatgggacgaccttctcaccaaggaagaaacgagcatgatgagatttaagagagaactatggactttgctcagccatgagcgagaagcgcttggacgttgtttcggtaacatcgttattgagcctggaacagcctgcgaggacaaagatgggactaagatcaatcggtaccgctatacctttgttaagaaacaacagtcgcccacattttcattcgctgaatcccagatcaccgtcggagagcctattgtaatttcagacgagaagggccattttgctctggccaatggatatgttgtgcaaataagccctaagcgtgttactgtcgcggttgatcgaagacttcacaactccagaacaaaggcaagtggatttgactctattctgaaccaatctttcaggggtattatggagatagagggtgacacccctccatctgagtctgcggaagagaccctttatcggctggacaaagacgagttcagcaatggaatggctatagtacgaagcaacctaattgcgatgatggagaaagatctgttccaggctgggcagttgaggaaactgattgttgaaggaaagcctcctgcgtttaagccgaacgttcctgagctgtccggattaggcatggccggcctaaacatcgatcagaaacaagcgatcaagaaggttatgagtgcgcaagattatacacaggtgctgggaatgccgggaacaggaaaaaccacgaccactggtcatattcttcgagcccatgttc

SEQ ID NO: 1798 - DNA, 1967 bp, Emericella nidulans
ccattgacttgcatcactacataccgcgcgttgagcacaaagcttgacaacgacgacttcttcaagctgcctctgttcaacgttaggtgcaactgctgtagctgaaatccccgttctcgtgcgctcagccttgctgggcgaagggaatggggatgggcgcacattgcaaggagtactggaatgctggagggaggcgacaagataagacatccggtttgcgtggaagaaattcaggctccagttacacctagcatcatgggacgactaatggccggggaaagataaatgtcgcttttcagttcatgctagaaatgcgaggtctgccgtgagagaacgggctgggcaatcagaccttggcgtcgtggtgccctgacaaactcccagtcccggacacatccagagctctgctttataatacgtcaaaaagcccggctcagatatcaaggcagcctcgcagtctcctcaacggcgcaacctcctgagaccggtcaagtaacatgtcagccctgaaagcggtctggagtcattgcgtctctttatactgccgctcgtaaagggaatcttggctgcagtggcgcctgactcatccaagtgccccaaagccggccagtcgtctaagctcagggcgttatcggcatgtttaggactgcctcagataactaacaacgtggcggtatcccaaatccccttgcagacggagtcgcagctccgggcccatcggccacagagacaacaaacttaaaaagttctagatgcctcattccaatgcttgtcggcgctcgaatctagagatcatcctgatcttagcgacagcgacaatagatccgtcagtcgcggaaaactattcaaacgagaataaaacacctgggagcgactttagtggttctcgagacaagacgaacggccttgaacacgaagtaatcggccgagactgaggcgcaacagcatagttgtgcgacgcgtggcaatggagactatcattgccatgcccgcagaatctcacgctgacaagatgggggatgatgcatcattgcaaagtttccgccagcgacccctctgcgtcatcatatggagagcagcagcaacaagcccgaagacaacgcagatgattcaacaaagcgtgcgacatcacctcagcctattcttcagacactcttgcgacgccgctctggagtgcaagtgccaagtcggccatcgccagctgcattctgtagcattctggccgtgccaagcagcctcatgccacccgggactcgggagacattgctcctggaaccggaagatcttcgtggatgttactctgtgcggtatccagagcacgtatcggctcggccgccatcgccattgtatgacatggttgatgcccgacagacgccttgccccttgcgtcgccgtggtcgccgtggtctctggtggtgacattagctgcaagtcatacatgccgagagacgggttgcgaggaaaggtacggtacagtacagcgtaaaaagtatcccgaaccttcattactgatctcgttcatgaatacgcagaccaggacgaagaagagtctttggcgagcaataatatgaaataatttagtgtgtccctcaagcgacgaccaggcgctgaggcgcgaaactgagctgacaaggataaaccatgtccctcgcataatagacggctaggatatggattgtgaggcacactcacccgggatagccaattacagtaatccgagctcacttgcccgtccgactcaaatcggctcggacgggcacagccgcagtgaggaatgtggtcagattcgaacgccgtggcggtcggcggcaatctgccgacgaagcgaagagcgccgaaaaagagcactacgattcgacaacgagcaaccgatccaatgcggcgtcgaaagccttacttgagacggttagaggtcccgccggctaaaatgttttgcgcaaatgggggaagatggggagggtgtaaca

SEQ ID NO: 1799 - DNA, 4479 bp, Emericella nidulans
tagacctgcggccttgaaccccgacgccacggagtcgttagaactatctgagccttcagagcttccagaacccgatgccccaccacgtcccatcgtccccataattgcagcatttgaccacatgcgcgtccgcgtccgcgatatgtacacactggaacaatatgcacctgccgttgagcgcctcttcgatatcatcgagcgcgcctccaaactcgaacagaaccaagcgcgagaaaagcgacggcgtgaggtcgaggaaaacgagaaacggaaggagtttaggcgggagaacaagtttaaaacaaagcaggagcagatgagccaggagcaaagggaaatggcaaaggcggagaaggaagcccgcgtgtctgataggtcttcttctcagtctcggcctcaatctcctgatgccaaggtctccatctgggatgccccggagagtgagagtgggtggagttcggatgagtctggaaaggatgcataagttttaacgcttgttgaggatctacagcagaagcaggaaggagcaggggcgggccagttgggatttttagcggatcggagatcaagaaggttgggtaaacgtgccactcttttgggccaggccatttgccatatatatagtatttcttctttcctttcactctcatactctctgtttttgtgagttgagggattgaagtacattttagatgcatgataaaactcagacggtgtacatagacgtatccgggctcttcttggtaaccatgcactttataatcctcggtattatagaagccaggttttcctgagcaatacaatgtaatgccttagcctgattaatatggaccatactgttagccattagtaattatggaaccaatcaaagttgcaatcactataatatatacattctcagattagactgtgcatgttagagaaattgtatgtacacaccctgtaacccgcgaccttctatcacctgaacgatactcagactagaaaccggaaatagccttctctttctcatccttgccatacaacccctcacccagattttgaacgcattcgtttttccaattcttcggcgtaaatttatcaacgatttccttaaacgcctccaatgtgcagaacgtgtcgtcgccaggtaagtgattctctggcttcacagcacagccagggatgcgcacgactcggtcattgtagcgaatacggacgtaattcttttggagggcttggcgcgctgactcggggagagattcaagaggcgtgcgggcggtcgaagagggagggagatgagtcttgcgtgagtttgcagaagatgagccggacaagaaggagaagaggccactgccttgcttgggcgccggaagtgcggtatctgtgctttcagacgttgagtctgcgcgagagaagagttctatggcaatggaggaagtaaaaggaggccatctgttatccagggtacccagactgcctagaatggcggcgagagtggtgtcatggcatccgctcatggcgaacttgattgccttgcccttctccacagaggaaccagaagcggcggtttggctgcgccagccgccatctacggcagtggcaaccatgcggtcgacgatatcgcccatcagagctccgatgccaagtttacggtactccgtgctttcgttataaccggtgaaccactcatcgacggctatgtgctccatataagctcgggccttgttattgtagaattccgaggggagtcttgtggcggggccatgagcgtctgtggcattaattgtgtcctgtataccagatagtcgtgggtgagaatcaacagccactcggggtgaattctcaggcatccatttgccataaacactgttgatatagtccatttcttcggaattgttccctgtcacggaatatacgtgagtatatggtcagcgtccgagcttgcgtacgcacattttttggctgctttatcggcgaaaagtctagcaagctgtctgaatcgacggcagctgctctcgttgggaaagagcgtctcctctgacacagaccgcgctataatcactggcggttgaaagtcctctgtacgtgcactagcgggatacatcccccagaatgcctgttgcagagattccagagctcttggaatggtcgtagcacggagatacatgtcctctgtgtcggacttgattttgggcatgaatccgagctggttcacatacagatgtcgcagacgttggccgagctggtaggtcgtctcacgtcctttatccgttaattcgccgtgctgactgtttggatcgcaattagaataggctaggatccacgtagactgcccctaggcataacttgccatattccctcaatgtcaccacctgcaccgacagtcactattgtttggtccctatcgccgaatgtctcgaacttcctccgccacttgaaggcgttccatgacgaaaggtcctcattgctcgcggccatctggaccatgcggcgggcaacattgcagtaaggccagtcttgggaggaaaagagtggtcagcgggggaaagcgaagacgagaatcgggattatcgtatcaattacatggtggcagtcctgcctagaagaatagattagctcaagtaccgcccacacgcaattgaattaagctgtacattctcaaagcgcgaagataccggcgtgcgctcgcctgagggttggagttagtgaatcgacttgtgtagattggccgtggaaagctctatctgtaccatgtcgtaggaactgggaggggaagttagcagcgagacctcgattgggccatttccaaaaagacagatcggcacgtacaacttgaactagctggagtttcaattccttcgggtagagcttttcaacttcatcttgggtgtatggtccgcgaggtatgagggtcgtcattttgaaggaacaatagcacccggagtgcccagtacaacaggaggtgaaggagagaaagttcccagcgatcggagacggacagaagaccagcggtgatgacgcagaagcagcagcagcaatagccaatcagctgacccgcaccggttacctgcccacgctggataaacagcgtactccatcgagggtcagtaatctctgtgctgttcgtcgcttgcctacaagctttaattgccccaagtccacatgatgcttgtatctggttataactcaaaaaagctggagagttatgtacataacccggagcggacagcattagacgccaagccttatttatccccggcttatcgccagagcacaacctcaactactactgtccactgcagccttcttcaagtttctctctcaacgtttccacttgacctgccagtcgatctgaaccctgcgaaaggaaccatttgaacatacacctccatcttaaagaattagctcttcgaaagacaactcctatcggccaggattcctctctatcttctccgcacaccaactccacatagcacagcccaggaccttttatgtgtgcctagccaacgggcataagatatatatatacactcagaaactacctttgtgttgactgaactactttatgcccaacatgggtgtcttgttctgagctgagtcgctaaattgttcgcctgcagcgagactctgaagtcgggagtgcgggccatctcattacggagacattaaactgcctaaatgggctttgggaggcccttacaattacactagacgcttcgaattatcagaccttaacttttattctattggtgccgccgcccgctcagtaccttgcaatcctgagcaagacactgattcttcccttcatcttcggcccatctcaaggttcttcctggaatacaacatttctggtaagtacttattctgatatactgtattctctattcgaggattgacgctcgataagtgaacctgaatagccattgagatcaccggctccggtgataaagtggacatcatggaggtaagaagacgtgatttccttgtgttatttgtgccaacgcatgatatctggcattgctctgagcggtgtgggcgccatccattatcctcttccgaaacaccagcttggtagccacaacggcaacttaaacttgggaatgcgttactggtttcctctcggcttacgggatggtgtctgctgctagaggtcgtaccggcaatgtacgctcggatgttcttctcttccataggggtttcagattggacacttatccaatggaaccccgttgcgcgtaatgccacggcgagaatcttacactgtatctttcactggtacccggtctcgatagatattcattctcaaaccgcatgattttgcaagagggacttgccagttacagaaccagtacctagctaagatttgagaattcctgcaggtcgcaaccacagcttcagggcaggccacgagggtcaaatcccccaagcctcatgatttcaagcctcgtcttctaataataaaacttcgtcggtatgatcctagttgaaagaccatat

SEQ ID NO: 1800 - DNA, 3064 bp, Emericella nidulans
tgtaggctgagccgattacccgcggagtatgcactggaactgctcaagttacagtggagaaagattatttgcttactggtgggcctgatgctaggcatcaccatttcatgtaccattcacccatctctcgcctggaaatcctagtacacgcaaacgccccattggcctctcagtatgccactgctcccttgcaaggtaatggcctagagcaaccgaccccttgctcttccacgcgtgtccgctggcttttactatgcgtcctgagaccaattgggcctgagtatctataactctagaatgactatgcactatttagagccttctttggagttttttcgtattggggcagataatagttgagatagcgtagggttcgaatgtcatagcacgaacggatgggatgcgggaatagggcgctgacgcaggagcctgcatttccaatagtataaatcaacgaaacagaactgacgaagtataatatgttccatcagcgaccagcaagccctggttcattgcgacggcatagtctagtgtggatcggccagcagaaattttttgccctcacttcttctgcttcttctagaaggtgtgttccggtgatgaagctcgcaacgcggcttccaggatcttcacggcatggccgtttcccaacagtctgggccttgcgaccgggtcctgtgtaatagcgatgtgcggatctgaatcggcccggcaaggtcgtgggcccgctggtgcagacataaggccccaaatatatggagttgccccttggcctagcccccctgattcgccttatattttagcaacgtcttttgtggtgcgatactgttatcacaagattggctcggtatatgccgtaagatcctgctacggagcgtttgcgcgaatctggacatgtgacaagctctgctgtggccgcagtcggaagatacttcaacctgacaacaaaggtctggcgcgctcgccgatcacagtatgggctatgacaccggcggttgaaggagtgaggttcctacattgctggacgagggcctctaatagaagggaccctcactcacggtcaatcgcagctgacattgaggggatatcgatctcagaaagagatcagcggtttggggatatcacgcgaatggtttcaagctgcgctgctgagaggcattccacatatacccgaccctcctcacatatattgcccggcgcctgggggagtgcggcaacggaaacgcttacggatgtcggtcaggatgcgccgacatgctgaccctcgctcgtggacagtagaacaacgttatgaaattgcgactgagaacggccagctagcaccagcaaaatatactcttagtcggcgcataatagcgacacacataaaccacgtcctatgacgaaaggcgtgggtttagaggtggcggctggcggagtttagatagatgctgacagatacgcgcataggtgtccctttatttaggcaagagggctctcaccggggctagtgtcgtggtttgagcgtctggaaagcaggttcggacactctttccataaggctgatgttgcggaatcccgggcctagagaaattccctccagagaaactaccttatagggcgtttgtcgtgatcaatgtacaacgatgaacataaggagcgcggtatttgaacctgactcttcaaattacgatggatttgtagcactatttaccgagctgtggctatgtaatgatgaaccacgcgaggagatagtcgccaatcaccataaaaccatccaccagcatcaagaagttagcagatggaacgatctgccttctcctcgagctccacaaggtttttgtttccattgctcgcagccgatctcacaatggcacatggcgtttgccgcacatggcacgaggtcatctcgcgcagccgggtcctccagcggagaatcttcttccaaacaggtataccctgtctactgtctgagtgaatgatacctgtcgacttcagctacctcctgtgagtgatgtcccgggccttctagccccacgacgaaacactcgatcggagaacgcttgcatcggaacaagccgcgagtcctgcccgcccggccagacatgctgcaattgaaaatccagaccagtagccggacagtttgcgtcaggaggcttcctggcgccgcatttcccttgtggcccagcgccgcagctggcgaggatggatatctggcgtgctgcgcgggcgacatgatatccgcgaccgttgcaccccagcaacggtcaggtaattagagcatggggtcacagacgggactgctcttgaacgacattattttcgttattgcaataatttatatggctggttcatcgccgcgtggtagaggaacggaatcgacatggagtcgaaggcgaacaagaaaaaaagcgttctctggagtggcgcgtcaagaccgagtaccagtgggagtatatcttagtgtgaggaagtataccctacagcgggattgaaggtggttgattataaggatgttgtggtgtacgttgaggacgacaagtctctcatggatatggacgatgtgcggctgggcgtgcgcaggaggaactcggccaggaaaagagtatatgcgccggggacaacaatgaataaaggaccgagaaatcccgagatccattgttctggctgtgcacggcgctttagaacaagacttgggatctcctcgactgatattctgcattgctcattcgttttgagggaaaggtaccaagtcatgcctaacaacccgacaagtcctgttgtggcagggtacagagcctcccaatggcattgaatcagtcagccactagaagaccccatttattgggtccccaagaacctctctgtgtcaatgagccggccagcgttatcttactggatctgggcaggctgggcttgctgggcgccatgccaatctcctaccaaaacacgagcgaggtcttgcactgccctgacgatgacaataacaaaaaaaaaaaaaaaaccaactctattcagcatctatagatagtaaatctactcttagccaattgcaacaaccacctcttgtcataagtccgagtgt

SEQ ID NO: 1801 - DNA, 3781 bp, Emericella nidulans
gtttataaaaaaagatgaatttaaatattgaaagattaattgtatatgaaagtaaaagagaaaaatggaattaagaaaaataattaatagaatagaattgttaaaggttcataattttattatagtgttaatactagggaattattcaaagggagagaaggaaaaagattccgatgtggtgagaaaaggttaagttttcaatataaggcaggaaacgttttaaagtatatatatgccttggaggtttacccctattggttaaagggtaaaaaaattcttaataggaggaaaaatttttggacatggtttttggggaagttgaccccttttaaccattttgaggtccccgtcttttcgagggggttaagttccccttttacataaagcttccaagaagtgtgccaacgcaggggttcttacccttgccagccaagaagagcttaacagtgggttcactcagcaaatcgtcaagaatctgcacgttgtgttcaccatgaacccgcctgaagaaggcctatcctccaaagctgcaaccagtccggccttgttcaatcgttgtgttctcaattggatgggagactggtccgaccaggctcttttccaggttggctctgaacttactcagtctgtcgacctagataagcctggctttgttgctcctgatagcataccagtggcataccgtgagctgagcctacctgcgtcacaccgtgatacagttattaatgcgatggtttacattcatcactcgcttcaacggttcaatcaacgtctgcagaagcaacaaggaaagacaacttatctcactccgcgtcactatctggatttcgttgcacagtatgtgaaactcttcaatgagaagcgcgaagaccttgaggaacaacagcgacacttgaacgtcggtctagagaagttaagggacactgtcgagaaggtcagcgatctacgtggcagtcttgctcagaagaagatgcagctggagaagaaggatgcggaagccaatgaaaagctgcagcgcatggttgctgaccaacgcgaggctgaacaacgtaaggcagtttcgcttgaagttcaagctgctctggaaaagcaggaaaaagaagtcgcccttcgcaaagacgtcgtgcttcacgaccttgccagggccgaacctgcagtcttggaagcccagaagagtgtcagtaacattaagcgtcaacatctcactgaagttcgttccatgggcaatccacctgctggtgtgcggctcgctttagaagccgtttgtactctgctcgggcacaaggtcgatagctggaagaccattcaaggaatcgtacgcagggatgattttattgccagcattgtcaattacgacaatgagaagcagatgacgaagaaccaccggttgaaaatgcagaacgagttcttctccaaggaggactttacatacgaacgagttaaccgtgctagcaaagcttgtggtcctctggtgcagtgggtcgaagcgcaggtcaactactctgccatcctggaccgcgttgggcctctgcgcgatgaggtcggacagctcgaggaacaggcactgcaaaccaaagcagaagcacaggctatcgagaacacaatcaatgatcttgagagcagtattgcgacatacaagtctgagtatgctgcgcttattagtgaaacacaggcaatcaaggccgagatggagcgagtgcagttcaaggtcgacagaagtgtacggctgctggatagcctgtcgtcggaacgtactcgatgggaggagggaagtaaatcttttgagactcagattagcacacttatcggcgatgttctcatcgcagcggctttccttgcctatgctggtttctacgaccagcagttccgtaaggcgatgactgaggattgggttcagcacctggttcagtccggcattagcctgaaaccgcataatcctatcacagaatatctgtccaacgcggatgaacgtctcgcctggcaagcgcattcattgccggtcgatgatcttagcacagagaacgccatcttcctgaagcgttacaacagatacccgctcatcattgatccctcaggccgagtcactgagttcttgcagaaggagagctcagataggaaactcacggtgaccagcttcctggacgattcttttgtcaaacagctagaaagcgcgctgcgtttcggaaacccgatccttatccaagatgctgagcatttggatccgatccttaaccacgtcctcaacaaggagtaccagaagaccggaggtcgtgttctcatccagctcggcaagcaggagatcgatttctcgccctcattcaagctcttcctttcgacgagagatccctctgccacttttgcgccggatgtctgcagtagaaccacatttgtcaatttcaccatcacgcagagcagtttgcaaatccagtcgctgaacgaggtcctcaagtccgagcgtgatgatgtcgaccgtcgccgttctgatcttgtcaaagcccagggagaattcaatgttcatcttcgccagcttgagaagcgcttgctgcaggccctaaacgagtcccatggcaatattttggatgatgataatgtcatcgaaacactcgagactttgaagaaggaggctgctgaaatctccaggaagatggctgagactgaaggtgtcatgacggaagtcgaagagatcactcagcgctacagtatcatcgcgcgctcgtgcagtgctgtgttcgcggtgcttgaacagctacaccatatcaaccacttctaccaattctctctccagtactttaccgatatcttcgagtcagttctgcacggcaacccacacctcgaaaattcaggtttacggaagatggaagattatcaacagcgcattcagatcattcttcgcgatctgttcgtcactacctaccagcgaacctctttgggagtcattcagaaggaccgtatcactttggcgatgcttttggcgcaggcggctccttaccccatggacaaaagcattatcgacaccatcctcgatgaatccgttgaaggtacggatttgtcggccaatcccgaggcgaaggtccaggtgatgagcgcgtttgggaacatgtcgctatttaaagcgcatcttccttctgtgactgctgagcaatgggatcagttcctgggcgaagaattggcagagaatttcgttcccaaggtctgggatgagaacacgtcagagcttgacaaactacttcggtcgctgctgctcgtcaaactttgcagaatggatagattcgttccggccgctgagcgattcatcgtggccgtctttggtcgcgaactttatgagggaagcaccgatctcaaagacatcgtgggccaagttaccgcaactgcaccaatatcccttagctccagccctggcttcgacgcaagctacaaggtcgatgctctcgtcgagcgcacgcacgcgacatgcgcaaacattgctatgggttccaacgaaggtctcgagagcgccgacaagcgatcagcaacgccgcctccgcaggaacttgggtcctagttaagaacgtgcaccttgccccctcctggctgcagagtctcgagaaacgcctcgcctccctcaaaccccacaaggatttccgcctgtttctctccatggaatccagccccaagatccccgttaacctcatccgcgcctctcgcgtccttatgtacgagcagccggctggtgtacgcgcaaacatgaaagactcgctctcgtccctctcaactcgtgccagcaaagctcccgttgagaagg

SEQ ID NO: 1802 - DNA, 4400 bp, Emericella nidulans
atgcattatgcggtgccgaaagctgagcaaaagtggctgtcctttttttttataaaaaacatttctatccctatatcagatccatgggggatcattacagatcaaacgacttgtttatacaaggtcagggttacgaattcaaggttgagaaataaccctaagtatgaacccaaactcaaaagtaggtaaccttaaccttacccaacctcttcagcctctgtaaaatctctaacttcctcaactccagaaacaagtcctgatcatcagcatcctccaaatcccccgagatattaatccacggcgtgccctttgatagcaccaaatccccattcattttcgccgacaacaatggtgacacaatgttgctaggggcagtggcagaagccgcgtcaacaacccccttatgaccgttactcagatccaccttctgagtaggcttcccctcagtgtctctgtgctccgttgcgtgcgatttatcgccaacccaccctctacacatgctcactgccttttcccagagggaaaattgctcgcggcttatgtcctgactcgtctgcgggcggaagactgtacccccggcacggttgatgtcgcggagctcggcgaagttgcgccagagaccgacagctaggcctgcggcaatggcggcgccgagggcggttgtttcgcgcatcttggggcggtaaacggggatggagatgaggtcggcttggatcttctgcattggaaagaaggatatatcagtatggagtctctgtatttaggcaggggtagagagttatccgttctgtacctgcatagcgagatccgagttgctcattcctccatcaacagcgagctcgaataggcggtgtccgctgtctttctccatggcattcagaattgccttggtttggaagcaggtcgcttccagtgttgctcgggcaatgtggcccttctgggtatattgggtgatcccaactattttgtattagtattagcatatgagggtaaatttgagaagttccagcttacatatagttccctttgcatcatcgatccaatacggagcgtaaagtccgctaaacgcggtaacgaaaacacacccgccgttgtcttccacagttaaagccaagtcgttaacttccttagactccctgaagaactctaaattattctgaaggaatttgattccagatccaccaaccgctatgcttccttcgagcgcatatactggtcgtccatcgaaattatacgctatagtcgccagaaggccgtgcttggagataactggtttgtccccgacgttgtacagcaggaagcatcctgtgccatatgtattcttggccatgccgggggagaaccctttttgccctacaagggctgaggactgatctcccaagcatcccatgataggaacccccgcaagcctgccgttggagagtgcaccgtaggctgtgacatctgaagaaggaacaattttgggcaggtgtactcggcccttaatgccaaagaaatccagcaagaagtcgtcgtatcccagtgtctctaggttcatgaacattgtacgtgaggcgttcgtacaatcagagacgaaaacattggcagcgcttccgccgttcagtcggtaaaccaaccaggcatcaacagttccgaaggccaaggtgcctttttcgtatgcctctttgaccttgggaacatttgtaagcatccagaggagcttagaggaagaggaataggttgagagcggcagaccgcagatctgttgaagttgcgatgctccgggtttctttttaagctcatcaacaacagcttgcgagcgggtgtcggtccagacaatcgcattataaagtggctccccggtttcatggtcccaaacaactgtagtctctcgctgattggtaattcccaccgccttaatagattgttggtcgtacccgttgatttcgaattgtttaacagcttcttcgatgcaggtttccacagaagatacaagctctagcggatcgtgctcgtgccatctgccaactccgttagcgctgtcataaagcatcaggaacaacagtccttaccccgggttaggatatatctgcttgaattcgacttgatgtgatgcgacaggatctccctcgcgattaaagattagaaatcgggtgctggtggttccctgatcgatagaaccaacaaaaatctttgctgggtccattatcctccggcctcgaactcagagtctgaatgtgatgtttatcgcggagaatattctgatttcacctgccgactggttgaggtaaacaggcagaagggggagaaaaagtgaggatgcgtaagaggtgaaattgcactcctctggatgagataccggagggagtaagtgcgtctccagctttgtttaaatacttctttgacaaagcatgagtacgacgagtggtttcacaatttttccgtctcgccatccaatatctgcgggggagatgcccccgagcacggaggggtgaatgccgagagtataatctcacctatacccatgctagcgtcacgaaaatggaaagccactgctataggaccgtcttcgtaaaaagggcgcgaaacagcgcctcgaccgataccgcctgagataaaggccaacatgagcctaaaattgcaaaccagtcgagatttcaatccatgttctcgaacttctgtaggtatcctgaacttagccatgtgtttgtctcccatgtagacaaagccaaatataacccttgtgacctcgtcagccccaacaggctggttgcgttcgtggggaaagatgctcggtggagtaattgacgatctgagctgtcggaagactccagtcgccgatccggtagaaccgtgtacaagggcgaccatacggaccacaagctgttctcagtccttgttatctggaagccaccatttgtcggctgtctaatgttactactgaggagcgcccggcagacatgggccgaagcgtacggcagcatggattctggtggtccaacatcgaacaaatcgctgccaagctccaaccctgctcgttacccacctccacaactccacatgacagcaacaagatggacgaatggcgattgaaacatattgacccatgcgatgcagctgccagcgctaccattctcagtctccacccaaacattccagaacatcatgaacgagaccacagaacggcgattgatgtcacagagccgcactgttccctgggcactactatatgagtgatggcgtccggatagaggcgtgtcaattctcgtccctgcggaaggtaacagcggctgaaccctggatggagttgtcagaaatatcgtacacaaccagttgcaatgccaatgaaagagaccaggcttggggggactaattaccttgaatggaaacgctctcatcctggcgatgcttatgtctgcaagtcgcacaaacacagtttgcgcaccgaggactggtgtgagatccgacgcccgagatgcgaatgtgacacgacgctcatcaggctttctctgagagtttcaacgcccttcatgtgttgaatgacagctgggttgcattctggtgtagtgatggagtattgtcaggcaaatgttcacaaatctatatcccaggacaagctagatgatattcaaacgaggatgtagatgacaaagtcttgctctagaataaacaaagaatcggggatacagagttaaggtaatgatgtgtggaaagcgagttgaagaagtagaggcgtcaagggtaaacagagcagaagaagtgaatggttgccggccagtggaggcctgccagtctgtttgcacaccccccctcctattctggtcctaaaacatctctcctattttcacccttcttctctccctctcgcttcccagctctcaatcttacgagtcttccctgatctctcatttgctccagtctcctttcccaggcttggacctcttcactgcgttccgtctctccctaatcagaaccatcgtgctccatatggccagagcatttgactaggacctcctgcatatctacagctagacagtgcttttcatggtatggttccagtaccataatttagagaaggtgacaccatgtatgctgatgatgtttagatgtaggatatgttgcacaccttgcacgaagaccccgaggcacaacccacggcgttcccttcctatttgaacacctcgcccagcacttctgagcatatcccttctggtaaagacagaagagactcatcatatcctatatactcttctattttactaaatggttacagttatgtccgctgttaacggaatcgatatcccaagaacatgcaggtttctttgcaaacgagcaataagcgagacgccgtcctcggagtgagtacggcgtctgaaacaaccgaagcagagcctacagcaatcgatgctcatccatcacca

SEQ ID NO: 1803 - DNA, 4046 bp, Emericella nidulans
aaatataaattggattttttgttttaaggttttttgggtgtacaataagggtttttgatttaagggatttcccttaatcgacattgggttcaactgtctcttctcacgggcagaggaatctcctcccgtggaggttcacccgccaatcgggcgtttttagactctgcgtccggccggtaggtcctcgtagggtccggattggttgaaagaccgcaaaaggttgccctccccttttgtgaaaccccaatttaggcccattggaaatgaggctggtcaggactgctggttaaacgggtccaatgaagcgtaacttccaaacaggttcggccaaaccttggcaggtgggcctttacccggggtggtccaaaaggttggttggtgcatccatcgttctcatttccggggcggttgtcaggggatgccaaagatggccacagctcctacagttcgatcatgggttttattgccccatctttggaaggctttatgtagggtcaccacccagaaatcgtgctttttctcagattggtattggggtttggccgcatcgcgtggaagcccatgcaacgtttacctctcataagcgtctgagcgcgtgagctaaggcagcctccgtagagagttggtcagcacgtataatcgtcatgggccgatcattggatggcgctcgctgaccccagcggcagaattcggtgatccgcagtacatttgctggtgagtgctagtaacagatcaacgagtcgacgtcattatccagccctaccactcattcgcagccagcaatgtgcatagtacgtcgttttacgaagtatacagggggcttgggctcttgactggctgacgggagaacgacggagatcaaccggctgacaggagttcagatacaagttgtaaatcaatcacagccacagcgtgggtacagggattcgatcattcaagcattgcagagtgctccacgaccaggagcatgaccatgcaggttatcgttttgactggctgaaatgcatttgcgggctgttgtttggctatcacagcgcaaatcaaagcttctctgcacctcgcaggatttcagcagagaaagtccattcatggagccgtagattgtgtcacggttggctgtccaatctacctgacggtccggtggggtgctctaagaagttccgcagagcttcgaatagccttcgatccttcgaaagggcgggcaaaaattgcatacaacatgccaaataatccctcctgtccgtcaggatcgctgacctccaccagcaccatctgcgggagcctggagggagaatatggagtggatggggaacttgttttgcatagtttcgaccctgaaatggagaccggaggaggccggagggagggcctaaaagacccaaaggggtaaaaaggcctgatccaagtctccaactctagttagatagggcccagatagaagaaaaacgagaggacggcggcgtttcaggatcgcacctgggcagtgggcacatgggcaagccggcagcttgcccaaacaggatccagacaggacatactagtggggaactaagaataaaatcctacgatcacaaagctgccagacccgtcccgaggttcgacttcccatcagggtgggcatatcattcaatttttctctttgccggcttccggtacatgctaagaattattacttaagaagtgccaaatccaattcggggctcagtcctctttgagtaaggctttgttcatcttttgacatcgccgctggtcgcattggtagcgaagatggaccgcaacaagaccctccgctgtccgcggggaccgccacggtaatgatatcatatcgccattagaggcggctaggtagagaagaaaaggaaaaggtcgaaactcggatttggaggctcgtttactcgactcttctggggaaactaaagggtaagtggcaggggtccttgaaggggttagctccttacagactcgttacatcttaaaatacggggtaaacagtacagagcgcagagtcaccagcagcaattggatttctaaagtcgcagcccctaaaactcagtgactatggatgcccaagaaaacattcagacattcagacattcagtcatgatctggcattgccagtaataatagatatcgcgactttttcggtgctgagtggttttttgctggctgctgctcttcagagggcccactgtagggcggcgtgggccgccgaaaggcgagtgaactagatgagaggccgaactgccagctattcggccctagtctcttttgagcacaagtccctgtctaataataaacctgactgttttgtagggtaatgctgatattattatccgagtccgactcgctgcaagcccaacgcccatcctccacccgtgacctcaccaccgtttatggatccgagatggagaatgaccgagtcgtagtagtgggattgtgggaaaaaagcagaggtttgatcatcccggtccctgggtagaggctgatgcggatgcgctgccatgggttgactgctgctggttcgaggtggctgctgtcattcgtccagatcagaataatataatataatccagtcgcagtaaatagctgatgaaatactagagttataataaggcagaatatatggtccgtttctgatgcatctgtcgagtgccagtcagttgcgaatcctcgagtcacggtctcccatcctggagcccccgccacactccgcccagtgctgctgctgctgctctctgaccacgcttagtgcgaaaaagggatcttaagccattactattatattctctctcgtcctcctcttttcttttccgttttcctaatttatccatcagtcttctgaggtacctcactcgctttggtcaccttaaatccttccactccgccaactctacccttctacctcgcctcatctgcctccccctcccacaacactacctgttatggcattataaggatacactcaagatccttcgtcgtttttattcactcgcttacattcgctcgctattacactcgcttggtttggcaccgaagtaatcctacgttcgctacgttggtgttgtgttgttgatctaagacgcttagagagacaaccttgaaccaagattctgggatcgaattctcattttgttgtaacccagaaaaactactgaaagaaggagattacgctgaaaactctaatatctaattacgcatatcaacgctctcgctcatcgttgattcgttcgctattgcttttgctcgcggcttgcccgtgactctccacgcttccccgacttatccaagacgaccaagacaaaacatctcgagagcccgcttctcggatcagcaccgcagttggtatctcctgtttggtgtggtccactgacagctgcgcgtttgttgtcatttcaagtctccggctgtagagcaacaccgtttgttccgtggacggcgcaactgaaacaatcgccagagcgcgcttcttgcgaccttcagcatcttgtcgtcatcagggttgagcatctcattatcccaacctgctctccaaaggtggatctcagcttggtccgtcttccaatatcgcacctgttgtcgccagcccttggaaaggttcgagctggacccaactggcgtggagccttgtcttcgttgaggacacctccttttgacagaaagagcaaagatctttgactgcctttttggttgccaagttagtagcagagacctttcctcgccactgaggctgagtgccttgatccgccctcttcgaactcttcattaccccctgctggcagacgggcttgaagaaggcccggcagattgcaaacgtggcctgggaattaattccctggacgcaattaggggaggtgtggcgtttccttaaccgttgccgccttctgtcgagttcataaacttgaacccggcgatgtttaaaccttggagcttggagcaaccatatgcgggtggggcccccacgtgattttccctttaatacttaagccggcagggaattttttttaggaagagaatctcatttttcctgtctaatattttttagaccc

SEQ ID NO: 1804 - DNA, 4664 bp, Emericella nidulans
acagtggtggttgcaagtgtcctaccgctaccggtgactgcacattaccaggcattagtatatgccatcgccgacaaggcggctgatctcatacttagctaattgatcgtctgcactctgcttgacatgatttgttgtatagcttgtacacaaggccaacgtttcgtacacctcgttgatcgtagagcatcatttagagagtagttcgatcccatacccggccaacggcccattgtccgatctagagagtggcacagttaataaatcataccattcaactcgggctgggcccggaactcagctttgatccgctccagagttataaaggtaagccagtaggaatcaaacgagcccttgtggtgcggccaggaccggagggcggcaatcgcacgacttcggattcgatcgtctcggcaacccatggccacatagtacagatatggcaggatgccggtgtccaatatgacagtcggcagtccggggtgtctgttcataaagtctcaacggcggaaaggtgggcttcatactccggaatgtagtagtctagagtaggatcctcccttttcaggaccgtcctaatcggaagactcagactttgatacactaagcgtagtagatctgccccgtgtcgttccttttgactgagccggctgcccaagcagaaccgctccagccggttaccaaaaacagccacacgcgaaaggagccacagttgtctgatgcatggagccataatccaggaaaatctcctcttctgatagctcttcacactgcccaaggaagcgaaatgttgcccccaggagaaggtcaagcgcttggcgtgcctcctgaagactgggatatcctccgtgaacagccatgcggtccgtcagctgctcagcctcatagcctatggtcaacgttccatggactctaaattgcaaagactggacttccagactgagaaatgctgcaaccacacaaggatggacaaaacgctcgcatccctcgatctttcgcctcgtgcagaattcttagcccgctctctagatgttggaaggcatcatcatattgaacgcgcagcagctgcttgagaacaaatagcaaacagcacaggagcataacttcacggaactgtgggtcctgcggtgaacagcgccgactgagcagcgtaaatgaccgtccacactgctcgagcgcaaatctatgccaataattttgcagattctgtccaggtaatggtagaccgtgaatatcggagtccttatggatggcgctcagagcgactacagcatggtataccgcagcctccgagtggctcatctggggcaccaggacctgcgagggcgatgagtcgaagaacagggagagtgtagggaccatatggttccggaaatgtgcgaagcaccgctgctcatccgtcgttacagccagggaagcccgcttgggaccgccgggtgaaatgtctgacggacatcaactgggacaagggatcgatgtcgacaaagagcgattgccctacataccatgaatctgactgcattttcacgaagcagtgagtggtagatgcaaggtagactgcttgaccaggtaatgagtcgaatttgtggacggcgacgaggttaagacgcagcagtaactaaacgccggaaataagcatcatggcgaagacaagtctggaatcgaaaacatgtcgggacagaagccgagcgtggttctggcaccttaaactttccggcgctagggccagaagcacaatgctcgtacctagcgcctaatgggaaatacgactctggagttggcaaggtcattgcaattggatgacgggtgtcccaggagagctacgtcctattgaacttctcgctcacaggacgaccatatcttcatcctcttcgaaaagagggtattagttgtctccgaaatcctatcgcctttggaaaacattaaaagcttaactgacaacataaggaactgcagtaccatcaacgcgcggtctagtgggcgatttaccagacaacattgagattgcacgcctatttcttgagaacggtgtgcacctgagcccgatgctgatgtggaccagcttacctgagggcggcccttcctgggtatgctgaaatggcgctcatactcgaggtgagggagatacatgaagatgctagtgagacagtacacttgcacacgagattcagatcctgggaatcagaggtatagtaatatattcctaaggagcagtcctggaaatcaggagtgcctacgtaacttttttgaccacagtagaatccttcctgtccttacagaagatattgttgcacggaaggaaaccgaaagatctgatacctgagaaacctagctgggaagcagcagttgttgaagactgctacaaccgcggatctgactcaggaccaaaacgagaataaaacagaacaaagcaaaaagagtgactgactagattccaaagacaaatgccacgataggacgcgagagtcttactttgccgagtcctttcccttccctctatcttccttgcctcccttaccaaacttatcgaacgcctgacgaagcacattcccactctcccttcgacccgacaacttcgaagtctccctctccagcacaccacgactctcccgtcgtggagctggcgtagacgccgcactcgaagtgctcgaggtcgtactgcccgttgtctgggccgccgcgccaccgggttcaaagtaatggctcgggacacgtaggggatccggtgaacgtcgaactacgcccatggtgggtggcggacgttcgtacatcagcctactggtagccgagaggggaacgggaggggaacgggagcggttggccctatccccccagcgctggcctgagtaggtgtagttagaccatggccggctattacctgtattggtgactgtggggctccgggcctgttggcttgcggggctctggtttgagccctggcggttagaatattgcctattgttgtttcctgacatctttatggtagagggcgaggttgagaaacttggtgcagattggatagcagtgaatttctgtttgatggtggaaagcgagattgttaaggtgattctgtgaatataggtgccttggaagggttagcctggagagaaaaagtatgatgagcacaagtatatatccttgcaatcgggaggatttatagtgtgaacacactttgtctttagtatagaaagcaattatacataaaggaatgtcagaaagttctgctccgtgacgagggcatagaccttgctttattatatccaatgaacaccataaatagactgctgggtgccaaaggatacactagtaaagccatggcagaaagagaagtcaaagacaggctcaaggccggttgtttgagtctaccgtaaagcagtgagccttgtgtctattctcgtcaactgactgtgtcttggaagggaatatctgggtataggcggaaaacctatatcgactgcctagatgcgattatcgattgctgccgcttatggctaatataaatctgtacttgcgtatatccagagcatttcggtctggccacgcacaaatggtattcataacgagagcttacatatattcccactgagaaagaccggcttgtcacttgcaccatcctgctaatgcacatacaatttcaccggatcccatatcgacaaagagaagtcgaggtcaaaggtcgactccctttctggcggaactctggctgccaaggtctccgcgcttggtctttgtagccgcatgcttgtgtattcgccttcatgatggccttggctgcaacatctgcggcagaaatattcaccatgaatgattcggctttgctaaggaagccgtttctcggtcccggtattcctgtcaattatatgcacagcaatcctgcaaaatcgcacgtattgttctgtcggttattggctgtctgtgacatctttctcattatggaatctgtctgatagatgattttgattcttgtctcgtcaatacactccctgagtgccgtcctgagaacacgtaataggtcgaagactgcgtagctggcagagcgaacacatgagatgttcctttgtgcggttcctcaggaagtataacgagcactgttaggagctgtcttgcattgaggctaccctagatattgagttggttcaccgctggacgaaactttttgagggctcggttgttcttcagggcactctgaacgagacataagagtacagcctggactgtggctggaaatcgagacttcaccagctggcgataatgcgcagtccaaacaaaagcgcagagtgcaaaagtacaaggatgatttaccttgcggcctggatggtggagggtactattagcagccccaggaggataaggatgaggaaccaacatgcaaggtcaggagtcaagtttagaaaaacaagaaggggcgtttaatagagtgcgttaagtaaagagcaactagaatgcagtatatagtgtagatttcgcggtgggggcagaggtcaaggatatgattgtgaacataccataatccatttgcaatgtctataagctctgataaaccgcttcctaaatgtctgattcctatgctatgtctgaaccttgaaggtcgcaagtaaacaacataatcagcatctgactgtaatgggaaaatgcagtctaggctgctgacagtttggttagaa

SEQ ID NO: 1805 - DNA, 2667 bp, Emericella nidulans
tccagcgcccgcctacacacctcacgacaactccgcacttcctccccgcgccattcccataacccgagatatcctaacgcatcccgtttcggaacgtgacagagttgagacgcgccgtcgtcgctacgagcgcgaagatgctatatcccgcagagccggcggtttatggcgcggccgcggccctttcagcaacaaaggctgtttcggccgccggggtcgagaaggtcgccttcggcgcaggtggtacgccgctatctgtctttttttcctcgccattgtcgtcggtgcgatcctcctcgctacgttcttgacacgcaaaggagacggcacgcccgtgcaatcggcatggctaaatttaacgggctacccgcccatgccgacaggcatatcaacaatcgcgggccccgaaaacacggttcaggactcggggtgtatcacgccgaattcgatgtggagttgtgcgctgccgaaggagcagcaggacgctaatgaaccttatgcaaccaatcagccgaatttccgtgttgagatccggtttcagaatgggacgtacgatcatagtacgacattggcatcacggtcgatccatcgcagaagcgcgtaccagctgtttaaccctaacccggatccaccaagtgtagaagaacaagcgttcctgggccagtatacggataagacgtctagcccgtatgcaggcgaagagacgcccttctacatcactgttctttcggcggaatatctatcctcttcgtcatcttcccaatatagcaaacgcgacaacgacacatcaacaacgaacaacacatccaccttcccagacgtaacctcgctaatcccttctccatcaaaagccagcgacggtaccgctgcccccgcaaccctctacccgcttccctcttcgcaaccagtccgtctctataaccgcggcaagaaagacgagcactacggcttctacacatactttgacagatccatctttctgtcctcctcagccgctctcacaggaataaaagagaataacaataacgacacagatggcggatccaccaaggaagatgcttccgtgcgctgtacatgggcacaaacgcgttttctcgttcagatctggacaaagggtgacgaattagggcgaagtgtgtttgcacgctctgtcaacagcaccaccagtacaagcgccaactcaacgtcttcatctccatcaaccgcggtctcctccgcgacagacttcacccgccccggctccttcccctacccaataagcataacactcgatcgacacggcgggaatgtcgaaaagaagaatctctactgctacggtctggaagaaaatgcacggtataacgcctcggcagtcaaactgcaactggaggaccgtgcgtggaacgggaaaattgtgaatcgagcgcctgggatctttaatttagggtcggcgaattcaactaatgacgaggcatatcagaataaggattatggtggttatgatggtgggatgggtgggtgtaagtgtcagtgggttaattgggttggggctgtttaatagggttcagctcttatccgctagaaatggattgagaagattatatatgtatccgacggtatcttgatcatctctttccataaattcggcggagcgcatgcgagttcaagtgaattcgggatctctgaccgaccagccttatgacgattaatatggtagtggtagactaccggagtacacagtactgttattttaatacaaaaattaatactaatttaggtttatacattcatgatgcgttcaatggtcccgtttttccagtttcggcatgtaccaaacgtagccccggcttcaacgctaaggatagatgacagaggctgcctacagtagatagacaaaatgtaccaggaatgctgagggtcttcatcaagcgatagtcaaaaagagagcatttgtattcttttaggtttggaattatagatccagcgggtcataagcagcaaagtcagagccagtttcagattatattatgtggtgaaagactaaatgaccaaacgataagcaaagcaccattctgactcgacccatacagaacagaaagtaagcaagtagagaagcacagtttaagttttgcaaaccgacggcaatcccctgataccttaaaacccaaattaagccaaatagaacaacccaaacgcaacaccagccagactagcaaggctggggataatcagcttagaacctgggttaacaggggtttctgtgggttcgggtccagagtgaacaccatcttcgcctccgttgtccccatgtgggcttgtcgaggtgggtttgtgctgagcggaagtcttggtcttgtgcgcagaagagcttggggttggtgatggggtagtctttgacggcgccggggttagagtggggcggattagaggcgtgcttgatgcggagggggcgctggctgagatgatgggggcacttgccgcggggctggacacacgagcactggattcagggagatggacgcttgacgggataggtgcgttgctactggaaggagcggaagcgctgtggtgctcggcaatgacgctgggctgagagctgggctgagcagtcggttgacgacttggctgggctagtagtaggttgaatactaggctgagttgtaggttgacgacttgactgggtagtcg

SEQ ID NO: 1806 - DNA, 1205 bp, Emericella nidulans
tcatggcttgtcgggcctgaaactcgcgttgatgggccgctcgggcgctcgtacgtctcgccctaggataaaagaatatgtgttgcagtaaaaatgcccgtcgtcgaattcgagtttggcgaatgcttggatccgcggctcggatcctgctactgatccgctcccgttatgcgtgccaccctcagtgtaacccagagccgacaagttcgcgttctgagaataataagcagagttcaccatatcattctgttgtaaaccctccattggcgtccctggggccgtaaagtcgattggagggaaaaggtcgctatgatctaggttcggttttgcgaacagtaagggatccgttaaattgtcaatggggtcagttctggctagaacgttatcgttttgctcggttgtcgaaaatggcagccctgattgttgaaatgccatgtcttctgtttgatgttgaggttccgccggctgactttgatctccgttcttcggctccgctccggacggcggaacatctaccccttgttttgtttcccaattcccgttggattcatctccaaattgctgcttctgctcagtatcctgcttatctgagacctccaagccttccatagcctgatctgagtctgtattgggagcctgctggccgccaagcaactgggccaacaaagcactggcggcggactgacggcggagatccgactggaactcctggccggttgaaagggcatgcgaagcctgatcctcagccttggacttgactgctaccatgtcggacagggtggacaagccattggaagacgatgagtggtcgggggcagaatcgttgcgggttgtcgattgcggggacggaaggtgatggtcgttctctggcgagtgctgcgaccgggtgtaatcgtacaaggacgacacacccggaccagcctctgaaggatgatggcccaccgctggcgctgtcatggtctgcgacgatgacatgaccgggagtagggcggctgggatctggttggcctgtaaaagaagttctcgagcggacggctaaagagaggagaacgcaagggcggtgaagggggaaatcaaatgcatgggcgggcatagctcgccaatgaaggttcgtgttgggatttggcagttctcaatctctcatcaatcagactgagtacgagacagacataagatctacacaaagatgactcatcacagtatac

SEQ ID NO: 1807 - DNA, 2208 bp, Emericella nidulans
tagtaacggcggccgccagtgtgctcagataagagcatctatgtcgtggacgataagaacgccccgttgacggtcgatcgccgcttatgtgagtcaattttgtttcggagctttattgatggagtgctaacgctggttgattgctaggtattataccttgtactttctcgagtcctatgccgacgctcgacgcgagcagactaatgtccttttgcgcgattttgaggctggccggctccctgtgcgaataccgccggatattcgcaagagaatgtatcaggaattgcaaaggaaaatcatgcaatctccgccctttacggatacaactacgctcatatcaacccatcactgtttgcgcctgctggtctcttggctacgtgataccgtcccaccagacgagcaagacgtctcagacgacagctggataggctcgctgctgacagtgtcacccttccaacggctggtggaatatttctcagcagaaattggggacggcgggaaccagcggatgcagcggaaggatttcatgtacaattttcacagggacatctcactgactgaaaacgatgagatgaactcccgggtttttgagagcgcgccgaatgtgcatctccatcgctcggtccaggatgtatggttcgatgctgccactgctgagatcgcgaagagaagggctggcaaccataggaaagagaaagttatgctctatgacggcgtgcctttcttattcggctgcccttactgcaagcccggtgctggtgatggatggtatactccgttaaggctacattgactaacgctatattatttgcttggttgcggcgttttggtttagaccggtacatgagcaggttgtttatgcattatgccagcgattctgttagagttccctttcatacactacttacatgcatcctgtcagactggtagtcgagcatatataccttgcagtgggttcttagcacgtgtttgtttgtattgtttgcatcggcgcgtctcggcatcgaacatctaggttaaccatacaattaagtattgtcctaatccgggaattgactgggtgttgagagtaggtgtagagtggctgtacagttccgacatgtgattttaaattgaaagtcccttttttctatccaggacgaaaagggctcactaccaccactacatacataataatcaactcgaccaatatggcaagcccataccacctcctcaacacatcatggacatcccaccgtctctccccactccactacgaaatcaacaaaaatgcggagtcatattccctcctcacaaacagaaccgccctagacacttacgccgcgcgcctgagagactacctgactaactccctggctgtggccggcgcgccaactttgcaacatgacccagcaacatccgcaaccctcggcgcactccaatcatgtacatgggaagctatatcatccctttccttcctggacgcgagcatgatttccgagcatgggggacatagtgcatttgagcagaacgaggaagaaccggcaggcctcctaataaccctcacctacgaaaacgccacatacaaagccgcccttcttagctctggtgctgtctctaggaaccagagccaagaccaagaacaattgcagaagcagagaaagcgcaaacgaggccgtccatccctgaagtcatcaataacgacagtatccgcatcaacacacctcccccttctccttttacgcctcccgaaacccctcagggagagcttattttcgttccttagctcgaacttcgacacgtatgtgtctgccttacggatctcaagccacgggctttgtgaaattctgcaaagttatcttagtggattgaccccagctgggccagtgaacgcgggtgcggatgtaggagagattatgcgcgaattacacataacgatctcctttgccccgccgatagcaccctcgctgaaggcgctgactgtttgtattccgagggagacgtctggggcttttatacgagtgccagggtctacttcttacgcaggtaatgccgggacttccgtgctgtctggactgtcagcgtacttatcgaaacatcttgctctggatttgagattgccgttagtggaaggtgcagccgctactactgctgggtctttgctgacagggggctatgtgcggctcacgacgaattgcgtgtgctggttttgtggttacctctgagggg

SEQ ID NO: 1808 - DNA, 2135 bp, Emericella nidulans
gatagaggtcatgtgatagtagagtatcatttgcagattctaaatcaggacagggtgaggagagagcagttaaacgagatgataggataagtgtgacggggtcatggcatataagtataagatcaaggaggtgcagaggatgacgggaaagagtcgaggaagactccagcaagtatgagagacacgttatagcgaagagacaagggagcgaaggtaaaagttggagcgagataggaagaaatgatgagcagggataagtcaacgagttacgcaaagacaataagacagaaacaagtagagtagaagccaatgagggactggtcagaacaagaacaagcgagcaaggagataagaggatcaaagaaaggagcgagcgtggatatgcgtgcaccggaaaggaagacgagaataggagggagaggaagggaagagagcaggacataagagggagtggagatgcagagaaaggtgaaggtaggagggatggatcaacactcaccatatattcagctggtaccagtcaacacctcagccaaatccttggagcgactttgcaaccgttctgagtatcatcgatttccaggtaagtcctcaagagctcaataaagttgcccctgtttctaagtgtctttctcgcttagtctgacggagcattcgaccatcctttagtccctttacagctgtcgtgattgtattcgcggctctcgatacacccttccacgttatttgccattaattgaccaaatggacattgacccaagccggaggaacaagaagcctcgccctttgttggaatccgagcgtgagcgactggacgagttcatcgactctatccattattcagcaaggtgcgtacattacctcaaattaccttcagcttctaaaatgcgcagatactctgatgatcaatttgaatatcgccatgtccagctgccgaagaacatgctgaaaaaaatacctgccgactactttgacagttccaaagggaccctcaaattattatgggaagaagagtggcgagctcttggtatcacacaggtacgcattattattccccggcaaagaattgtctaaccctattatagagtctgggctgggaacattacgaagttcatgaaccagagccgcatattcttttgttcaagtatgttcctacagtcggcctagccagtctacgtgctcacagtttacacagacggcccttgaattaccagccatcaatcccacaatgaacggcgtattccgagctgccgactacgcgttcgcagcgtttacacgggcgtcgacagtccagacaccgaggaagagccatctcgacgtgccgctatccaatgcacattagaatgctcccggcaattcaaaactccgtgcaatgagttcgataaatggaatatggtatgattcatataagcaagatctctcgtatgtcggctaaagcgtgagggtcgttaaaaatcattttgtccttctccattgcctttactttgggcctgaggattttcaatttacgttcggccagccattactcccaccgagtagcggtggaactgctaatccctggttcttcaatgtcctataacctcaaagtcagtgctttacgaggcactcgggacttttaggcttaggtatcgcacattgagatacgctgttggagagatatgaactccacgacttgacttgccctgtgctcggtgttagttgcgactctcagaaaggacgctaagcacatactttgaccattaactttaaatcattcagtgatcttattttccggtgttcaacttttcaccctttacggactcttgggaattatcagcagtctttgatagattttacatataccaattattctcggtttcgcgattgatcggccgttttagtgcagttcgtgacacctttttgccggactttggcgtgttaaaaaggttactgactccaaattgccggtattttgggattgaacccccccccgctaaattgggcatagattgttttcccggggaaatccccgctttttttacaaaagcgggtgtggaaacccctatctgggaagattttttctcctcctaatgcaggttgtatactctccccccccatctttctctttttttgggcgctccacgagtttttttttt

SEQ ID NO: 1809 - DNA, 3451 bp, Emericella nidulans
aaaaaaagaaaaggaatgtttccttccaagtacggccaattaacctcttcgcgtgagtgcgcaaatcaaaaggccaagagtggtttcctttggcctaaccggggacattggggtttcaccaccagtattaaagttgctagttaattattgcccaaaacctgcggaaaaaagcctcataactgaaggcctgatcgatcccatttcgccaaaggctttccttccgccatcggacagatttctggccgcgtcaggtcaagaccaatatccggccctctttgctcggcgaatggtcttgatccgaaaaatggtttgcggatcgtctcaagaaattctcagcaggaagttgcagagcggtaatggccgctttccttttgagccatcgatcataagataaactcggagacaaattcctcccttccttgagatctgtttgctcggaggaatacaccctgagcccattctccgtacaagccgaagcagacgttgacttttgcgcaacgtttacctccaacttctcattttcactgaattttgtctccgacgtcccgggtgccggcgccgcggaaacttcttgctctgcaacctccgattcggtcttcgcaatatcccctagctcaacaggtgacggaggagccgattgcgactcgatattcttcgcaaagattgttcgacgtaacgagtatccgcggtttcgggatcgagagcggccaacggtatctggactctgcggggacgtaggagagagcgctgagcgcggtgaaagagtcgaattcggcgcacggttggcatcaggagaggtagcagacgaaaggctttgggtattcgcgatactcgtatttatcgagagtcctctagacgacggtcgccggtcctgctcccatgaagcctgtgtatttccttccgcaattggacgctccaaatcagctgaaaaacggacatgttgttgcgataacctccttcctgaatctgaaagtgttcgagagggagaaagcgaggtccgtcctggggcggctatacgcagtgaatgacttctcgaaggctggggtgggcgccgaggaatctgtgacgtcgtatcggagggactcgacggctggtctagagagattcgcggttgttggggactccgattctgggtcgaatctggcactctgttcggttgtgacatggcaatgtcacttgctccctgtaccgaaaagtgaaaaatatgaccctcctttccctactatccttcaaattgaatcctttttcgactccagcctggtgtaataatcaagtggtcggtcgtacaagacggtgatcggcggggcgttatgacgttaggcaggcaaccgaactcatctttcagagcgaaagaggggatgctctgtgacgtgcaatagagaagagaaggtgtatgtacagaaaatatacaagaccgtgcgaggggacgaaaagcaaagagcgagaagaaactgggtctccgcaggaagcacgtttgcggtcggtcaggcacagaacaaaaaagtccggaaacagcaacgttgatcgacctctgtccccgtggacgatatggaagaaatctcagcagcaacgatcgtatatacgacaataaaaagagagaaaatttacaggagaacagaagaggatgaaaagacgaggaagaaggataggccaaagttgaatagggattgttgaaacacgactgaggcagggccgggctgggggcaacgtaaccccagtcggggctggatcttggaagttggaagttggatttggaccagatggcgcaacgccgccaatcctctttggatggcgaggtggaggcctcctgcgtgcctaggtacatacatcaacggttctgacagggcagaacggacgccattttgctttagctatacttaaagcacagccctacagcactagtatcactatctactccgtacgcagtagtagatccccaggaaaatacagactgcggataaaaatccgtccaagacagttttgcggtatgagagacagacttcgcccgagaccgtcgcaactcgcaaggctgctataattaagcagtattcgagtggtccaccgggccagacgtctgcacagcctccagggtctcgcccgcatgctaccaaatcattattcgtccaccaaccctcgctcttgctacgcgtcagctgttcgctgccacctcaattcgatggtgactagagtttccgatccgtcgaatcttgaaatccgtggaaggaagctagaagtccgtgagccccaagtgagttcgcgctcgtaagtggcaagcggagcacaaccgcttggcgtcggagaaacttccgctcaggtaaggattgccaccggtgtttttccgtttatctcttcggtcttggacgacgaagattgccgtccatatacttgtttgttggttggtgtagacgggacatattggatgaacaaagtgaggatatattccatgagacggctttcgtttcatctcttgaatttccaagaccgggagacgattgcgatgctgtcaacatggtcaccgacgtgcgccttctaacgtatcagcgatatcgaacgttcgtttcgtttacgaggtcatcgggctggtcagaaccaccatgagtggattggtcgccctctagccgcgtcctttgcttccttcattttctagtctggccctgactctttccatctgtcttcctggctggggtactgtttcgactttgtccgagagctcaggtaatacttctcgaccgttgtccaaaacacatcacatgcatccagcacacatattcgatatatgctccaattatcgaatgtggagggctcgaatcgacgatagggcggagaaggcgactgtgaactattggccgagcttgaaccactatagtatttattagccttgcacttatccggcatgatgatatacggacatacttccttccctttttactctgtacgcgttaaaatcaagctcgatcgtagtcacggttccctattgccatgtgtgttcgtcctcactctccgacagctccggcacaaagtcttctgatagatcctctttcttcgtaaaacgacaatatcttcactcaggttgattcggagaatgtacgtaatgagttctggaggatattggtatgtgaagttagtactgaactcgatgtagtagaccagcaaccactgtgtatacctggtttgaccgcatcacgatcaagagtaggaacaacacgaaaaatgatatctaaagttgtgaatggaagagaaggaggcagatttaaagtgagaaagacaacgcatgatagagaaaggttaggaggcaggttgaagtgtggaatctcgtgcggcgagaatggtataacgctgcccttcgcctattcgagctgctgacacttcctaaagtcagctagacatggcactaattgggaatgaaaggtataagcattcaatggatcagcaccgtactttgatgagttat

SEQ ID NO: 1810 - DNA, 4514 bp, Emericella nidulans
agagaaacgatgcacaaataaagaagaagatgtgaaggatttgattttttaggtgccaactggggaataaaaatgttttttgtgcgtctaaggcccacggaaaaaaatcatctcaaattgtttaaggaaaataaagttttccaaattaaagagcttgctgtaacgttcgttcaaaagaggtcacaattttggaatctcccgttgggccaccccaaattctgacaaataagtttccggcagagacttatcggaccttcaagtgggagcattggtgtccgatagtaacgctctccagattctctgtaaagtctcttcagctttctcgttgatccattctgctccttacaaaaattctggtaaggtctttgattccccatgatgaagccattcattgagcattgtcatgtagggcctgctcgattcacgaagaagagtttctacaagcgcttttgtcgtcggatcgccggagaaagttgccagtcgctcggtcagtaagcgtagtacattgcctcctttacatatttttttgctagacattgctccaggaataagatctcctccttctctaagctgttcgagaatgttatcaacgtcgtcaaagtcgtcaatcgactcatcaatatcctgatccaagagaccgtttcgtctcagcagctcctgacctaaagagtacaattgagctaaacattggctggtgggcatggtatgaagatggagtacatggagggtgaaattcgggttgttgagaagttgtgtctcgagctgggcaacgaggatcaaatagtcctttaataattttcgaatcgtagcgcatagggcgtggctcactgcaccgtactctgcacgactctgaacctcaacgaacgcctccagcgcactgtaatgtgttgccatcttcaacatggaccgtgtaaggtccctcagagtaggatccagcccagacggcagttggaaagccggtcccgtcaatctgtccttctctgcagtagggtcatattgagcctggtattgaatgtattggccttcgaaccccatgaaaacaaacaataggtcctccagaatcgccttctcctgcgcatcagtagacaaatcgcgtagtggtttaggttgaagcgattgaggtagagttgaggacaacggaggtacggatacacgactagccagcggcgcagtagtgtagggcatcagggaggcgtgcgggttccatggtgctggtaagagtcaaaattgtagatattcagtctggacgaatgtcttaccatctggggtctccttttccttcttccgcaaattgggactgagaggcccggcagtattagccctccttgaccgcgacttatctccctcccctcggttccctgcgctgggcgactctctcactggatttctcgttcggccttgcatcttttctttagtctgaataacgacgcgttcggtgcgtttttcagatgtgacatgctccctaggaactttgctcttctgggttgacgtgctcccgcgatgatccatattttctgcttgcaatggagctgtgccgccgcgtagaccggcttcctcagcatcggcgacgcgactggacgcaacgcggggtcgtggcgggttcatgtggctggtgcggcggtcattgatggacatgggccgcatcaaatagaagaaattgacgacgttcggcgctggggacaagaaattgtgctggtcctagccttgcgcagtcccgacgtttggttggagcggtgggtggtgttgtcgccttgatgcctgagatctccgtcaggcacttgcgacttgcgtagccatcatcgtctcagagcttcatccagagcttcagcttcatgaaacttcctacccttacgtcctccaccctgactgctaattcgagatactcctttggagtcagctattatcctagtcaatccggatttcattgttcaaagatataatctaaaatgttcatcgcgcgatcggaatacggtaagctccatcagacctcctcttaatacctgcaatctgacctttcttcttagaccgtggaatcaagtaggataccttccctctataacctccgatacgttattgcaaccagtctaactgtgataaccacagcaccttctctccggaaggtcgtttgttccaagttgaatactcgctcgaagctatcaagcttggttcaaccgctatcggtgtatgttattcatttttatactcatcttccggcatggacactgaagtgtcgtaaacggcggagcactttataagcttcttcgacaatgaccgcaacgaatccgctgactgcttccacaggtagcaacatccgaaggtgtcatcttaggtgtcgagaagcgcgtcacatccaccctgctcgaggcgtcctcagttgagaagattgtggaaattgaccagcacatcggatgtgctatgtctggcttgcagcagatgcccggtctttagttgagcatgcccgcgttgaaacccagaatcatgccttccactacgcggaacctctgcgtgtcgagagctgtacccaggcgatctgtgacttggccctacgattcggagagactggagatgatgaggagagtgtcatgagcagacctttcggcgtcgctcttctaattgctgggattgacgaggatggtcctcagctgtacgtctctctcccttctatccgagccctgcttgcctgtctttcgcctcgtttagcactacatacctcttatactacgaaaattatccactgactcttgtctctaccagatatcacgctgaaccttccggtacgttctaccgttatgatgcgaaggccatcgggtccggaagtgagggggcacaggcagaactgcaaaatgaataccatcgctcgttgacacttgccgaggctgagacgctagttctgaaaacacttaagcaagtcatggaggagaagctagacgcgaagaacgttcagctggcgagcgtcaccaaggagaagggtttccgtatctacaacgacgaggagatgggacgcgctgtcgcgcagctaggtgggaatcaatgaaggactactcagtcggtttgtgatgaggccgtaatgaaattttgtggatacattacagggttaccttgactcacatagaaaagaacgatgacctcggctcatgaccatgaagcattgcttctcctttatgaaatgtagctcgctataatcccgaggatttgaaacggtggagcagatacgacttctatatacactaatgctggtatcatagaggattactcaaacatagttttcgtcaaagtgaacattcatcaccgaatcttatagacgcagggcttcagtacagccgcttcctcctccggagtcatcccattatccgcagccaccgtcttctcaataaacttcttcttgccagagccaggagccccagaagcagacacatgtttacccttcgtcggtgcaccgcccgcctttacaaactccatctttacgaacatcttgttcgatttatccagagtctcagatttcagaacaaacccgcgtgtcctgaagacctcgacaaaagcagagatatcagtctcatcatcctgtgcgggacgggcatcttcagcatagatctccgcatcgtcgacatccgagccggcatcgtcatcacccgcgcgcttcttcttgagtttcttcttttcggctttcgtgagtgtccgtttcgcgccgatttgggctttcttgcggtgcactttgccaaagcgactttttacttcgctgacccagcattcacccttaccgtcgctgcggagaacgcgccacgcttcttcgacaaaggaaacccagtttgtgcccatcaggctgaggcagaagatcgcaatgtcagccgagccatcttccaaaggtaggtcagaaatgtcggctttagtaatgggtgaatctttgggagcgtgtaggtcgaagctgtggagcttcaagttcagcttcttggcggaagggagcagagcgcggtggagttgtgcgtcaccgcagccaaggtcgacaatggtgcatgtaccgtttggccggcgcggtaaggccagacctcgggatttttggtccggcttgcttcccttctttggggcaggggagatggctcctcgagtacggatggcattgatgtagccgtcaacgggattggaaggccatgattccttgacttgacgggagaaaccggcgtggtattcctcgaatagttcagggtttgaagtgaacagctcgagagcctgcgttgacggagtagtgtatagggtttcgttcaaatgacggaaacgggatgagattaacttctgccgcatggcctgctgcagaggtgtcaagacagctgttgtagttgggggtgcaaggggtatcgattcagcagtaggggcttcattgggagtcgcttggttttcttctcccgcctgttgttgggagcccttattcttgttctttctcctcctcttggcactctttttctcctctgcactaccatccgctccagctaccactgtttcagtcgcctttgcagcctgcc

SEQ ID NO: 1811 - DNA, 3384 bp, Emericella nidulans
tgaaaaggggaatcacttagaggttgtagcagagcattacttcccaccagcgagaattaagggtggttaaggtggttaggatgtttgaagtcagggctcaaaatgagagttgctcggggtttagaggctcatcagtgagatttaagtggtgggagttagacgcattcagcggcttgtaaataaagattggatcattaatgtcttagatgctgcgttagtaaacagtgtcttagaacccttgtaatctatcaacacttcaacgcctgctttgctgcgtaacaaataaagtgcattgcacgccacatacgtctcgtacgtcgaccatacatttagcagtaagcacctactaactatatcagctatagaacaaagctgcaggctgccgagtgataataggatgctctgagtgaatagggtcttgaggttcggccatgggtttaattggggtttccggggacaaatgaacttgaatagaattgtggtaaatgttcttggatgtgaagagtgacgtagacagtggacttactagacatggttgcaactcctattcgagacagccagtgtataggcacaaaacctctgtgtacgtagtactcgcagcagcaatgattcacatcaaaattcttatagggtatctgctgtcatctatacattaattataagacaagcgctctccccgagcaggggcccaattctccagccactctcgcgctttaccaaggtcactccccgcggcttcaaccgcagcaacgcaccaagccagatcgtaaattttctcgccagccgtcccatgattttcggcggcaagcatttcggcaatattgcgccgttgctgacctgcctgatcagtgcagaagtaaaacggtgcgatgtgtggccccttgccctgaagatctacggcgttaatcagaggtcgcacgagactcaaaatagcggcagcgctgcatcgatgcggccgagtcagagagctggtgacaattttgtttcccagttttgcagtactcgttctggcaccatgatttaccgcaccccttcattagctgagagagataacggcgctctatgcgtcgatggagcactttcccctctggatcgtaggtgtctacatataagggcccgaagcatatgctgcagagacctatcgtgtcgttgcctggcttaattgtgctttgcactccgcgcccatcgagtgtacgtccgcagttttggttcaggcagatttgaggcgcgggccgggagaggcggtcgagatcgtggtggcggaggtgtgtcttcatatcgcgcagccgaacaatcttgttgcaaagatggcattcgtttgttcgtccgccatctacaagttcatgcggtgtaagaccggagaccagcacttccggatcgtgcatatctggatcagactcgccttgctggggcacctccaggtgacagaatgagcaaagtatgggcttcgctgggcagacagttgttcgatgttgagcaaggtgctgaagtccttccgcttcaaacccacaagcgcggcatgatcgccttgtatgaaagatcaagtcatgtttatgctgactcgccaggtcatgcccgaatgaagcgtcataaggacagtgccagtgattctgccattcgggagaccgtttctggaaaacttcgtggcaatgggtgcataatacattgttccgaaagcaaaaattctcgtgcaggacaaacgttcttgaagaaacccagcgctgacagttcttgcataggacatcatcggcgtcatgcgcatctgactcggagcttccgtggtcgacagttgaagttgcagataccaggcgcagttgataagatttagcggaagcctgttgttcatcagctgtagcaaacgcgtggactgaaatatacaacgcctcggcattatccaattcagcgttcgttggcgcaatgctaatctgcttctgtgtctggcttgagagctcaccaaagacatgctcgtccatccgcggtcgattcctctgacgagcagaaagaggactcgcgagcaacgtaacatccgcatcgtcctcccctacaaggttaatttctatggtgcttccagcctcccattttcgaagttcatagtccacatactgacccggaagcacctggccagtcacttcggcacccagctcaagtactccgccagcagatgtgcctccatcggttttagacgcgcgggaagctctcgccagccgtttatgtagtgtttcgcgggcctgctcttcagtcaaggcaacaatatccacctccagatcagtatccacgacacatataccctccccctgaggctctaccttgtcgaccagaaatttgaaggattcttcctgaccccggggcactgtgagtgtttccccggtcgtcaatgtggtgtaattgctgcgtagatgacgctctaacagagctttccaatcatcggtgtcgtaaccagcctctagcgggcgcaatcggacataagtacccttaggcagttgctcggcgtgaacggttactatgggggcgtcggcgtccccaccttcttgggaaatgtcaagggcttcccgtaatgaagcactaagaccgatctcgttctctctcgcggagaactcgcggatcccagcgtatatcacacgagaattttgggtgttgacgagccggaatgtcagtggatgaggtaattgctgctgtcggtggacaccgtgctcgcgtgtgtgagactcagccgcaaccgtacggggactaaagaggccaaaggagctggtgtatggacgcagaggtcgctgtgacgatatctcttgaagcggagcggcggcgagaagctgttcgagagcagattgcggaagaatgatcctgtttttatgaaaaataacattcagcatacaaatctggcgataaaggcattgaccttagggaaccgaagagtgattacctatctccagagagtttctgtgtgtattggggaggagtcacggtaaactgcgacgaccagcgaagttggtcctgttccctagccataactttttgcaaggtctaggtatcttccaccagggcgagcaacacatccttaagcgattgttggccactcgagttgacgtgaactgagtcttgttgccatcttccagaagataccgcccggatttgtcatcctcaaacgctcttaagcaggtccatgtactttatatccttactggcctacatgtacttcttcttaatacacgaacaacaagaaaagcaaaaaagagagggctggcttgtttcattattaatccaaggcaacccatacctgggtagctggtggtcattcaaagagcggaatggcatgctatatgcggggtatacgataatgctatcaaacgcaacagatgaggtcataaattacgtcttcaaaaagaatct

SEQ ID NO: 1812 - DNA, 2169 bp, Emericella nidulans
gtccaatcgttattcctgatttctcacacccgtcgacacatcgtaccctacttactgacgagccggttctggcggtgactatattgaccactgcttcaagacatatgaaaccaagcggagatggtgcgaactcccgtgccttctacattcatgatcgcctctggtcatatttgcgcgggatgattgagcgtctgttttggggccaggaaaagtttggcggcaacggcattgggatcaacaaacctcgttcctttgatttagctccctcctcagcgaaggttaatcataagggtaatctgagatctttgggcacgattgaagcgttattgatacttacggactggcacccgcggaatctacattttcctcctggagacgatgagaacgcattacttgatctggatgcccaggctggccggtacgacaaagaattagataatgacggtgagaccacagcgcagcgaagctctagtggtgcgcctgagggcagactggccttccagacgtggctagagccagcctggcggtcggaccggatgtcatggatgttactcagtactgctcaagcattagcattcgagctcggtgtgtttgaccaaaagaacgataccaaattatcagcagaaccgccagctgagcaaacgcgaaagcgtcgtctccgtcgacttatccttgtgtatattacgcagagcagtggccgtttgggcataccttctatgctcccactaccacagtggaccgatgatatccagccgacgccactaaccggcgtgaaaggcaatgaggttgacaaaatgcatgattgttggcttggaatatccaagatcatgtatcaaagcaaccagctcctgttcgcatctaacgaacagacttctgatttgataagaagcggccgttaccgcgaccagattgatcgattccagcctttcctccgagaatggcgacagaacattgattcgactgagtgtaggtgcatatttgcctttcattggacaaatgctaaccatatcagtgcaccctgcaatgagacatatattgatgattgaatatgaatacacacgtacgtttccttctcgaaacttatgaccacctggcttacttctctcaaggtttatacgtcaactctttagcattgcaggctgtggtcgatcggtggacgacaatgtccaacgaggccgctcaggctcagaataagccgtcagcatcaaataacgcgtcgttccatgtgctaatggaattgtaccgcgtcaatgagccttttattcaagaagtcgttgatgcgtcgcgaaggattctgaccacagtgctcgagggcttggtcccaggggaccatttgaaacatgctcctgtccggacgtgctttcggattctgtctggcatgatcttcattcttaaggtaagtctttttctgaatctgaatgttgcgactccgcatctaaacatcttagacgttcaccctcggtgcgaaagaagatgacgtgcgtgtctccctcgaccttcaggaccgcaccgttgaagcactccgaacatgtgttgtcgacgacatccacctcagccacgccatcgcccgcctgctggagctcctcacgactaatatccgcacacgcttcctccgtttcgcccccctggaccgcagtggtgacaacgacagcaccagcgccggccaggatcgcgcctccgccccaacgtctcgagcccactcgcctcgttcacgagaaggcccgcttggccgtcgagatggcctgaacaacagccacacctggccgtctgcgcaatcaacacataacaatcaaataggcggctatgcagacgcccatcctccatcgtcgacacccctaacctcggtccacgaccctctagctggaattcccgcccaacccatcaactcctccaacatcaacgtcaattttatgccacccccgccatctgtctattacaacttctaccaaccccgctccccgccgccctcaggcgagatgaacccttccaatccaaattctggttcagcgtcttccaatctcccctcgcactcgatgaatgagcagccaggtgtctcggattggttcgcccttccgctagaccagttcttcaactcctcgactgcggtcgtggatcaagggcttggtgggacaggcccgatggtgggtgagttcgatatgctgaggtttc

SEQ ID NO: 1813 - DNA, 4014 bp, Emericella nidulans
catggtttcatggacaacagggtctaatgtatccacgacgtattcccagatcgacttgccgctgatgtctttggcgttcttcatatcttttgtgagaccattgcgcttgaaataatcctccacaatcatgtttcgctgattccgaggaacgccgcgctttccaggcaaaccattcagtgctcaccaccgcccagtgaaggggcttgctcaacagaacggccctgatccgcggccagatctgacgctgttcagctagggtctgggcctcgcagagctttttcacctggccctccagaccgaagactttgaagatgtagcggatcatcttgatggcgtggcgagaaccgccggtctcatagagtcctcggccagaagatgaggtgaagacatgactgtgttcaagccaatactggaaagcctgacttgataggtgagggctcagacgggaaatcaaaaggttccggaactcgggatgctttccttcgccgaagattttccaaacatcacggtgaccgagggcgatgaagcttgcaaccttgagctcgatgaggtggttctggttggggttcaagtcaacggcgtgcacgcggcgcgggctcttctgcagatagtctaggatgttgtcaccagcacttgtgatagccagtataacgtcgtcgcgctttatgttgagtagtctgtggtcaacccgagggtcctcccagttgaaggcatagatgtactcattcttgaattgagtgtgtttcgggaggagatcattatagaagatgcggtaatggtggttttgatagaaggcagcaggcaggggaaggttggcgctcaggttgacgacggccgactcatacgctttagagtgaatctcttgtgtgctctggatgattgcgttattcatctcctcgcgatggtttgctggagagagataaggcgattctgtgaaagaagcgtccaacttttctatggcctcacggctggcctgattcgggtagatgtctttctggcggccaatgaagatgtagtaagggatgcctccgagtaagtagttacgctcactagcagaaatgacagttccaaaccgatattccaaatagtctcggcgagcggcatcgaggttcacacggtctgcctcaaaccaagcgcgccagaacgcacgacccagccagttaacatgtcggttaaagacaccgccaatatagttcctggaggagacatcgacaatgctttggacttttcgagcattagtgtttcttctcattgctagctgcaaacctggaccctaccgtagaaatcacaaacacccaagagaccagacggcttcaccaatttgcttagtgagtccaccacgctgtaataatctattactgtcagtggctgttcgagaattgcataaaacgagtccttacctggaatcattgacaggctataactcattgtgaccagatcagcaccggctcctacgctctttagaggatcaatatggtcctctggcaattggaaggcgcgtgcgtcctggcaaacgacagtgacattcttccatcctagtcgttcgaaccgctggcgagctacctcaagcagagaaggagaaagatcgacaaggtagacatgagagaagaattcgggaacgggcacgaactcggccatagcctcgatattgtatctagagctgtcagaaaacgacagaggaacgctgtgctcatcttgatgcttacccggtaccgccaccaatctgcaccattcgttagtttttcggggccagcgggaacacgagaaccttacatcgacccagatcgccttgcctttccgaagctccttgttctcgaccttgtacttgagctgagcggcaacaagaccaagcatatcctcccgaccacgtagaaggcgcttccgggtagcgtcgtaaacagtagcctggggagcagtcaattgacatcctgaaagccagtgaacagaagatgagctcatacttgagtagaatagaagctctccaacgcatcttgttggccgctcccacctttatcatggggtttcaggaagctggcatagatgaacctgaggtagacggaaatcccgctattgttatcgaccttgttgcgcttctgcgacgccacgacgaggacaactgcgacaagcgcgcagacgaagaaagcagcgcccgcaatggacgcatagtgacggtcgaagccgctcagaaggaacccggctgggccactggcaagagagctcatggcgcaagtggaaggacacgaccagaaggacagaagagaacagactgccccgaattgagcattgagtcgggaggggcgctttcttcagtgaaatacccctccatcgccggccggccatcggggaagaggagctaagcttgccccttttgacccaccaggactgtctgtcgacagcgttggttcctaatgtaagggaacgaggaagagtgcaaaggacatgacgccctatcaggagcacacatgggcccggcgcgagttgggaatatcgactgaaaacggaactgggtcaacagcggcagaggtgcactgagtagttagatagacgatcctagatccattctcttgcaattggccccgtaacacacccgggggtggagtgcctagtgttagaaccagtccgatgcagcgtgcacgaggcaaatggtccaggactcgcgacttctgctggaagcatctgcagctgttcagagggcctattcagagtacaggccagcgcacgggctaggaaccataaagcggttggcaagtaggagagcagcgtggagacatgtgtgggaatccggcgaggagaagaggaggaatccaaacggtcggcagacgttcggggagacactgaatagccagtatacttgggcgggtcggccaatcacagcactccattccaccacactttggccttcgcattccgtacggtcaacatcttcaattcgccagatggcgaatttcagaggatttagacggcgtcattcagaatgaattaaatgttattgattgttgatagcaagctacaagaatgagcagaggattagctgtgttactaacgaagttggtgattatatatagtaagctcatgcgaatatatcattaaactaggctagaatccactttcaaggtatctgaccgtagactttgaatcttgaagtgtttctgtctttcagcacggccatatgaatgctttcaggtagatgatgtcagcatatatccagcgacaccataacctgcaatcaattgggaatccgccaacacgtacctgcctttctttccttgaaccactagcacatcattatcgtcagtcatggttggcgctcgttcttgatttacttgctctttttcttcaccttctcactagcgtccatagctaccccatctctctgagatcgcatcgtgagtttacagaaaaagaggggttctcagaagctgcttggatgttcatgagaacatcttgaggtgccagtaccactattctcccactgctccagccgttagatcatctcaccgaactagtacgggtcaatcactgatcctgatgatatatgtcaacgtgaacagaactgacagcatactccgcagcatcgcacaaggagacggtagccgcggcaatgtttcaccccgtcgctgatcaagtttcacgatatcctggtccgcagaggcctcgcggagcttgcgcagctatgtccttgttaaatgtctctgggtgacgattcggtgtgaatgatgcattcattcgttgggctgttgcagaacacagggaggctggaacgaaacgacgcccggttgtgtccagttctccacgaaggatacttgaggcggctagctttggtttgcaagcgtccgtcatatgcaacgatcgggtttgatacttcacacgagggagatggtcaggtaagtaagtggtattattctattagtctgggacaacaggcttttcgagctggctgagcgagtatttggactgcttaagcatagcctaagcctcctgcttgcaagagagttttttctcctaaaatctccc

SEQ ID NO: 1814 - DNA, 3474 bp, Emericella nidulans
cctatattatctggctatagaagacagcttgccttgttgaaatggggcgaaccattctgacggaagattcgacaacctagctggttggattcatagcctcaacggattttcggttcatggtccatcatatggccttccgctttacaggctgggtgcagaggggtccaggaaaagggctttctcattgaccgtcaaacagatatgaatgaatcatgcagtacggccacatagggcatcaaagcgctgtccatggggtccgctatgtatcaatttgcaccaattccctgtccccgtcattacttgttacatgtcggtggtaccatggtgaaccagtgaggctatttttatcatttcccttccctcatcgtgaaccacatgtcacgcatcctcttaacctgggccggcgtgaagtgctcgtaacactcatcagaagaataatccataaagttgtgtacagggtccacacccgggcttcctgggcatgagtctttgcgagcaggacatccatcggtcggaatagactcctggggtgtgtcttctatataatcaccctcgttgtcaagggagcaagactccccctcgaaagtgtgcaggagtccgttccagtgaccaatttcgtgtatggcggttccgcctcggttataatgcgttagagacccccctggcatagtttttgcaagcacgttgcatccgtccttcacatagctggaacgcagactagtactgttaatactcgggtcgggtaaagtgcagaagccgagaacgcttgctgataactgttccgaagtaccgagcagacgaccctgagattcggagcctgagagaacttggagatcggactggaagtagacattgagggttcggtagctgcctctacggagggcatctttcatgctaagctcgtcttcattacgcgcccatttatcgttgatatggcgcgttaccccttcgagacggtagcttattgaagcgttttgatatgcatcttggaggtaagataacttattatagttagtccattaatcaacattatgtgatggaaaaataggtgggctggcacacgaataaagatccagaactaacctgagtagcaatcataccgtccgaaaccacgtcgccactcgctttgctgctcacgacatggaaccatacctctatctcaatgggctccagcgccttacgacttccttgctcgactatgccatcattttcgagagcgctcaattttctaaattccgccttcaacgattcatctgggcctgcagtagcacaatatcccctgccccaacgaggaacagcaagacaggtttgctgaaggaaggccagcataagaaccaggtcctggagtcgacgaagttgaagcatctcgtctgagggaatgaacgtttctggacttaccgagaagatgggcaatattaaaaaagagtcccagcgttgctaacagttacgcggcatggtatgcaatcattgtcaattgttggcattggaaagattgttgaaccaggccgggaatgcgacagcaagggatgcagaaaccacggatggcggacataggaaaggagttcatttgtcccaaataaatactccgtgtccaaaaccaaagacgcaacacgctgcagcaattctaacatataaggatttgctgaaaataaattggcccgtatgcgcttttaccacctttggactcctcaatcgtaaacacgctgctgccctttaccaaattgagaaactcgaaatgaagccgggataccactcgaatcagaatcaaggggcatgtttgcaagcattattgatatacagtatgtgaaaacgaaaagggaaatacatggaaattgaacgccaaacaaaataaaacttaacgggaatgggccccattcctatcatctcgcccagtcgcgatagcggagctatcctgttcgttgttccaagtcaaatatgcatggtctcccagtttcctgaagatgtcagctcatggtcggttggaaaggaaaaaccttaccttggacggactaggtgcgcaattgtgaacatagctccgagaagaacgcagacacctccgacaacaacgtaggcaattcccatgaatggatttcggcctccaagaacacttcgggtggaaattagaatagatttggtaccgccataatcagtgacgggaaaagctagcatgctgtcagcactctacgtatgttattactcccattactatgaactcacgatctttgatgtccaaccgatatcgtcccgactgcatggattcgttgtcatttctccgggacagcttgctaaatgtgggcaatgcggctgttctcatccaaaccatgaaatcctcatcttcatgcagatttgggattccactgtcgtagttgggatagcgttctcgccaattgggtggcggaactaccgcacctggttcgtactcagtcttcttgatgagctctttgtcactgtcccacgcgatacccttcttggtcatattgtacgtctcaggatcaccaccgcggccgttaacaagtatagggttatttattgtgtcattgaacatggagttcgcgatgagtccgcagggataataggcctttccgttttcatcgagcttgaggggatcgcatgagccaccattgatcgtagcgtttttgacagcctttcctttcagctgatccatatcaaggctcttcacgtatcttcgatgattctggtagaagttggtaagacggtagtacatgaaaaccggcggcccgatagtatccggaatatcaaacatcagtcggcaatgatcctctccattgtcgttacggaaacgttgccaggacggccgttgatcgaaagacgatttgaacgtatatttgaatttatcatcagggatcgatacagcatccgttgtggcgtccttgcagtctgaatagtctatcactaattcttgaacctaagagcaaaaatcaaagtcagaaagcaagatcaaggtacgggagagtcagattgtacagttgaactagcccatagcaataacccaccgataggggcaaaaatgactccgacgatgaaaaagagaggtaaaacactcttgggtgtcaaaatcggcctgcagcccgtcaactactaaccccagcataagcatttgaatttgcggacttactgccaggcttttagacgttgttgccggaaggcagtgtctgtatcctcaatcagtatcgtagaatcgtacggataatgcggagctctcacttgctggccttctgtttttgggcttcttatcaatgtcggtatctcccctatgttcttgttcactaaagggctcaatactgttcccctgtgaatgagacatagtttctcataagacccattccatagagaaatatatatggatgtaagcgcacgtgtgacaataagtattgtcgctgttgtctaagtagacaaaccgtggtggcgcatataacggcggttgcgtgcttggtaggatcgccccaggaattc

SEQ ID NO: 1815 - DNA, 3444 bp, Emericella nidulans
cagtggcccagatttcgccggcgccaaggatctgttcggtaacaaacatatctccatcactgaacaccggattaagtaattgtcatgtccgctcaaggtaaaaacattcctgcagtacctcaagaacatggtgtgatgacggtctgtaggatcagaaggaaagatatcacttcttgcctgattgttcaagtagtctttagccgatacgtcaatgtctattaagtcgtcctggatcgtgaggagcgagccgcacaagggaagaatgtcacgtcttagaatgtcctccgacaatcctgataggacgcggagttcagctaggtgcagtggacgacgatatgcgagtgtgacagagctaagcacaccacggcaaaactcccacatttcttccttttctctgagttgtctcaataactgatcgtaggagtcactcgtcattgtgcgttgtgtgcctttcgtcccgttgtggggttgcccagctgttaaggactgctgctttgaggtgtctgagcagacatccatcggtggccttctcgattgttgtgtcgtagccataggaagaaacactcggaggatcactagtggcgaaatggtttggttttcaagtcaagcgtaacgcagtcgcagcttagaaatggtgctataaatgcgaggagaaatgagatagcaagagcgcaaaggaaatcgaaacgaacggccacgagatagtcctcagccgatcctaagaaacagaaggacagaggtctcgtcccgggggtttcttgagccttggtctggtcttttcttattttatttattcttgaaagcgggtttgtaaagcattccctagagttaattacctgaggaaccgacaaggaagccaaaggatagaacaagggatatactgacgaagtttctagtcgaatgtcacttttaaactgggatcagatggcctctttgaccttgcaaggctgtgttgcttcagtgcaaagcgggggtcagctgaagtgggttgtctgacccctgcccgttcttaacccgcaggattgcccatctctcagaccatcgactccttgcctgagggtacggactgacacatggggtagccgcacctgctacctaggcatgagacagctgtaatttcgccattcaacaacccattttagccggagttgaacgtcatggtgtcaaattctcctgagtcctccgccgagtcctctgtcaagagtcaacagaaaaaaaaagcaaaaatgcatggcactatcgaccatgccccgccgccgcgcgtggttggctgaagagcctacctccaccctacccctgttcccctgtgaatagctttgactatggcgttcccctccttcgaagccagcccatccttctgaaaggtaagcgtatatgtgtttcatgaacgtgatattggtgagattgcgggaataaaatgctattttggggagtcctgacatcctacatgatcctgcccgcatgttacgtctttgtaacctgtagttagcggccagtgctgtctcaaatttgttagtaattgatactaaatcataggcaaaccattgtagtctatgcgcgttaaggtttgccagcatctttcgtttcgttgaggcatgataggggcaagataaggcacgttggtctgagcgtgaaatgaacttcagcgtgggttaatcttaccttgtcggacggggtggggtataggacaaagcttccgatcaacacatcttcctttggcatttaggctgattttgccccggagctaatcttaatcaggctagcagagtatgaccggtgcagattcatagtgcaggtacacatttcatcaaattacgccacccgaaagctccaaccctttattcgaccgccacctctgtgctttatgtgctaaggtacccgaaacagcccaaagcttggccagattcgcatggaacaaatatcacgggcatgtgatgttgctcagtgcggcgattgaccaggaaataccgtatggttccacgatgggctggaagcttgacggaagcggaataagaattgcacttcacaggaaagggttaaaggcatattctcttcaacacactgagatggagacaataagagatacattagaatccatattccacggatagaccgtgcagaacccggcagcttcatgacacagacgatacggcttcttaacccgaaaatatttgacctagcgaggttaagagtgttgaactgagaatcctacctgaggcttgagatcttgaactagctattgcaatgtatgagccgaagtaatacagaggacacgttcttgaccaagaactgttgtcaattgttgcaaaatggtgtgcttagtagtaaatttcaggtttataatcggagtgcgagacccagttcagatagtccagcagccaccaataatatatattctggaagagaattaatatcctctaacgtatgtgcgcttaactagatgcggttgattcttaacgggtgtggctagaaggactggctacgctcaatgcttatcggccagaaggctctgggcgacatatctgcagatattcttaacgatgtaggaaaatatagcttagtgtgttgcagtatcgttacaaagcatagcagaccgctcctcaccaggacattgtccgcatgatattaatgcatactgaatttggccgttccaggaatagtatcatttagatatatatttaccaacaatgcattcatcgatatggcgcttatgagttctatattcggtaatacaggctctgagaatgaactcccaacatacaaccgccaattctttacatgcgccatgtgttccacctaggtaagggaacctcaacctaccccaccggcaacatttgcctatagggagctaacaatgagctcctccaacccaagctcgcgcgcgcggcgaatccaagccgccaaatatgctttatcaaagtggtcccataaagactagccattcgagatgccaattgatcaaatgtgatacccataccactgctatggtgccggaagcgcacacggctattgtgcgtttgatcttgagcaatcgccctcgcgacctctgcaacgtcgtggaagtcaaaaaagccctcggattcggcaccagtggcacagtgcgacttagccgcgagaaacgtagaattgaattcctcgcgtcgtcggacggtgcgcgatcgccgatgactgaaattgttcggtagagaccgataggcagtgcgcatgcgcgcgacaatctttccaagaacgcttcgcttgcccacttgaaagccgtgaatccctcagacccgtcggctagtgaagagtacgccatcattgattctgcgttggccttacaagccccgcgctgaagaatggcccggccagacgagacgaaatgtagcggcacccgccgggaatggcccaggtagtaatgtttgtgtggacagcaggtggctgactggagcgaggtatagtggttta

SEQ ID NO: 1816 - DNA, 2623 bp, Emericella nidulans
cctccatgtactgtttgattgcgtcggtctgtcgcttgctttaaaggttaatggaagtttgaaacggcggctgggtacctttgcacggctgaggtcgccgagttgagtctcgatagtgcagaggtagtcgattagcttttgttgcggtatcttggtgccgtcgtagtaaatcattagggcttttgggagatcttggttagtaaggcatactagctgacatcagaaaatcttacaatttccacagccgaccaagtttatcaagccgtttgatactgagatatcgcctgctgcctcgctgagcacttttttcagcgcggtgactctgtagcggtggttcagatcaaaggcaccaacgccgtagtcaatcagaaggtagtcatcaccggcctaggaaactgttagatcggcagcttatcaggaatgtcctttattacctgtcggtaggaaacaagcggctggttccctttctctggaatttgatgcacgatgccagagacccgtgttgacgaggacatggctggaggcaaagaagaggctagaggagttatactaccgaagtcttcccccttctgacagcattgcacaatgtcagatataaatctctccagctcattgcgcgccagtagagtatctttcaatgacgtagctctgaatttcaatttgtctccagctttgacctgtcctagtttccacaggtctgctttgacaattgtatgactgctaacaaagccaccaagatctggtgcatcttgcgggaaaatcaccgggtcgtcacctgtccagttgattgatccaatggcgtatccacactcgattaggttagaagggtgtgcaccgccctctcctccatccggccgagcccaggtgggcttaggaccaagcagacgaatcccaccccttgcagcgttgtgcgaaatagtccattctgcgttgtagagcatgtctatactctcgggcgcgagatatccttcatcatacggtcccggcatcgacataagttcccagctgtcaggatactgcgggataagatgctccggtaaacttaattcattatccgactcagggatttgggcggagatagttagataatctccagatgtaagctgtcgaccctggtaacctccgacaccgaccatgggcgcagtcgctttggagccaaaccactcagctatattggggaatccaccgaggacggcaaggtaagccctgcaaccgccacccgtggtcttccctatcttcaagcgttggcctgccgatacctttaccctagaccacatgggtacaggagcttcatccagtttggcatcaatcggtgcaccgcaaagtgagattaccgctggtccaaggaaacgtagctctggcccgctcagcgtgatctctaagccctcaagaccgactgggttgcccaccagagcattcgcaatgcggaacgcaacagaatccatcggcccggagtgacagaagcctcggcctactgttggacgaccgggccagtcttgaatcagcgtataagcgccaccggagatgacatcaatagcagctagattgtattcgaaattattcaagaacttagtcaaggtgtttccagcgttaaagtccttgttggcaaggatttcagccagaaacccgaggttagttggagggccacagatccgtgacccagttaggatgtctctcagtccctcaatcgctttttgcctgctcgatgcatgatacatgacctttgcaagaagaggatctattccttgtcaggattctcttgcaggtacaggatttgcacaaagtcttaccgtagttcgcggacactttgattcccctgtacacccacgtatcaattcttgatcctgtggtttccttccaatccacgtcctggagtatcccagggcaaggagcaaagtccctgactgggttctccgcatacactcgagcctcaatggcaaacccttgtggagcgcctaccggaatgctcgagagaaactctgcttcgagaccttttctgcctgacaactgggcatccgcttgtcgaagcatgagttccaccaaatcaacgccgtagcatagctcggtaattccatgctcaacttgaagacgtgtgttcatctccaagaagaaaaacttccccgattcgtcatccacgagatactcaattgttccagcggagccatagtcaattgattcagcgaggcggacagcggcgtcgcacaggcctttcctgagctccggattcctggttacaaaggggcttggacattcttcaatcactttctggtgtctcctttggatggagcactctctttccccaatggaaatagccttaccttgcccatttccaaaaacttggacctcaatgtgatggctagacggatagtaacgctcgatgaagagtccagcgttcttgaagagagcttcacccctggattgtacagtctgaaacgattcccgtacttccttctcggtgttgcaggtaagtaatcccattccgccaccgccagcggtggccttaagcatgacctgatgactgtgagcgcagtgttatactaggcacaaggcggaaagaatacaggaaatccgagactttgagcgattttcacagcttgtgcttgtcttgtaacatgaccttgcg

SEQ ID NO: 1817 - DNA, 2051 bp, Emericella nidulans
acctttactctctgggttggtcttaagctacgataaaaatccgttctatgttgctctgcagaggcagtacgggcatgaggtgtcgaatatgataacccggctaaatgatcaagtgttagcggctccaataaatggtgtccagtgtctttccgcatatacatccaacattgccgcgctcattcctcgctggccgcagctttcgcagcccttgattcaggcattgagcattgtccatgacctagcagaaccaaaagacgaccacagcgggtacggcccggacgaccaaatggttccccatgggcatcaacaagcaatggatacaatatacagcctcgttcggtcggtagacgagctatatcagactcacattactaaaaaatccccctggataactaacgaggccagtgccacagtgcttcgtcatatttcaaacacatacatggccctgtgcaatcagagcgcaagcttagcctcgcagattgccgacgatctgtctatacaggttcctgatgacgctccgccggttagtttgccaattattgttttttacggttggagatttggcgttctcaaaaagcacatcatggacggccgaatggagctccgtgtcgctgggattgacacaatgcaaggtgactttgtcaacgtctattctcagtatatgcgaagagatatatcctctggactgcataatcctgttgtccaatttatgctcaagatgctgagggagaataggattgtcgagtacatggtcagcatcgaatcccatccccaactgattagtagaagccataacatagtaggcttccttgttgttacggggacatatactgatgcggataccgacactatttggaaaacggtcacagaaagcccggaccctcgaacggtgtctgaagtgctcggaatgcttatgaagacattcagtctgcatcatgatttatctggtcttctttatctatgttccaagttgttggagctgcctttgacccattttgaccagcgaatggtggagttctgcgaacaactatttcacgttctgcgtgaaagaaatccgatcagacaagactcctttgacagtgtacacgtcgatgtgaggccgttacgtctgtgcgtgcgcctaattcgcgagagtgctgcgaccgaagaccttgccgtcgatcaaaaagcttccctgcaaaaattcgctggtggccaactaagttcctttatggatgtagggcttagcgatgccgataagatggatatctatgagagatgcgttcaggatatcgccgaaaagaatcagttcagcgtgggcagcatccaagccctaaatgctcttctcagcagtcaagattcgcaagagatccggaagcttgctaccgagttcaatctcacatacctgcttatttccgagatggctgaagtagtgcaagggaaccgaacagattttgcggataccttttcaagaaatggcttcatttcccgtgttcaaatgctttcccggattattgaaaggatgcctgattccattactccggaactcggtgatatcttatggcagaacatcttcatgtcctcatctcttccccaacaaggaagaagaattctctgggatatgttctgcgcaatcactaggcacgtcgtgacagggaatccgttcattgaccgctgcatccaatattacctacctaagctgtcgccctccgcagattattccctcgaggtgctcgcgtttgccaaacagactataaattacgagattcgcttcaaccctccgtcctctgtcgccgacaacgaagtaatttcgattcctggaatggatagaatatggaactttatcctgactgcacccccaaactcaatcgaagccgatgcgactgcttttgccatagaggtctatcttgatcataacatcatccatcgctctcccagttcatctgttgaggcgaccacatggctttggttgacagttgtgttgatcactcaaatccgcggcatcaaagctgaaattgtactcgggtgaccagcagatgtgaagaatgatggttgtggaagacctagtgatg

SEQ ID NO: 1818 - DNA, 2498 bp, Emericella nidulans
atgtagggtatatgtaattataatacgaatctactatttgctcaattctttggtgctttagtcccgagtatctgctctgctggctctgcgttgatgctagctaaaaggaccgatgccacctcgaaaccggtctgagtcgagacgagcgatttttacgggggggggtcttcaaagagtgtagtcctccgtagacgaggcaccaatccagcatggaaagacagcacgtgtcctgccgcagtggatgacgagtcaagcaacgtcaagagtttggcaagaaaagacaagcgttacaggaaactctcaggtctgcccgcccatgcgaatgacagccggcggccccaccacgtgcagaatcggggccccccattggccgccaaccaaaccataagctcttcctaagctgttcctaagctgcctgccgagccagcgccaaggcgccaagataaacccggtcggatcggggttcaagtctcggcgaatggggagggaccctgcacgaacgtggacgggcacgtagtggtagaggccagaacgagagacagcggccgatggcatgcaggcttctggaaagtggctcagggtggtcgggcgtcgagactcgggtgtttcaggtcagctcgtgcagctggcgcagttggtgcagctcgtgcagctcgtgggcgctcatggcccgcccaagtcgcgaacggccgtctacacgtgggtgatgtgctgacagacagacataaaaggactccaacgctccctggtttcggtccctggtttctgtgtctgtctcatcccggtcagtctagacttcacagcagtcaagatggtgctcgaccagtacacctacatcttcgccattggcaccatctttgccatgctggatgcctataacaatggagccagtacgtgacctctctgctgctgctgcttctgctgcttctgctgcttcttttgcctctgcgttggtagtattgctgttctgttactggctctgtcgctgctactgctactgctactgctgcccctgctgctgcccagcgacgtactgaccgcgcaacagacgatgtcgccaactcctgggccaccagcgtctcttcccgctcgatctcctaccgccaggccatggtcttcggcaccatcttcgagttcctcggcgccgtgaccgtggcgcccgcaccgccgacacgatcaagaacggaatcattccccccgaagcctttgagggcaacgcgggcgtccagatgctcgcctttgcgtgcgccctggccgccgcctcctcatgggtgatgtggtgcacccggcactctacgcacgtctcgtcgacttactcgctcgtctctgccatcgccggcgtcggcgtcgcaacggccggcgcctcctccgtccaatggggctggaacaagggcaacgggttgggcgccatcttcgccggcctgggcatgccccggccatctccggctgtttcggtgctatcatcttcctcctcatcaagttcgtcgtccacatgcgccgcaaccccgtcccctggtctgtctggaccgcgcccttcttcttccttatcgccggcaccgtctgctgtctctccatcgtctacaagggctcgcccaacctgggcctttccaaaaagccgcccggctgggtcgccggcgtgaccctgggcactggcggcgccgtctgcctgctctccgccttcttcttcgtcccgttcgcgcacgcccgtgtcatcaagaaggactacaccctcaagtggtggatgttcctctacggccccatcctcttcagccgtccggccccggcggacgctacctccgccgagctctccagcgtccccaactacgccgtcatgcaggacgacggcctcccgcccgactcgccagagaccctcgtcgacgagcccctcccgccagccgcccagtcggaaaagaacccctctgcttcagctaccgaggctcagctcgactataaggagctcgtcgctcgcggccaggagcgtttccacgccaaactccgacgcggccgcggccccttggcctgggccatgcgcaccctccacgacaacccgatcggctccggcgagatctacgagctgcacaacatcaagatcctgctcaagcgtattcctgccatgatcaccgttggactgctctatggtctgcactacgacattcacgccgcgcagtcgggtatccatgggacccccgagggggcccgcatggagcgagtgtatgcccatgccaccaagtatcccaatgaggtcgagcatacctactcctttgtccagatcctgacggcctgcactgcctcttttgcgcacggcgccaacgacatcgggaactccgttgggccgtgggcggttctctactctgcctggaccaccggcaaggccagtgagtcgaaagcggaggttcctgtctggcagctcgctgtgctggcgattatgatctcgattgggcttgtcacatacgggtacaatatcatgaaaggtactttgccctttccctttacctttc

SEQ ID NO: 1819 - DNA, 3323 bp, Emericella nidulans
  unsure (1)..(3323): unsure at all n locations
gcatccctgtgtcaacggtatagcgatgcaccattcctaggtgcatggttccggatcctcgatctcgttcgcctttggttgcacagagccggaccacgaagattaaaaaggtatcagctcgttctcttcttttcaccagtggctttcttatctctgcctcttttgttctctgtgccttgtctcctccccatcatgatgatgttagtgttgctgagatactgaattgcttggctgctagcggagcaggaggactttgatccatcatactcttgacgtactcgcttgttgcatctcaagacaggatgactcagtacctggcatatcagtttgccggggattcgcccagtgcggcatcgtacatgtttggtcagttaagctatcggtctgtttttcggccgggggaagagcgccctcagtttaacattgcgtaccgatggtgggaggatgaagcaacaactattctttggacttttgacgtcgaggtgatcaagagagttatacgtttcaagcttttctctgacgaacagtttccacggatggcgcttcatcgtcgaccaacttccacagtggacgatctcctcaagggactttttgactctcaggaaagagtattctatgctaacctaccgcacgctcaaaaagtggacgccattctacagcgatgcaagcctactgctccgcccatgatttcgtggggctggctcccagcccggatggagataggccggacgggcgataacttggaatctttagccgtcgccaaggccattgatgccgaaagtcatcttcatttcacccgtataacatttgaggagctggtccggtattcgctgggttacccgtctggccaagtggaatggttcttgcggcagcatacatgtttctatgcccacctgttggatcacctgcatgcatttcccgagcaggttgagagatacgcggaggttgagaaggtttgtggctttttaaaggtgattgtgacattcttgtgcagactgactgagcttcccatagcaccttcagactcgaagcccctttgcccatcgcgctgtgattagtgctctacaagatgcaggttacgcgctcgaactgccatgcatgacacccgggttcggattctttgctggagcaattcaacgtcttttcaatgaacttctgaacttgaagttgattttgaaggtgctcaatgtcttaggagttcgatttgcgcggtggtacttgcacgcccaggaaatggactggtcgcggccgttcagcatcgtcttctcttttcttgaggacatggacagctcggattcgccagtgagctttgctcgtaatctgaccagatctgtcgagcgggattttgccttactgattgaagggggtactttggacaaaagtgtggctaatcgtctgtcggaacgttggcagcttctctctgtagaagtttgggaatgttgcaaggcgcttccagaaacgatccggtttatccaagaatgtttagaggtaagtcatcgccacccaggatgattgtctggttggctaacaccctgcagcctctattgactttgcggaactaccattccctgactgccattctcagtgggcttcacaagtaccgcgtttccgaatcttcgctcgtccgccttgaaaacggaacaactgccctgaatctgaaccaactgcttccttctgagatgttatacctcctcaatccgtcacagaactacgcgctatatcggcagcaatatcagcaggcgccacggattcccttcctcattcctcacttgtatgagtatcatcagcttggtgagcctattcttcaaaacctctatgagcaaatgagcgctgtcattcctcagctctaatgcgatgcactcggatggatgctgggacatacatatgcgacgaaatacgatgaaagtgtacggtgccgacctagatggctataacagcaaaacgatccatcccggcccgtcaatagaataatacgaaatctgttggttttttgtttgttccctttgcccctttccccgaagggcataatcactcggctttcgcgggactgtttttgattgattgaattggcgtgtactctcgcttattgtgtcatgacgctactgatatgtactcttagcgaattagactacatcaggtgcaggatgagattaaggtgtattctccgactgaacagttaaggaatgagcattccagaccgtcagacccgcttcttcggctccttcacggagccaccttcagcatacccaaaaacacccaggcagtacaaaagccgattcacaaacagaaaggccgtaaccccaacattgccccaggtgagcgcattccacccaccgacatcaaagaaaagcgctgggcccatggcaaggtaggtcacgtagatatgccctacatcaccaatggccagagcgaccaagtagttgcgcagcaccttcggctccgaggtggcgtagagcacgccggcgccaaggagcgccataagcccgtaaacattcgccagctgataggcgagggcgaaggaagttgcctggacttccagctcctccggcgcaggggataatggtatctggccgacgatgaatccctgcaggtcgaagattggagctaaccagccgccgatcctgggttttggtaagctgcggagcgtcgcgtgtctatttttgtcctgcgatggaggggatttcatgattacgcagacacagttgaataggggttgggcacgtacagggttatgggctcaaatatagcaaaaacgatatggggccaggttgggaggattgtggctggcattgttttattgtgcttgtcgatcagtggcaaagagtggtttgaaattgattatcgtgctcaatgtcgagtaatacgcccgcagggaaaattcctcagacctgcaactagaggacggagtggggntgttggtgctctgaagctgaagctgaaagatgtatggcccattatgcgtgctttatactgntgctgattcagcattctgagctcacatgataagggtttcgatctctgattgtctggctgagcttttcttccccaagcacacagcacattaatattattctaagcaatgagatttccacgcaagagactggngtctgagtctctcagagttttatagtgctagccatctttcttgattgtgcctttccggcccaggagacgaaattgactttcggcgatgatccaacggaatttcgccgcactacatgaatccttgtcgcgacttcttacctcgattgttctttcgaagcggttcattccgaactagatcctttgccttagccagcgcatggagccgaattagccttttg

SEQ ID NO: 1820 - DNA, 1051 bp, Emericella nidulans
tacgtgacctaccttgccatgggccagcgcttttctttgatgtcggtgggtggaatgcgctcacctggggcaatgttggggttacggccttactgtgcgagacccgggtcgtcgtcggggtggtggtcaagggggagaaagagaccaatattgactcatagaaggactgaagtcgccgactagatgaaagctacggagtgaagggagtggactctcggtagtagataagaagagagagaccaaacagggggcagagtataacttggagactacgtgatacgccagggtgtttcgagagacgaggcaaccacgactgatgttgactggattcctgcttggttaggtatttgactttccaagcactttcacggtcctgggatggggggcaactatggaacggtactgtaattcgggctttagttgatagcagttccaagtggccggatatagagtattgtgagggatgtccaaatcaataagatatgtccaaactttatatcgtggttgcggctcctctgatggcaccacgtttccctgcttctttcagattaagagaagataggtatatgtagaccaggaccatcgtacagtagtaaagaaaagatgaaaaagagaaattcgtttcccatcctcaatcgcctgacagcctcttccagcaccactcactcctatggcaatgcttcttcctcatcccttatctgacgttcttctggttgctccagaccacgcagctgctgcataacgccagagctgatattctccgcgattaggcgctaatttgtctcatctgtcgactcaggcacttaagccttaaaggtgacgtgagcgcttggcaaagagcctttgccgacactagcgatggcggcttcccgagcgcctgtaaggcatactggctgttaatacctcaacacggtgggtagagttgatgttcttgaccagggtgatttgcagcaagtagcaccacctgacgggaggtgatggtggagtagcaaggaagtatcccagatctgagagaaaggggttagatgttgctgtcagattttagaggatg

SEQ ID NO: 1821 - DNA, 4284 bp, Emericella nidulans
gaacactcgtccgtcgccttatcaagctccataatcgctggactagttactgactcggaactttctctttgtccattcgatactccttcaatctcaggcgtcttcatcttttgtgccatttatgacgtccttggtccaattttattttttccctcacatagtacttagcggcatctgtcaacgccttttgtcgttcctccttttcccaacctctactttttaggttctgctattgttttccggaggtttatcttagaatggatcaggccatctacatctcctcatctagtgaagatggatttaatgatgatccacctctcttcgatgaaggcgacaattttcaggaacagctaccggacgaagagcggtttgctgcttacttcgacagagagactcctgaagagttgtttccagacaggtttcccaaaaggcaaaggatccatggccccggggacgtcgctctcgaccaaatgctttcaagtccgcttgcattccggggccctgattctccgcagtcttcaatggcagcggcagctgatggtgccaatacactcttcatgcagattttagagatatttcctggcatcagccacacgtacgttaacgatcctgatagcccaaaaaaccgtggcatttcggctcggcgcggatctcaaagcacgtggttttcaactggcgatattaagagatagcatctatgaggagatcctcggtcagaaatcgtatcctaaacaagacagtgagaacggcaaaaggaaaagggaagagtctgaagaggccgacattagctgggaacgtactttacaaaacgcaacaaacagtcccgaatacttcgaggcagcgtaagccacctatcatgataggagtcattgttgttgcaaactgatcagtttatacaggtctgctttcctgggacccgaatttccatgggtgccgatgagtcacattaagaaagtcctcattgataagggacgcctttatcacgcattcgtagctctttactctgacgataaccttcttgagcaacggaagtatcaatatgtgaggttgaaaagtcagagaagtacgaactctcccaaaaagtacacccctcttcgtgacactcttatacgtgagatcaacgcagcgagaaaacatgtagaagaactgcagagtgagtggcctgtcttcttcctagctcaatgtaattattctcattgttcctactagtcactttgcgcaaaaagaaggaagaagaggaggcggaaaaggcgaacgaggaggaacacattcggacaggcagtctcattgagtgccattgctgttacgccgatgtcccgtcaaatcgatgtattccgtgcgatggagacgaccttcacttcttttgtttcacgtgtattcgcagatcggccgacaaccaaattggtatgatgaaatacatactacaatgcttcgacgtcagcggttgtcaagcttcgttcaatcgtcagcaactcagggaaatcttaggcccagtagtcatggacaaactggattccctacaacaagaagacgagatccgaaaggcaggccttgaggggcttgaggattgccctttttgttcctacaaggccgtcttgccgcctgtggaagaagacagggaattccgctgcgagaactctcaatgcaaagtggttagctgtcgtttgtgcaaagagaaaagccacatcccccaaacttgcgaagaatatcgaaaggacaaggggctctctgaaagacaccaggtagaagaggccatgagcaatgctctaatacgaaaatgccccaaatgccggctcaagattatcaaagagtatggatgcaataagatgcaatgtacgaagtgccatactctcatgtgctatgtgtgccagaaggatatcacgaaagagggctatgcccatttcggacgcggcggatgtccccaggacgatatacatacgcaagaccgtgatgacagagagattcagagagctgagcgggctgctatcgataagattctagcagagaatccggatatatccgaggagcagattcgagtgggccatgagaaaacaaatgctcaaactcgcggagttcgtagagacccgcggctgcaaccagcaattcaaatgcgggatgctatgagagttatgagggcggacatggggggtttctaccctcaacagcaccagcatgctaatacagctgcgcaaagacaactccccgtctaccctccgccagcttacaatgtaccataccctatggactatggcactatgttcaacccacctttccctggctttaatgtccttcaaaggggtctccagccgggcaacctcccagctcagcctgcggttatgcagcccatggtagtgggcttggccaaccctcctgcaaactttcacccacaggacattcagaatatcaccgcgtttccccctcagcaaagtctacctcggaatcaaaacgcagcttatcgcggtgtcggtttcggacccttttgagttccttaaagaagcaatccagctccacgtctaccttctttcccgtttggcagtacaacttcacctcatacaccttccgaaatttatggcctaaataattttggatattcgattcaatcttggtcgttggagttaacctacgttccgccgtatacccagaaaagcgttatttgcctttcacactgagcgtttcttgttccagtcttttttccctcctcgtacttctaccgtctcattcttttctagagggtctcgatacagacactgatggtgcactgactatactgcaacgcagcattctgtttcgcgattattgtcctactccctgaaacgaacttccattccccttaactgtccaaacatttttcgtacccagaaggcatacaactttcagaacttagactcatcatacatgcgatgcattttctgcatttccattatatctgctctaatatgtgcataggatccatccatacgagtttgtcctgtactctccttgggcacttaatgcgtggcgtattcaaccccatccgtaagaccaaccatgaaatgctcactattcactcaccgatatcgaatatgcttatatctctctcctgacacacctatacttcagccaagatgagataaaaaatgggaggtccccctgtgcccccgccaactgaagcgcccttcgcaccaccatagctggctgacgtcaaaccttgctgcagggaccgatatctttcgaattccatacggttcgggccacactgttatcgactccagctatcctatgaatgcagaaccagccagtagaccacatagcttgatgccaggcagtcaatcagacctcggctatggctttctagacgtagattgaacgcaaataactgacactgtatgtcgtgtttaattttcttccctacagagctactcaatcatatgaaatactaccttgggaagcttgtccccttggccttcaaccatgagtacgggtgattattgagaggctccagctcatatggataccgacttgactcgacctaccttcgcactgcgtgctgctgttaacggggggaaggatggtaacactcatagctaaggctagatagttagatttgctagtaggaaccgtgtaaaaaaactccgacaggacaagacgcgacgacaaagtacaggcagtggtatgaatgggaaggtgcgatgaaggatggaaaggagaagagaagagagaagagaggaaaggaatgttcacgtgagagaatatgaaatggcggaatgaaagagatgatgaacctgatctatgtaaatgccatgcgagtcccaaaattcgtccgctccccattttatatatttgcaccactcattggacgacgataccagaatttcacttcatccatcatatatgttcgatcattggtcacgctaaaacaagaagtaatgaggtaaaaaactgttaagaaacgaagcacccccgaatgctccacagtagtagaaaacttggcaagcagaaaatatgagcagcaagtcagttcatttatggcggatgctcagaatccaccggttcattgaacttctgccgtgcctcttccacccataactcgagacgaagttctccggcttctacacgacgtaccggcactgttttggcacggccgttggacactttcgggggcggttgttgcggcccaccgttcttgagcttcgaaacggaatatggagccgaacatgatcggagatgaactttgcctggttccgccacaacccaggtctgttcttctgttgtggtccccgcaggaggtaaggcatcctcgcggaa

SEQ ID NO: 1822 - DNA, 5044 bp, Emericella nidulans
  unsure (1)..(5044): unsure at all n locations
cagagaaatacctcactcatggtgcttcgtgcccgtcttttccagctaaacagcaccctattgccgggttgccgatttatcatgaacgatagtaaccaaagcaccagctaggtcatccggaacgtagagggcctcagcctggggtaggatagccaccttgaatctgcctcgccgtcgttacataccgaaatccccacatttgcgtagtgactataacaagtcttgagttcagaatcattgaactgttcgaactgcgatgagatctcgtcacccgtaatcctaacaatacgaccgtgtcattgtcggttggttaaaggtgtagcaagaaaatacggcacgaccatcacgttgcaggagaatcgtcggtgcctgctagagcggcttcgagccgagccttcttggcccgacgcttcatctcgcgcttggaaagaggcttctcgggcccatccgcatctggctcagggcctgtagatgccttccttttcaaattgtcgccattgttatcagcgtttagcttagcacctgtatcctttacaatggccacagaagcagctgcttcggaagcaggagggatttgtccaccgtcaacaacgtcgatgataccgcgccagctggtccgcttcagtcgggctagagcagtaactttccttgtttccgcgctgatcgcctccttgcccagctcctgtgacaaaccccatacacatgccagattaatcacatcgaacggagcgcggacacctaatgcccttttggcctcactcgacacaatgattccgcgaccacgggctgcgcgaatcagggccatcgcgttgccgatcagatttcgacgtgcttctagtccgcttcctgtgactcctgggccgtagcatatttcgaagcggataccgcgagcgatagcagcagaaagcatcttgaacttgaagtgataagggtgcctgattgagaggtctaaggaaatgatgtcgcattctgcattggtgcatgcattcagtaacgctttctcgttggttgggcgcacggcaaccagatcataagcctgagctatactggtaaggcgctgattctgcgcggggtctgagaggggtatgttgaggcgcgtgaggagcgtaaggtctttcggggcgtcgctgggaagcggcggcggggtagggtttggggggagttttccgttgatagtctgcgaaagggcaacggttgtgtaacccacttactgtcaggttagcttttcatgtggccatattcaacctgaaaaacgcccgctggtcgtgtggccccgggcgtggccaggggagaaaaagggtaaaaaatgcggcatacgttcggcgagaaagcttagcgttgcagagatctcaggatcacccgggctataaggcacgttcagatcgtagtacatgacgaaccgttagagtttaaaaaggggccaatgccagcttctgttgttgtcctctgctcctcagcaaagaaagaacaagctcagaactgtcccagaaaggtaagccacagtacccgcatcaatgttgttccgtgatagccgcatcgttcatgacagcagaccaaatctggtcccgtgactctaaaggcggagcgtcaagtcggggtcaatccactattatcagcagaataggttgaaagagcctaactttctcaccagtgatagctccagacgatagcacagctgcgacccatcaaatcgcctcggttgcgcttcctcttgcggctgctgctgtctgtctatcaagcttgcgctgatttctcacgccatcccagttcatcccaacgcaccgtcccaccaaccccgccgccgcttttcgccagtctgaatatccaattgtgggcttgataccaacattgcttttcagccgccatcaccatggcgcgcgtctacgctgatgtcaataagcacatgccacggtcctactgggactatgacagcgtgaacatttcatggggcgtcctggagaactacgaggtggtccgcaaaatcggtctgttcccattcagtatcgtcgagatttgaggattttgtactaatcgctgctcatgcaggccgcggaaagtactcggaagtgtttgaaggaatcaacattgtcaactaccagaagtgtgtcatcaaggttctaaagcccgtcaagaagaagaagatcaagcgagagatcaagattctccaaaatctggcaggtggacctaatgtggtcgcgttgcttgatgttgttcgcgacaatcagagcacgaccccgagtttagtttttgaatatgtcaataataccgacttccgtacgctatacccgcgcttttctgactatgatgtccgcttctacatctacgaacttgtgaaagcgttggatttctgccacagcaagggcatcatgcatcgcgatgtcaagccgcacaatgtcatgatcgatcatgagaagcgaaaggtttgatgcgttcctgttttgaatgaatgagctctgattttcttctagcttcgcctgattgattggggtctagctgaattctaccacaaaggcacggaatataacgtgcgagtcgcctcacgctacttcaagggccctgaattgctcgtggatttccaagaatatgactactccctggacatgtggtcgctcggtgctatgtttgcttcgatgatcttccgcaaggagcctttcttccatggcaacagcaactccgatcagttggtcaagatcgccaaagtgcttggaactgaggaactattcgagtatcttgacaaatatgagatcgagcttgatcctcagtacgacgagatcctttcccgcttccctcgcaagccttggcaatcctttgtcaacgcggagaaccagcgattcatcagtgatgaagcgatagacttcttggacaagctacttcgttatgaccatgcagtaagcctactcaatgcatctccgcaaaggatatctcgctgacctgcatttaggaacgcctcaccgctcaggaagccatggctcatccttatttcgcacaaatcagagccgaagaggcggctaatcgaagtactgcatcctcatgagtcgtcttacgatcatacatgccgttatcttgatctagaaacacctcgctgtctagaccttttccgatgataattatcgttctacgcgaaccttacgaatcctcttaccacaatattctgaatttggtctacgtggagaaatacctgtgaagatcagcagtgaggttatgggactctttcacttgtgctggattttattgaaagatgccggggttcaaggactggtggaaatgggcggagcgacgacgaacaactgacataaatttacctctgttgggtattaaccctacagccctttccattggcgcgttgagcgggtagcaattcctgtggcagaatcggcgtgcggtattgtttactttgtgtgtttgcgcgcgcggtcagaactccatctggggccaacgtctgcttttcttactctgtctcctcttgagtagttggactggtgttcatggaaatttttctcttcaactcctacaacctcctctctgcattatttatgctcatcatccttattccttttctactatgctccttcgtggttttgattgcagctatcgggacattcatacattgttatcattgaatggcgcgggggttagttcgacagtcatataatacactcatgattcatacacatgctgtaccgctatgtcttgcgcttcagttgaatgagtcagaagcagaggaataggtcacgtgccccgagatttggccggacgtcaagttattgcgcttcatattaatcccttgaggacccatgtagacttagcttttcgagcagccatccgcttgttttgttcggggatgttctagacaatttacactattgtcaggccaactgcaattcatcatctttcctctaacagcattgcactactggggactcattcaagccccgcagtgccagacttgattcgttccgctctctgttcagcgcctgggaaatttaatttgcccgcatttcccacaacgtccgacccctccccctcttatcccttgtcgccgtttgagtcatcggtggtcaagatacttatccgacatttcgtggcgcgagcggcgcctaggagacttgctcctccaatctatcgatctttttcaaggatggctcaagactcagcttccatgaacccaagtcagcttcatcccagctaacctacagtcgtcggatggaagaactaatgactgaccttctgacagctggtgagccgacaggcccgaaggttgacgttcctcctgttggcaataatggccaacagaacgctggccaggatggagccgcgccaaaggtgaaaactgagaaagaacgtaagtcgccgccaaaagggaacgatctaccacatcatattcaatatcatctcgtcttgctgactggactatgcctgcttagtggagcgagagcgcaaaaaagccgagaagttgaagaagtttcaggagaaacaggcaaaggctgcagccaaaactacgacccccaaagccgaaaagaaagcgcccaaggtcgaaaaggacaagacagcagacgcgtatgatcctaaagttattgaggctggacgataccaatggtgggaggaacgcggccttttcaagcctgagttcggccccgatggcaaggtcaagcctgagggctacttcgttattccaatcccccctcccaacgttaccggatcgctgcacatgggtcacgctctcacaaatgcccttcaagacactatgattcgctggcagcggatgaagggcaagactaccctgtggctgcccggaatggatcacgccggtatctccactcagagcgtggttgagaaaatgctttggaagaaggaaaagaagacacgccatgacctgngtcgcaaagcgtttctggaaagagtctgggattggaaacacgagtaccatggcaatatcngtaatgctttgcgaagagtcngaggctcttttgattggactcgcgaggcttttacgatggatgacaaatctttcgcagccgtactgaaactttgtccgtcttcatga

SEQ ID NO: 1823 - DNA, 4977 bp, Emericella nidulans
ccgcgtgtccgaaactgttggaataaacacatgctcagggaggaaggaaagaagagtgactctgtatcgatgacacttacgtagcctactgaggaacagatacctttatcgatactatgcatatctctcgatagttattcaatttatctatattcatacaacataaaagctttggatcctctggggttggagtcgtggcctagccgtttatgtcatgtgatttccgtaggccctatgtagtctatattggttagttgggttgatttggcatgtgattgatacctgcaacgaacgattgcattgatggtcctaatggagcagctgggacctgtcatatacgcaatgtgattatcgaatgattgaacgagcgaggtgctggacgccttatctgccctcctgtacttccaaggccaatcttttctgcgcctttagtgtatttactgggatctcgcctgtaccggtcctaggcggctcgacagctgtccatataaacgttgttttgagccctttgcataacctgtatgaagttttaatcaacctgcagactagcatacagtacgaacatgctgtatagcccttatatttggatatactaggattttactcaagggttatagtctcattaggagattctgcgaaatgtgctcttggctgttgcctggggactccccaaaaccctgcgcgaattagcaggtttgggctcggattctggccttgggccggttgcaggctttgtcatggtctagctatatacacaggaagcaaataagataaggcgttaggataccaaaaggatgaggcttgtataaccaagaaggctaggatctggctttaacgagatatgaaggcagctatgtagggcaaaactaagtcacacgtaactccaatggttttttcttatagttgaaaagaaaagattggccttttgcaccaggacctagagctatattgttgagaactacttcagcagggtagattagcatgttaactagataaagacaccgatgccacgtaagcccaatgatagaggaacgaatagtcaaggtaatacaggacaagaccttgggatcctcctgaccggacgatctcccacggactgaaatatacttatggggatatatgactaaaccccagtatcaacgtcattacgaagtctatctgaaacaagtagctaagcccgatggttccactgatgtagtttctcactgggaaaggctcgttggtctcgatcgcttgcctggggcttgattgaccttttgccgaagacccccgacttccgacatttggtctagggggagtagttgtaacaattaaagaggcccttaccactgttaatcactgaaaacggcaaacccagctgccatgctactttcataagccctaaatagcctgcgtaaatccactaaatgtcaagttttctacctgcagtgatgttataatattatttgtatacgctacaaatgtttcagttatctgcttgtcgtagtagctagcagaccaggggagaaaaataaagaaaatagtcgccgcgtgaatactggccatcaggtgatcaacaatgcagggtgcgccgcacataaagtagcacattccccgccaattcatctcctgtgttcccatgtcgtacacacccctaacaatcacattggctttcccaaagatgctatcttttggtctcgcaaacgacgcctggggtcatccctgggtggtcctcccattagccgtgatcttatatattgtagtgctcggggtatatcgcctattctttcatcctttatcgcgctttccgggccctgtcctcgcagctttgactgtctggtacgagttctattacgacggaatccggcgaggcctgtatacttttgagattcagcgcatgcatgaaaagtacgggcccgttgtccggatcagtcccaacgaactccacgtcaacgagccttcctttattgatgagctgtacgcgggatcggggaagaggcgtgacaagtacccctactccacgtgccagttcggtattccggacagcgtttttgggaccccgggacatgacctccatcgcctgcgacgcggcgctctcagcagattcttctcgaaaacctcagtgacgaagctcgagcctataatcgagaatgccatcgggaaactctgcacgcagctcgagagctattctgggtcgcagcaacccgtgaagatggacatggcctttagttgcatgacgactgacgtagtgactgagtacgccttcgctaaaagctacaattttctggactcacccacgttcgaacccaacttccaccgccccattgttgccggggctgatctgggtccgtgggtcaagcagtttcccgttctgctaaaggtgatgaacgacctcccaaaatggatcctgacgagaatcaaccccgaggcggcagtctacatccagttccaagaagacctacggagacagatccgtgaggtgcaatcacaggtcgataagggagagtcgaatgggaagattccgaccatttttcacgaactcttgaccggggatctgccagaacaggagaaacggattgagcgcctctggcaggaaggtcaaattgttgtgggtgccggtacggagaccactgcatggacactctctgtcacgctgttctacctgctcgacaacccgcgcatcatgcgccaacttcaagaggagcttgagcggatcattcctgatgcggcacagtctgtgacttggcatcagttggagcaactcccgtatcttagtgccgtgatctgcgagggcctccgtctatcatacggagtgagcagtcgattgcaacgcatcaacccccttggacccctctgggtgcggtctcgggatgcgaaaggcggcccacacggaaagggccgctgggtggagtatgagatccccaaggggacgcccgtcgggatgacttccaccctgatccataccaatcccgaactgttcccggatccgcatgagttcaagcccgagcgatggctcgatggtgcaggaaaacgccatcattcacttgacgggtacctgttgtctttttctcgcgggagtcgtcagtgcattggtatcaagtaagagcagcctgctccctccccagcagggagcctttgctaggcgtctacagtattgggcgatcttttgctgacagacccacagtcttgcttacgccgaactctacatgggactaggcttgttgattcgacgccttggccatcgcctagaactctttgaaaccaccagcgcagatgttgagatccactacgaacgctttctgccgacacctaaagacggaacacagggcatcagggttctggtccatccggaatcagaataatggcgacgatgccgattttcttccgatggaaatagttttggatccaccctcgtgctctggacagcgttgcctgtcggggtatcaaccacacaggaaggtgaccaatctagttgactttgtttgacaagttgaatttcttctaatgttagcggcgcctcatggctgcgctgtgcccgacgggtggacgtgaatcagccttacagctgcgttgctgttcggagcatgtgaagcacggaattgtggcctagctcaactgaatttgcagtacgaaggctcgccgtttgcatgttgatttgttcgtgatatgttcatgatttgttctttttcccatgaatctcgataatccctgttaccttgtgggtaaaccgctgttgttgtgcttctatcagccctcatccatggattgtttgaacaaggataagaatttcgattcgaataaggaatacagattaaaaccgttctgaccttattgtgaagaggtggcatctatcagtcagcccagcgcttgccatacccctcattgggctgcagatccatacttcataggagcgaagtgctttttagtggttacccaccaagaccccgttgtctcgaaccccgaacttcaacatctccccagtgctcgtaaaacgagcgaaatcgaacgcggcctctagccttttcacagcgcgatgtcacctcactaaattgggttgaacggtcttgacacgttttccgcctcgcttgcaggccatgatccttgccttcgctcgacctctctgcggagactttagggcttggagggtgaaactgcatgtctataggccatatctgttgcagcctatggtagcagaaagcttgggccgccacaccaaagaaataggagactttggacacctcatgaatggtcatcccgagcccctcgtctcgcgttgatccgaccacaacaaatggtcgtggccaatggccgtggtcgtgcagctacgacggacactaattttgcgacgaccactgtcgatctgtgacggcgacgacagcgtgtgaatagctccgcatttcgcgttctggagcaggtttccgcgctgtagagggaaaaggagttggagatcaccgagcggacatcgtgcctcgttctcgcgcactgctgcagctgtccacaggaatccagcttcgctattctgattctcatcgtgtgcgagaagattgatagtatcttggagaaggtgtcgcgtgtgggagttggatctctaccggctcctccagcattacgaaacatcccagcagcttttcatgtggttggggaagtacaaaatcaacgtaatgaaggagcactgccaggttttggcgacgttggttacgttctagctttgttggttcgtggctcctcgcggtagccagaaggagtgacataggttgtaaatgagagactcagctgcgcggtctcactacagtgaactaggggattaatgcatcgcaactgctactcaatatcagactgaaagtcatggtggggtatatctggtgttattggcctatttttctgccttgtaccctggctgcttaacagccagaggacgatagtacggcaacgcagctcgagtattctggattatgaaaagatatacaaaaagtagcgttaggaagcatctaaggtctg

SEQ ID NO: 1824 - DNA, 4418 bp, Emericella nidulans
cctgcgtacagatggtgtgggtagcgggtcctgacggactggactcagcctcgtttagaggctaagtctaataaggtaagcctattcggagtgaatatggcagaatgcaccttttggctcatagacgggttcgtgactgaccatataattttactcgggcccatttgccgtatccatcgaacagtcatatgcaacgactgtaacggcactgcagagcagacaaatgcagatcgaaggcctcttggttgaaggtctatcccttcaatcagcggcggcctggcacagacttcagtctcagcgtggcgaactccagtcacgccacaaataggaatacttttgtggcaccgacctcgctctcttacggccaccctgcatatcacgccgatagttgccgttctggttttcgagataggagtgttgacgttcggagctgcacaaatgtcatcaactccacttttaatttacacaacatgcgccatcggtctactctgagtatatacggccttccgtcagcgaatccccgaacctcgccgctgccacttgagccgcttctccaagtcccaaccaccgattgaactctcatcttcgccttataaaagttggcgctagcagttgaggctgagactcagactcagaaccaggacaagaccagacgaaccattggggcacttgagtcttgtcttgtcagtgactgtcatcaagcatcttccgtaagcagacgccaacgcagagaagaatcaaaacaggcggtcagggtatgatcatgtgcggtgtatgtagaccccatcctacagaaaataacgcaatctatgtgagaacgcgcagtcctctacctctgctttgtatcagtgatgagcaaatcccagagatttctcgttttcttccccgcttcgacggcatcttcagcatggctaacgaatacgagccctggcggccctatggagaaggttacgtggagtatcggccatgctaccggcttaggctccttcatgcaagccagttacggtcctacacttgaacgggcaagctagccttccaaaagatccagtgagttgcttgctatggttaagcctagaccgaatctttggcttaggctcgggcatggctcgtacactgtcccgtttggctccatcacgggagagcctcagtgaggctactgatcgttcgacatactatgattggctgatttcaacgggatgccaacgtcaatgcacatcttgaggattccataccagtctgttccgtcttggtcaatctcggctgcggactgtagtggattggctaacccaacgaggcttatcgacgtcttaaccatgccaaatcgtcaggtttcaccgctgacacaccaagtattgtggcgttcgagttcttgcccgactataaacagatttccggctgaagtggataacgagctttaccagtgccgctggtcagattaggtagttggatgcatatcgacgtagatctttcgcactccaaggaaaatgctcacctgtcgtgtcagaaactgcacttgatcaaattagaatgtttcacatcaatggtccctcggttcagcgtctgtgccttttgggcccccaactatgtgcttccattgcactgctgaggcgtgatatgaaacataacacaaaacagttaattgaccagtcacttgttacaagatgttgtttgttcaaagttgtgagacgaatttttgctagcctctctgcatttgaaaaggatggcaagatgcagcgaagagcagatctgtcacatcactttcagagcacgatactgaggaaaccgcatgcatcttacaagccactgctgcgcatacattctgaagtctgttgcgtaccaatcggactagtccttcatacggcattctcttggttatcaggatttttgatggtccggaccctcaactgtacgaagtacaaaagcctcaaatccacgacggtccccaagagactcatgaatgaccctcagaatccttttggctctcgagaaaccagtatctacagatcctattggtatggccgtccagcacggacccgacatctggcgtcagagtgggcatggtaatacgatactacactctggaatgttagatttgattatccttattcccgagcatctactttcattgaataatacagtttaccttctcatgcacatatctttaggtgcaggaccttatgactcggattatctgcactttgacctcataccacgcagagcacagacagagacacctagacagagttaatcaatccgacggatctctgccataccacttgatagacatccacaaactggactcaagtaacccgaaagagagtctagaccaggaatttcatggcatgacacggcacgacctgccacaaaaagtaatctagctggtaccaaaccctttggaagggttcaggacaggctcaagctcaaaatagatgaagaacttgacccgtttggactagcctaacagatttaccaagttactccttgattaacgacagatataacctaccataacaaacgtgataggtaggtacagtagcagcagcaatagtggtaatggatggaatgaatacgtagggttaaggattatattacactatcaagttgaataggagagtccaccctcgcttcgacgctcctcacgcccgttcggtattgcttccttcagcttacgtggccataaaggtttcggcaagattccagcaggctgtatctacaattatcccagtgcggttgacgtcgagttcccccttcaccttcaaccttccgtcaaacagccagaaacatcttcaattgtccagtgatatggtaagaaaagtctatcacagctatctgtacaggtaaactcggagagcgctcttagcgactcgtgtcatagtacttgaggcgcggctttgcatttctcgtccatgctatgttgccaacggagccagttgcgttccagcagctcaacggctggtgggaagtggtatgcctagccagcagggaatgggggcgagtggagagacagccggatacgagactttagctgaagcttcctgttgtttcttgtatctgctattgctgctctattctagagcgtggccattaagatgggctgaacaattcgagaacggacttggctcctatttcctgagtgaagatgggtggtttgtctatagtacaagaaggtcaggtaaggagtataccagttccttactcggttttttactgagcatgtgtttcttgcagagcgatatttggaaggagacgggggttttctacttacaataattgcttcttatgctgccatagcctccaacagtctcgtcactaccagcacgaaggatggtggaagtccactgtttctgagccaccagacggcccctgagaggcacctttggctaagactttgcgagcttttcttcttgcacgcgcatgattgttgattgggaataaaggcaagtccagactgtggacctgaaagagaaagtgggtgagtagcgagaagggagatgaaagaatcgtgttaaagaggaggaataaaaaaaaaaagaggatgagaaggcgccaaagagaggataaagttgagtggataacacaatgatagcatgtttttcaatgactttgacacaagaaaggtccaaaactaccacgcatacaccatcgcaattaggatagtcgacgtttggaactgggtcacaattgcttgcatgttcaattcgcttctatagtttgtaatcaggaccgttgtcaatatcgaatggggatgctccttgccgtttggtctactgcaacccatgagcatcaatttcttccttgaccactgtgaccgtcatttcttatggagcttttaccgaccaacagtacggacacgagttgatccgccagcgcgtttatatatatgtcggcctgttacgaaagcaaagttcctttctagacagtcgtgccggctctcggaagagtgcataggccttcttacttctattcgtacgatgatcaagcttaagttgctagcaatactgcaggaacatacgaaaggcctatacattgtaccacgagacctcctgccgtgaggacatgcgccgcattaccaacctcaacatccagcagcttcgactgccattctttaaacttgctgtcattcaagtttttcgtatgttttcttaatcgactggaaaagaacgaaagagacgaaggacctgtacagacttttggagtatttcccggcagacacctcgttgaattgcggccttttaagcacgattctaagagagccacaaggagatttgaaaaaatacccgggagacagatggcagaagattgcgattctccctgcaagttgaaccctcgcaacgaacgggtctaatggctgcacaaagaagaccttcagttcaaaagtgtgctctagttattgaagaatgcaggttgaatcatgataa

SEQ ID NO: 1825 - DNA, 3779 bp, Emericella nidulans
tactcgttctctataccgcgttcaaacccgcaccatggcgactgaagtacagaagatcaaggtcaagaaccccgtcgtggagttggacggtgatgaggtaggttttatcctgagcgttcaaggaagagccgcatgaaaaataaatcttcaattgcgttgtaccccgccctgcatggccttgcgttgtgcgactgcgccttatatcatggtcgatttgaccctcggagccgcattttcgttctggccctccgcaggtgcggggagaaacggcgaaagttgccttgctttctgctggatcagcgtcaatacccggaggttctagccttgcagccaacaagcgtgcttgaagcttatatcacatgtcactgacaagtactcttcctagatgacccgcattatctggaaggagatcagggaaaaggtgagtccacacttatgatcctctgcatcatatcatgatgtagcttccgtcactggccgaaccctaagctaacggttactcccatcatagttgatcttgccgtaagttgatattgtacctcggcttgggtgcgtcgtggctaagataggctagtttcctcgatattgacctcaagtactacgacctggtatgtcttgaatgcttgtctcccattttcagtgcactgatcttgctttagggtcttgagtaccgtgaccagaccgatgacaaggtcaccaccgagtccgctgaggccatcaagaagtatggtgtcggtgtcaagtgcgccaccatcactcctgatgaggcccgtgttgaggagttcaagctgaagaagagtaagcattatatgctcactgcgcggaagagctgactgacaaaacaaccctagtgtggctgtctcctaacggtactatccgtaacatcctgtatgtcacctttaccttttgaaatcccttgctattgcagtgtgctgataccatcaagtggcggtactgtcttccgtgagcccattgtcattcctcgcattcctcgcctcgtccccggatggactaagcccatcatcatcggtcgtcatgctttcggtgaccagtaccgtgctaccgaccgtgtgatccctgggcctggcaagcttgagctcgtctacacccccgagggcggccagcctgaggctatcaaggtctttgatttccctggcggtggtgttacccagactcagtacaacaccgatgagtcgattcgcggcttcgcccacgccagtttcaagcttgccttgactaagggccttcctctctacatgagcaccaagaacactattctgaagaagtacgatggccgcttcaaggacatcttccaagagatcttcgagtccgactacaagaaggaatttgatgccaagggcatctggtacgagcaccgtctcattgatgacatggtcgctcaaatgatcaagagcgagggtggtttcatcatggctttgaagagtgagtgcatctaaaacagttgatgctgtcgtcgactaacccctttagactacgatggtgacgttcagtccgacattgttgcccagggcttcggctccctgggtctgatgacctccacactcatcacccctgacggccaggcctttgagtctgaagctgcccacggcaccgtcacccgtcactaccgcgagcaccagaagggccgcgagacctccaccaaccccattgcctccatcttcgcctggacccgtggtcttatccagcgtggtaagctcgacgaaacccccgacgttgtcaagttcgccgaggagctcgagcgcgcttgtatcgatgttgtcaacgaggagggtatcatgaccaaggaccttgctctgtcctgcggccgcaaggagcgcgacgcgtgggttaccacccgcgagtacatggctgccgtcgagcgccgactcagggcaaacttgaaggcccgtctatagatatatcatgatctagcgttttgcttacttttattgtcgcatttctaaaatatcacgatacctattcatgacgactgcgttggctagattctagctagagttattgggtccaagataggaacatttgactaccatattgtacacttaactgagtggttgaggagagaatctgtctttgtattacgaacagtgcagtacagtcaatactactgcctattgtctgtcaataggagtcctgagcgcctgttcttatagcttatccctataatgtgcatcgctcgctgagcttgcaaccacatcgaccacgacatttgtcttgacaacccgagagtgctggcgtatttggcccgtctcgtggtccgttcatatttgacttgtaataatatttcatgatatctttttgcctctcaagtacgccgtgctatccgcccttttcctgctacttactgcttccagcaagctaggttacataacattccaaggatagctgacagtcgacccttggctcagaactgtgcacgaccaactggatgttcttccggtctctagattcagactggattattactggccgccacggggccttgacgcaataccaagcgtgctactaccatattcaggactaccggcttttcaaccgacctcatctccacgcccatagtgcttcggctgctgtccctgacgacgcgccagaatctcatgcttatggctttctttgctacgcctaaggtccctgtcaggtatttgcagggcagaagtgatttcgggcatatattgtgcccggaggtgcaggatgtatgtactacctgtcagcataacctttgtctctgtggcgactatcacagtggctctacggctctttacacgcattcgcttggtgtgcgcgccctggtgggatgattggtttctggtgcttgccctggtaaataccatcttcagttcaatcgaccatctgggctaacggttgattacagatgacggactacgccttcttcggtatcctgattgctggtgggatttgcttacatgcatatcttggagctacaaagtactgacgttagacagaaaatgccaacggcctggggaagccgaaagagtctcttaccttggctcaatatcgatttcacctcaaggtatgcagcctgacacctccattatcggtaactgggaacttgcgaatgacactggtagctgctttggatatccgttcctttatacaacctctccttaaacctgacgaaagtgtcgatggtcctcttatacctgcgtcttttcccgtctagacactatcagataatattgaagatactgctgggattggtcgctctcaccggaatgtacatggtgcttggcacgctgttcgtctgcgttccgatccatacgttttgggatcgacaaaatgtggatgagaattgtgtctcgcgagcggtggtgtggtatctcactgctgccctccagatcgctggagacttgactcttgtgattttgcctatgcccaaattggtcatgctgcgcgtccctttgaggcagaaggtttgcctgatagtggtatttgctcttgggttgttgtacgtttcttctccccaggttattatggacaacgacccagcgtaaactaacggatatgattacccagtattgtcgcaacaagtgcagcccggatcgactccctgatcacgctcgtaaattcaaaagacctcaccagttagtttagcctctcagatgttgccgagtgaagaaaagctaacatgaggtacttactcagaagctaacggcctaatcgcaacctggtccttggtggaaattaatgttgcgatcatctgcgcaagtctgacaacattcagacagctcattatacagata

SEQ ID NO: 1826 - DNA, 4837 bp, Emericella nidulans
caagaacttcctaactgaagagacccttgcccttctggtcaagctggctaagcaagctggggtcgaggagctccgcgaccagatgttcgctggcgagcccatcaacttcactgagaaccgtgcagtctaccacgctgctctgcgtaatgttagcaaccagccaatgcaggtcaatggcaagagcgttgttgaggatgtcaactccgtcctcgagcacatgaaggagttctccgagcaagtgaggagtggcgagtggaagggttacactggcaagaaaatcaatactatcatcaacattggcatcggtggttctgacctgtaagttttgtcacctgagtcagcagcaatgatattctgacgcgcgcatcagcggccctgtcatggttactgaagccctcaaaccctacggccaccctgatctcaagctgcacttcgtctccaacattgacggcacacacatcgctgaggccttgaaggactcagatcctgagaccacactgttcttgatcgcgtccaagaccttcaccaccgctgagaccactaccaacgccaacactgcgaagtcatggttccttgagcatgcaaaggatggcgcccacatcgccaagcacttcgtcgctctttctaccaacgcagaggaggtcgccaaatttggcattgacaccaagaacatgttcggttttgagtcatgggttggtggtcgctactcagtctggagtgcgattggtctgtccgttgccctctacattggctacgacaacttccaccagttccttgccggtgcacacgccatggacaagcacttccgcgagactcctctggagcagaacatccccgttctcgggcggtcttttgagcgtctggtacagtgacttcttcggtgctcaaacccatctcgttgctcctttcgaccaatacctgcaccgcttccccgcctacctccagcaactttccatggagagcaacggaaaggccatcacccgtaccggcgaatatgtcaaatacactaccggccctgtcttgttcggcgagcccgctaccaacgcccagcacagcttcttccagctgctccaccagggcaccaagctcatccccgccgacttcatcatggccgctgagtcgcacaaccctgttgagggtggaaagcaccagcgcatgctggcctcgaacttcctcgcccagtctgaggcactgatggtcggaaagacccctgagcaggtcaaggccgagggtgctgctgacaacctggtgcctcacaagaccttccttggtaaccgcccgacgacctccattctggcccagaagattacacccgccgccctgggcgctctcatcacttactatgagcacctgaccttcacagaaggagctatctggaacataaactccttcgaccagtggggtgtcgagctcggcaaggtcctcgcgaagaagattcagaaggaactggaaaccgagggcgagggcagtggtcacgactcctccaccagtggtctactcctcgccttcaagaagaaggcgaagcttgcgtagcgccccttttattttggccctagggagaaaagcagaaaagttgtgaataattgacgagaacatgagtggtacatcttcggtgttttttctttggtcttcggaatcaaatgtttaataatacgatagtatgatcaattaaacattttattgaattcatatccagtaaaaattccattgttttcgcacgaactggtggcggccaggcgccccgttgcatggtcgctaaggccttgagcgagcggagaatcgccgactccaaggttgcttgctgggtcaaccaccgtgtctcctctccggattcatctttttagaccaagtcattatcaatacattgtaactcataccttagccgcgtgttcagctattcaccgaatcagctgtgcgcggtatccaatatgacttctgcgggaagaatgtttcctccctggaccctggttgcttcatgcttgtttcaaattgcggctgcggggagaactgatggctacgcatacggccagccgatgccagtaacctgtttgaatcggacaatgtgagtagaacctggagcactgagtctaagaagtatcgagacttccttccatgatcaagtactgacgccgttttctgtacccagcgactccggtgaacatgtatgtctgacctcaataccgtgatacacttccaaaccatttccaacctaagcaaccacagaacaacctcactgaacaggttactaaattatcactacgctagataaccgacgatctcggaaaactccaattcatccccttcccaacatgcaaagagacctccgcccccctcgccctccgctacggtgtctccgaatcagtcaattgcaccatcgaggccctacctgatgaactctaccatctactcgaatattacgtccactcagacgtccccatgacgtgccgcgtgcccaccgcgcccctcgactccagttctgcaacggattccaagaccgacgagcagaatgacggaaataacggcggtgataatgtctctacgctagaggacaatggaccgccatacacgccaatcacgttcgcactgcagggaactctgcaaaaaagccacctgcacatctggacggacatgaatgttttagcgcacaatatcccgcaggtaccgtcgccagagaagacaaagaccgcgaaaaaggctaaggagaaaggctatatggtcgcgggaacggcatactcggttccggaattcgagtattctcttctccacggcaaggggaagaaaaaagataacgggaagaagtcagacgaagagaaagaagcttctgctgttgccgaggccgcccgcgagccctggacagaaggacacgggacaaaagtgatccgcggtgagccgctgactttcacgttccatgtaagctggattgaaggcggccgaggcattgggtggccgggccgtgatatttcggtgtcgtcttcgtccttgtccgggttttggtggttgctctcgaaggtgattttctttggaattgcggcgtcagtgggcgcgttggtcgcgctttattgggagcggaatggcaacggaatcgtgggcagacggaggggttggaagggagatgggatcttgggtgttccagctgttggtaagggggccgtgggtatatcatttggaaacgggtcgagaacgaacggatatgggtacggagggtattctgccaatggttctgggggtggatatggcggttttgcgagtggaaagagagattgatgggtgtagcttgttctggtgtttggctacattgtcggggatctgtaaatataaaacgttgcatattttgtttatagcccatacaatgcgaccgttcacgtctaaaaaacaatgcagaaactcttcagtacatggtaatatacacatcaacttgataacccttatctttgtcgaaaaagtagatgggcatactgcctacctaccacccttgcgccctcatcctctggatctttccaaccgtatgcgcaaatgaataagcaaacagctttctccatcttcgaatccgcaagttcttcctcatctggcccctccgaacatgatacttctggtccaagtactgatacttaacattattctccttgagaattcccgaaagtctcttgagcgcgacttccaaatcttgtccgcgctcagggacaacagctacatcacgacccagcgtcggattaagcttgaggtcgaccctgcggcgttcctgacgaggaaccgcgctggtgcttttgccgctagagatgccagtgccagattcggcagtctgctgactggatgcttcgtttctagacggcgcgcggttttgacggccagtgctgagattgagacggttgaggacttcgtcgatgttgcccgggtacttggggcggaggagctgggttcgggggggcggagatgcggtgctagtggtgttatcggtgttggtctcggaggcgttgttggttggggttgaggaagaaaagcggagcgattgattttgtctggtgaggaggaattggctgtgtaaaattgattggcgagttgagaggaggaagtgttgtcgccgtcgttgtcggccttgaacggaggcagcgagttaaagatcgctccattgttccgtcttgccttcggactcgatctgaagtgaaaaaaataactccagtacaaatgacgctctcaacaattccttcttgactcaaacgtgaggcatgggaaggagcggcagtcacccaaggcgtggtcgagacgagatattgcagctccggcttcatttttccagatcggaagtctccaatcaatcacgtgatgttccttcagatagtatttgattatttcaagaacgttcagcaatattcgcaactcataaagcacaccaaatataccaagcatccagaatgtcctcaatcacaatagctaacctcccacgcataagccgcgatgcgctctcggccctcatcctctctgcatccacgcctagcaaactagcaatcattgacgtgcgagactctggtaagtgaccttgatcactcactcctgcagtcactaacataatatttagaccacgttggcggccatatcgtctcctcaacctgggttcccagctcgacactagatgtccgcataccggaactcgtgcggaccctgaaagataaagagaaagtcgtcttccactgcgcgctcagccagcagcgcggaccttctgcagcgctaaaatacgcgcgcgagcgcgaaaggatgctaggaagtgaagaaagccacaagcaggaggttttcgtgctagagggagggtttgtccagtggcaggagatgtatggaaaggatg

SEQ ID NO: 1827 - DNA, 2671 bp, Emericella nidulans
gacaggagttagtgaaaggaccaccccacgcacaaagaaacgagccgaatgcgaacacaggcaagcgtccctcaccagcgacaacagggaccagaggagagcacaccgcaggaggccgagcccgacccgacagcagccgccaaagacggcctaaaccaggaccccggggcccagaaactggctgaggacgtgccaaaactgatgcccgactacagggagcacgggaagtgcgaaggcagcacctctgcgtcacggccagcttctcacggctatccagggaaaggctactcatcatggcacattaccgggcgatgccttttacaactgggaccggtctggaccacgttgctagtttgaccgagattcatctacatgcatgtatgacactcccagcgcatcgtcctctgatacggccactgttcgcgatctgataaacacattcttagtgatacttggcagcgatcaagtccatactgcggcatcagagctcctccgcaattcactgcagtttgttcgattgctggacactcacaaagtggcctacacatttgcgcccaacttctttctaaccaaggtgcttgacagcttgagggaaaacccaacgttcacggcagacctgtcgagccttaaggctctgatttccggcggggagtctaatgtggttgtgacctgcgacaagctcacgagggaacttcgccgtcgaggtgtccaagccgaagtgattcgtcccggcttcgggatgaccgagacatgtgcaggatccatctactctcgggcttgcccatcgtatgatatcaggcagtcccttgaatttgcgagtcttgggtcctgcatccccggcatgcacatgcgtattatgagcatcacagagcccggaaagctagctgcacccggcgagtctggagagctccaagtcgcaggtccggtcgtatttgaccactactacaacgatgagacggcgaccagaaacgccttcacgccggatggctggttcataactggggatttgggctggatcgacgatgccggcaacttgaacctggctggtcggaccaaagacaccatcatcgtcaatggtgtcaaatggagctcgaccgagctagaagcggctattgaggaggaagcggtttctggcctggtgcgttcgttcacagtagttgtgccgacccgccctcctggctcggccactgaggaaattgctgtcgtctactcgccggcgtacgcccccgaggactatcacgcgagatatgagaccgcgcaggtcatttccaagacagtctcactgctgacaggcacaaagcctgcgcgccttatccccctgcctcagtcacttctggagaagtcgtcgcttggtaaaatatcgcacagcaaggtgcgtgctgcactcgagagcggcgagtacgcgtcgattgagcgcgcagaccagttgattctggcgcaataccgccagttcaagtggcgccctgcaaagtctgacagtgaaagagctgtgcagaaagccttggttgagtttctgcaagtgcctgctgaggggattaatatggatgattctatttacgacttgggtgtgagctcgttgaatctgatattgctgaggtctacgcttcagaggatgctagaccccaagatcgatatcccattgtctatcatattgaataagtgagatcccacattcccttcaaagaccaaatacaaactgttcgttaatggctccgcagtccgacccctggagcaatcgcaaggtcgattgactcatcccgctctagtttagctggatacaatgcgatcgtgccactgcagcaacacagacacggtggtacaccgttgttctgcatccaccctggaagcggcgaagttctggtattcgttgcccttgctgcacacttcccgacgcggcccgtgtacgcgctgcgtactcgaggttatggctcaaacgagcaattattcggctccatcgaggaaactgtggagacgtatgcaacacagattcgccaagttcagccgcatggtccgtatgcaatcgcagggtactccttgggatccacactggcctttgaagtagccaaagtgctggaagcgcagggagaggaggtaaatttctggcgagcattgactatccgccgcatattgcccactacgtgcgcgacttgaattggaccgacgtgctgctacatattgccttctttcttgagcttattgaccagaagaccattggtcgagtcacaaccttacctgaacacgcttagaccgacagactgtactgacaccaaatcttgaatataggcgaatgctaaccgggcagagccctatccattgacaccagcatctggggttattagcaaattccgtgactttcgcgtaacattaagacgtatatctctagggaaagggagtatctgttctttttaggagatcctactcctatcagacctgtactatgtattgaagagacagtttgtcctggcccattttctgaaaattttatttatgatgtcctatctaaccaaattctacagttccattttctcttcccaagtttagctcaaatgccagggtttaaattttctctttatcatctcttttaaatttcttcctcttaattcttatcttcttcttatctcttcatcttatttctatttttctccctcctctcttacttatcattctttat

SEQ ID NO: 1828 - DNA, 2635 bp, Emericella nidulans
cgtaacacttcctacgaaatgaccttcagatctgcatacccaaagataaatttgctcttcgccagccatgaggataaggctgccatcgcgagagcagtagccgagcacgatctggtccttcacttcgctctgagcgcagaccatctcccttcagctgaggcaatcgtctccgggttggaagcacgaggaggaggaatttacattcatacgagcggaacggatgtccttcttgatccgcacgagaacagcactcgagcggcgagggaatatgtgttaagacttttgatgactgggagggtattggggagcttgtgtctttgcctggtatgtcacttcggctaccctaccttcatccttccacggtgtgaacggattaaccggtaaattagatgctgccccccaccgcaacgtggacaaatttgtcctgtcatctggctcagacaccctcaagaccgcaatcatatgcccctccactgtatacggcgcaggccggggcttgatctcgcagcgctcagaccagattccaaacctagcgaaacttattcttcaacaaaaaaagggcctgcaactgtccgacggtaagacattgtggaactgtgtgcatgtctacgatctctcgcgattgtatgtgcggttcatcgagcagtcgatttccagcggggaattgacctggaatgaggaaggctactacctcgtcgaaagcgggacgtatttatggggcgatatatccagaaggatcacaaacgaagcgtacgttcttggtctcctgccctcagagcagatgatggttgtggagatgaaagaccgcgatatcctagcgcccgctggtcggcctgtgggcaattatgcggtcaaggcaaaggcggttcgggcgcgaagattgctaggctggactcctatcgaggggagcctagaacagaaaattccagcaattgtactggccgaagcgaagtccctgggcctgtagaccaaggtcgcaggagaggacgaggtcattgtataccagaccctgggtataacatgcaagtatatatcataacgcatgacctgaccacgcacacgtacccaaccagatacaaaagaaaatgtggccgagattaagccctgtggctgacagagccgatttgtcgcccagtatgcaagccctatgcggtatgatcaggtcccgagtcctcgaggcagtcactggacaccacaatgcaagtgttgatggtggcctgaaaattggcgaatgatgccacgccacacagccccgttccagggttgacttccctcgtgggtctggggtattgccgtccaatcaaagagtgtcccccagtttgagtttttttgaggggttgattgtctgatgatcaatatacagaatccaccccagttactccgatacccggactatcgaattcaagtcggagaggcgtctgtcaatttccaaggaagaatatgcgccgaggattttgtaacagtatcgcatgatatgatggccgacataatcacccggccgtaccctatcctatcaccggccaaagcagggatcaccggcctagccgtatgcaggctggaatctccaccactgccagcgagtgccagacttggatcaccgcgaccagggcaggggtgcagccacagattatagctgtctaaaaccgcggatcaggaacatgtttactttatttttgtgctctgtcttccatgggataacacttctgggaaactgtacagaactccatacatgttcaaattacggctaaagccagtcacgaggcttttccccataatgatcgacagcgaggctttcctctattccgcagccccaggggcagggtccacgcgctatccggccaagagccgaatccgtcaatcagcgaccttgcagagacgctaggcacggagtacggatgggtgcgatactaccgtgatgcggggggagcgcttggttaggaaggtgactcgtgcagctgcagagcagagaggatcctggagtgccagcagcccacttcgcttctgatttggaccgatggatgggcgagtccaagacagaacaaagtgcgatgccgggtataaagagggcagatgcgccagtgtcgccgggtggaagttacaagtagaaggaaaggagaaacgaaactagtcaaaatgtcactcctatcgagggctatgttacccttacttcaagtttctctgattggcgctggcctcacctccgcggccacaccgtacgccctgcaacaaccccctttgacaacagattggacggaagaagtcggcacgaacccgtggcctgagtatcctcggccccagctacagcggccgcaatggcagaacttgaacggggtctggcagtatcgggatgctagaaatgcggctgcaattgattcgccgccctttgggcagagtcttgatacggaggtgttggtgccatcttgtttggagagtggtctttctggtaagcctccgcaattgcttgatctccttcaccaatgcaacgggggatgagagggcactggccatatatattgacgatgttgaataggtctccaaggccaaagcctattctactcatggctttcgacaaactttactgtttctgaggactggcaaggcaacagtgtcctcgtaatctttggacagtggcaat

SEQ ID NO: 1829 - DNA, 3284 bp, Emericella nidulans
tctctggttgctcgcctagcttataaattacttgaaagatgatgagtcagtaagaggctatcctctcggatatatggcaaaatagagtaaaataagaacacttcctttggcagcatttctggaaccattcaaaatatattcttctgccaaactctcttgcacaccccttccggtggctgagaacatatgctaaagagccaacgttgctgtagcggctgtggctgagtttccttagtgtagttacctaagaccagtatacttatgtctagtggaatattatctcaattaaccactatatatcttatcaatcaatatctctctaggaacctattgcaaatttcaggactagcttcatcatttcctcgtgcgcatgtgtattataactgtacttttgtccacaataagtagctgatatagtagaagattgagcgtatacaattatctttaccatagatgagtaatatgctcaggacatgcgattatgcattgctggcgcaggagaacgtgttggtagaagcgtcatcatgaattgccttgccagagacatacagaccgagaccgcactgtagtagacaatctgtcagcaactgcaagtggtatatttgcgatgacattggtaaggccactcaccatgcacccgccaacaagaacaatcagcacgtttatgatagcgaggcagatttttctgggcgacgagaaccacttcccgtagttaatgtgcagccagtatacaccaccaagtccgtaactaaaccaactggcaaaaagggagctctgcgatggaaggacagaaagcattagttacgaggaatcatataatttggctgatacgcagctgtagcaagacttacgataagactgagcaggtcgctgaagaccgggatcgcgtccgcaataatccaggcaatgatccagcaggtcaagccgatggcaatccaagagccaacagacacgaaatcccggcgatgcatgcggtctgttccgcgaaagagacggacgtagatgtacttgaggccaatgtggccgttgaccacgccagcgccaacaatctgagattgttagttgcaaatagaataaggaagaaataatctagtggggagagcgttaaacgtaccgtggggatggcaataccgtacgctacttttttcagcacggggcctgcagagcccagcgcaggcgaatcgacggtctggccggcatagtagtagattacgacggcggcaatgacgtaaaagatgatctcaaatgtctgcagcatgtacagagccttgggaaagtccctgggctccctcatttcagccagaagaccaaagaacgccacgtgcgcgcagtaggcgaacacgatattggtcacggcggtaaaggcatggaaaaggtcggtgtcgacggtggcctttagggtagtagacgcgcggccctggactccaacgccaaccatggtgattatgacagcagtaaagatactggcaaaggctgaacccgtcaaggttgagcaatcagtattttatacgctccggagagaggaacagatgcacgtacacatgcaggagatataggtcatattcttcatggtacggggaagcgagccgagcatgcagacgacgaatccaacagtcgtgaagaccatagtgcaggtgccatgctcagtaatagtgttcatcatgacgctgaaggtcaagatgtgacttcccatgatgaagatagagaagaggagctggccaatgccgaagagctcccgtccgaatgcaccgagcaagacatcaccagcgtcagccagattctggacgtggggatagcgttggtggaactgtccaataacatagcctgtgtaagtagcgaggagacccagtccaataatcaggacaagagcgctaggatgaaccgttagctcgcgtgatcagtatcagtccagcgacgtctatggacgtctctccagcacactcacggagcaagccccagctgggcaagagtcgctggcaatgacagaacaccgagcgatactgattcagcaatcataactagggttgccaggattagatattgctccgcccgctatgtgcataaaagatgccgtaaaactcacacattccagtttgcctgcaatcgggccatacttgtaagacaaacgctttcggcctatctgaagctctagacttaccaccactccatggttttgtacttgacttctgcgttggactcatctccaaatgcgtccacgtaacgcggcatctgggccttctcgtcctcgtccctccatcctggctctgcgtccactggaccgggggcggtgctgactttgtcagggctcatttttctgggtctgagtgagtatcgacgaagtcttctgggccaaaattctcttgtatggcgatggtaaaactcttaatagccgcaccaaccccggaactcggccagattacaaaacgcgccccgcgtgagacagcttatcaacgcaacaatgcaagataatgtaataattaatggtaaaaaaagttgcagaaaattcaagccttcttgtgtgtagttaagcatctcccaatgagaagcttggcctggggatctattagataaccattagttaacggaaatcgagctccaccccgactgtagccgcaataatgactaacgctatggtcgtgcctgcataaatgcgcttaaccagggtatctgtgagcattagagggcatgcacctgcgagacacgaaaaatctaaaaccctagcgtccaacaagccgtcaagtttggttggggcagccttgagtggtccgcaaagccaccaagagccagcactaggatatctcccgttgatcagaaagacgcgcacgaattgtgtaaatacagagctcctggatctgcggtatcatggctaagtctggaaatttgagctgaacccaagaatgctaaggcattgagttcacgactctggtaagagatagcgctgtcgctgccagaaggcgatacgcaatctaccatcgtttattccatgcatgagagatcgaactcgtgcaatttgttcaggcagacaaaggtatagctcctccatgtccataataagaggtagcaaaaggaggccctaatatcaggtagaatccaccaagaaattcaggatcagcaaatgctgctcgaaaagggcggtaggcagtgcatcaagtacccactttagatatcaaatggctgctcgcgaactttattctcgaaggagcctagacgatgctgtcagtttctggtttaccagatgttccaagattatcgtgcgttatggagagacgctttcctcagcgtgg

SEQ ID NO: 1830 - DNA, 2089 bp, Emericella nidulans
taactatcaccctagacaggatggcttctaatccactaatattgttttctttcgtctaccggacttagggattcggggctcgagttctagtaccccgacttcttccccaagaaaagctgcagctactgtagatcagagcggtgattcagctaaatctactcggggatgctgagttagacatacatcattcatagcagactggactaattcaacaaaccagggagacaaaacataaacaaacgagacacagatcaatttagtaaagtatgcaaactcaaagagaccccgcttcccccatataaggaaaacgaataatctcccctttcattgtcattgcctccaagtaccctgtgataagtggatcgataccagcttgcaatgcgcgctcagtccactcggccatggaaacctccttgaaggggcacgcgaacaatgtctccattcggcccttgaagtccttcattgagaccttgtgcccgctggagtggtgcctgactcgtgcggcagacttgctctcccttgattcagcagacagagcgtctgcggcgatcgtcgcagctaccctgtgtacatcctcgaaatcaagatacccttcgaagttttcaaaacgcggaacacagcgtgtgagcttggagtacttcagaagagcgttcagggcatcctcgtttggcgcttcctcaccgaacactgcacacggacgatggattgtaacagggagtccggatgcaaggttggcgactgattcaaggagccgttcactggcccatttgctggcggtaaacccctcagagccatctgtattgggtagggaggacgaaactgaggctggagggagactagtgctgccggagagcaaggtcacgcggttggacgagatgaaatggatgggaattctacacaaaagagcgatggccgccaagaactttgttgagtcgacgtttgaagcgcgcagcgaagagtagttgttcaggcagtgtcctgtgctgccggcgtggatgatgacgtctagggacgattgaagaactgctatttcggtcttggtcaaccccagacttggcgtgaggagactaccggtgtaaatgctgatcttttctgacgctgggaggcgaggtatgtcctcggcaggaacagctacgcaatgcactcgttcgactagtgggttgtggaggagggactgaaggatgtttttgccgagaaaactggtagatccggtaagcaagatatcctgacggtcatgggccttcgtttgacgtgttgagaattggttcttggcggcataaatgaggtcttgtgtcagggctgtctcagaatcccaattgatcactgttgcatgggacgcttgatgatcttcctttcggcgactgattcgccgcgccatttggccgagagtcggaaactggtagagctctgcaacggggatagaaacgccaatggattccttgatagctccctggagtctgaccagtaacatggaagttccacctcgcataaaaaaatccgaatcagcgtctagtcgtgacgggccaccggaggccgggagcaccttctcccatagcagacgtagctcgccttctgcgaggctgagatgtcttgcagtatcggtgcctgtacccgccgcgctctcagtgcgctgagttggcagaggcagggccatgatagccttcctatcaactttcctgttggcgttgattggcaggcggtccagggaaacgactacggatgggagcatgtactgtggcaggggaaggtctctagcgagctgctgaagtcttgagttgtcgacgttgtctccaagagggacgacgtgagcgacgagcaatggcgaacccgaacccgaaccagaatgaacagttacgacggcttcggacaccagatcattcccagtggtgagtatgctgttggcaatctcatcgagctcaatccgcaaaccatttagtttgacctgattgtcgccgtccatgcggcccataaaaatcagcgtgccatcctccgtgagacaacccatatctccggaaaatgtacatcttcgtccaaccgcgggtaatgtcctctgggctagcgaagggatcccgaacgaatatcgtgtcgg

SEQ ID NO: 1831 - DNA, 2050 bp, Emericella nidulans
aggatcacctaccccacgccgagcgcgtagccatctggtatttatgagcttactcacatcgagtggctgcaggggatgtttaaaattagtcggacatgaagcgccattcaatttaggagtaaggagtacattaaatgtatttaagagtagctatgctcggtacaaaccttgcgtgtctatttactgttcactcttctcacatcaatctcatacccgctctgatttacaaaatcctagtatggcgcctgaatatctggatcacaggtgagaagcaagaatcctgtcgcactagctgatgctgacctaggtagaacactctctggcggtattgtgaatctcaccgtagggccctcggagaccccgtttgatgtccatatcgagctactgtgcgaccgatcaccgtactttgacaatctactagagaatcggtataccgaaatatcccttcaagagctcgtgttccccgatgacgtccccgaagtctttgccgacttcatctcctgggtatactgcgggaaaatcagcggtgctaggattgcaagaaaattgtctcggtcactgcatttattccagctatggacacttgcagagagattccaagtacctgaacttcaagatatagcctttgcaatttgcaaagagctcttagacgccgagcctgctaaggttgtaggctccgaggccgttcaacatgcttactcgcattccagtccaggctctagtatccgccaacttgcagtggatatgtgggcagcgagggcatcggatttcaaaatcctgcgatcccggatgaacttgccttcagaatttatagcagatctgaacgccacccggcttagaactcagaagttgttcgcgtttgaggtatacatgctccatcctgtcaccaaccatgatgaccgtctatgtacgtttgtcactaacctgaactacgcaaaggctgaaaaggatacccccgatactcctttttcagttgcaccaatttccaagcagtccgaacctacaatttcagatgattcaccgcgtcgcgcgtcagcggcgcaactcgcccataacaaagataaagccctttcttcttggcggcgagatcctgatcagatatcccgactgccgccgcaggtcctgatttttacgactccggtatcccgagcccttgcaccgtcagcatcaagactaccaagatctggccgacgtaaagtccgagttaagctgccaccgtcaacagacccgtcatataccaagttctcgacgaagtcaattttgggcgaactatacaggatcgaaaataatggtgaaaaggtgtaagcagtcagagttgatggtcttttcctggaagagagcgggtaatgaacattttatagctgaatgagaaataacagtcgttcatggtatagcacttagctcaaggaaagtgaggcagattagtcggtaacgagttgcttgctttgcctatacacccagctaaccctacttcacgtgtagccgtgcgctataaataccctatttaacatcccttggaatagtgctttgggtatcggtttattaatacaacccaaggatgtagatctactcttgatataagctatcacggggcttcgcgtcttgctgcgttctgcggtccctcttttcttcttaggcgctgttgatggttgcgacgtagcaactattcatgggatcgtctgtatagaaaatgtgccggacttgccccaattagagcaagaaaagaccgccaaggcaagtgataccttgcgaatttaacttcttcagtcaaatctgaaagatatttcaagggtcttggtaatatatcgcaatgtttgctggaggcgcggctacacggacccaacagacaagtagccatgacgccaggagataatttacagctctgaggtcttggttcttaagataggtaatgttcctgcctcatagggacgaatgaaggtgacacatacttcgtagctgacgagatgcggtggaccgttgccgtctagcccgttcatatcttgaggatatccaaactagacagtaccgatgtagtaccgtcagagcttat

SEQ ID NO: 1832 - DNA, 1581 bp, Emericella nidulans
aatacaccctgagcaatgcccgaagtaagagaaaagcaacagatgaacaacccatgcatataaagacgagccaatttctctgaaacatcgtttaaagtaaaaagagaagaaaagaagaaatatcgagagaacaccgacggacccaagttaaataaaggaacaaaaaaaaattggaaaaaaaaaagaaaagtacagttcagagagaaagagaaaggatgagatacataaccctgccatgagctgcacgagcacactgtgacttcaacaaacaaaaagtgcatattagtcaaagcggaactggaagcgatcattcctgtcgactgcgcttagtgccgtgtggattccacgagccgtcacctacgccttggttctgaggaaagaagccggtattgaaaccctggttgggaccttggaagccacctataactgggaaaaaatgaatggttagatatctagggcaaacatataccggtagtaggtgtatgtgatgtaccttgcatgcccatgttccctcctatcccgcccatcattggattcatacctccagccatcggattcatgcccatgccacccattggacccatgtttggcatacccatcatgttgggtccgccagccatgccgccgccacggccacgcattccgcctggtccgccgcgcatgtttccgcccatcataccgccacggccaccgaatccgtagttgcccatggccatttgattaccctggaacccggcgccgaccatagggttgttgaaaccgcccatggggttattgaaattgcggttgacgtagccgggcatgttcgacatccctccgcggttgttgaaccctcctctacctccacggaaccctccggccatgttgcccatgccaaaatttgcgttgttctggtttggagaattgaatcctccggttcgcgcattgtccttgcgcatggggttgtctttagggagtgtacggaatggattcggaatggggctagtatagttgactaggaacttgcgtccactctgtcctgtagtggaaagggagtcgatgtggtgcttagtggctgttgcggcggggagagatgtgaactctaggaatgcctgactgtagagagaacacacatgagtaccggatgtgacatactaaagctcgacaacttaccctttactctttccattaaccttgtgttcgctgaaagttacatctttcagctcgtcctcgcacccggcttcgcgtgtccagcctcggatatcatcatctgtagtccaccagtgtaactctgagatgagtagcgcaggcgtcgcgtcaggatcaaccgggcgttcgtcgagttccttgcgtttcacaccctgttggggagttgtgtctttctgcatttgttgattatttgtgtctgattgtgttacaggcgcgccatttgttgtgacgttgggttgttgctgaatagtgccggagtctgtggagttgccactgttttgagcgttatcggacgcatcgagaatgagatctgtgtcttcctgcttcatgtcatggtcctgtttgaagtcgccttgatcattggcgttgtaccactaccatctccatagatgt

SEQ ID NO: 1833 - DNA, 2134 bp, Emericella nidulans
atcgttggtgtagaagcgtttcgagatcgatgccccaactctctcagccggggtatacggccaccatcagacttgtacgacatcgtgcgacgctaagtccaatttccagctccagtctcccggatatcgattagaacgtggcgcgggatagtgtgaaggtagaatcattccgtcttgagttgaatagctatattatgaagaaactggaaacaattgtccagtaagcattgtcggcaatgcgagaagaaaggagcacacttagcacctagcaaacatggatatggtgggtgtatctgcaagtatgaaactggaaaagtgcggttcgcgcgagcgatgtagatctaagcttgtaaagacggaagaatgcaaccacagactttgttgagtagaaaaggaaaccagcctctccaacagaacatagatgatgtcgcggggggggaaatgaggcagctagttagatatgaagctgcagctcgatcatgacaaggcaaagcaataagaaataggcgacaaggtgtacatgcccaagcggtatagtgcgagatatgcaggcgctccgccacaggcaggtccgctgtggctaagatggcgaaatagatccgagctgggcctgcacgaccacgtcagagtcgcatatactttcaggccacgcctaaattcgaaaaggcatgggtataccgaggaacttaagctgtgcgtgtaacaacgcaaaataaacgagagtagaagatgtgagagatgcgattgcggcagtcctgacttgcgatagatctggaatctgggcctttttcaacgtgagaacgtgcctcgcgctaaatttcaaccctgctggggcctctgggtctagtggggaattcagatccccattcgcaggggagcgatccatctaaagacgaccatgagggatcctggcgcgatgtgcgagatcgacgccggtctcgcattcgagattggtgtgacgaaggcaatcattggtgaacatgctgcacgttcgtctttgcagtatcaacttcagctatctctcgaagggtaagagggtcaacggcaccaggcgtcgttggtcgataaaactggtgggtaacgggatgaagacaattcgacccacttttctcaatatttgcaagcgacgacaggtacgaatctcacatcaactcaaaaggacgcggtatgaccggctttaaaagcggttgggccgtgcgaggaaggtgacaggttgaagccggggcgagtggcggaagatagcgcagagacggcttaagcagaacgaccataggcaaaacagagaacaatatcagaatctccactagctgatgatcgagacaaaccgcgttgatagtttgatgggcagagaaaatatgcagtagcttaggactctccttggccagtagtgttgctggagcagaatggtctgatttgatgtaaagtcggataatttgcccctaggctgctggggagatctttctggcagtacagtacagtcagcagtcggtcaggtgctggtcactgcacttactggtcactgaccacggccgatcactaccggagacaccgaactcgacgtacagagtacgtgtgagacgctacgtaccccaactgacttttagcaatgcatcaagtcagtttcgagtttctcgcatcatttcgcatatgtcccagttggttcgcccggattcccaaaataaggcatacttgccccaccactcgcaatgcattacgagcagggcgcagtaccaactacaagacctcgactctggacagctaagtggaatttctacaccggcattattggacactcgagactttcttgctaacaattaaccttcgttggttagtggaataccctgacgatacacaatagaagcgaggcctgtagaaagttcgctccgagtccgaacgtttcgttgcacagccaacacaagtgaccggctatcgcgagcccagattgggcaaaagaaagttgtcttgtcacagagaacgtgaatgctgagaagtgtggcctcgaccagtgacgggcttggaggcattcccagtattgtgatttcttgaagctgagacctccgcgcagagttacgtttggaacgggccgtgaaccaaacagagtcgcactctggttctgaacggttggcagttggat

SEQ ID NO: 1834 - DNA, 9968 bp, Emericella nidulans
atctacagcaacaccacgtgagtcgccggccattggtgctgtgccgcgcggcagtcgcaaatgccaatcgtaacgtaacgccaatgccaacgcatttgccagcaacagctccctgtatcgctcccagtcgcaggccgacatgacggggctttccccgagcgtgcgcaacatgaccacctcgtcgcagtcgctgctgggcttgccagcaggaacgagctatggctcgttctcgggccaattccagcccactagtacgtcaaatctgctgtccaggagttcagactcgctcgggcagctgaggagctcgtatgactctttgcagggagtccagaggaatatgaatccagtgacgaattaccggcatacttcactgaactcgcaaacgctgtcaccgcatgcgcaggggctgagtacatctccacagcagtcgttggatcggatgcagcagcttcagaggcaatcgccacatacgcagtcgacttccgctccgtctaatgcctcgccgatgctctcgcattcccagaaccagcaatatacgcagtatcagcaatcttcgccgtatcagacacagtcggctcaatatcagcagccagtgtctcaatatcagcaaccccaaaagacgcaaccaactcagtaccaacagccgcagcaatatcgacagccgcagcaggctcagtatacgccgcagacgcagagctctccttacctgcctcagacgcagtaccctcagtatccttcgtcacagcagccgccatatcagcagctacagaactaccaacagcagcagaagtcggcccaagtaccacaatcgagccagcagagctatccgcagcaaacgcaaataccgcagacaagccaacaaaactatcaacaagcgtcggctcagcgagcaccgcagacgagcccggtacagcagggatatcagcagaactcgacgtcggcccagcaagcgccacagctgagtcaacagagttatgcaccacaagcccagaagtcagcgcaaggaccgcaggcgagcccggtgaaacagagttaccagcagccgggccagaaaccgtcacacgcaggccaacagagctatcagcatacagcgcaaagttcagctcagcaacttccacagtcgagccaacagagctttctgcttagttccgcccaggtaccacagtcgagtcaacagaagggttatcagcaagcgtctactcagcaagtaccgcagtctagtcagccgagttatcctcagcaagtaaataaaccagcgcagctaccacagttgagccagcaacagagttacctgccgggaccgactcaagtgtcccaatcaagccagcaaaaaagttatcagcaagcaggtcagcaaggactgcaatcgagccaacagagctatccacagcaggcgcagacatctgcccaagcgcagtcgagcccgcatgtacaacagtatcagcaacatgcgcagaaatcccatcatgtactacatcctcaggcgcagcaagtgcagcaaaatcagaaagccgctcgaccttctcaaccatctcaggctcaggctaagccttcaccattgcagtcgcagcaagctcagcaagtgcaggttcaagctaaccacacttctgcatcaaatgcccacccagcgcaagcaaatcctcagcctcaacgggcgtctcaacaggtccaggctcagcaaccagctcaatctcaaaagacgtctcagcaggcgcagaatcagcaaaccctgccaaaccaggcttaccagcaattctattctcagcatgcgcaacaagctcagcgttcaccgtaccagactcatatgcagaatcctcagtatccgtatacataccagcctcagtttgctcaacagtacatgcaatcgccacaattacggacttcgcaggcaacccagcagcagtaccagtcacagcagtcccaaacctctcaatctcagtctccgcagcaatcagtcatgcagaaacagccaacaacccaattgcagcaggagcagcaaccgcggtcacaagcacaagcgcaacctcagaaaccgcctgcacagaccaatcaattagcttcaaaacctcccgctaaagagccaaagaagaagaaagctagcaagaaggaggccaagcagaagcctgctgcgtctcaagctgtatctcagactgcgtcccaacctgcaccgcaagccagggcatctcaaactgctgcgtcacaggcgccgccacaggccaagggctctcaagtcaccgcgcagtcctcagcctctcagccgtacgcctcccagacttatggttcccaagcgccggcctatcaattccacgcccaagcatcccaaccatacgcaccacaagcacacactcagcaaaatacttttcaaactactacctcccaagcacatgctgccccaacaaactctttccaaactaacacgtctcaatcacatggccaagctcattctttccaagttcccgtttcacaaccgcatgcctcccagatgaacacctttcaggccacgcctcaagcaaattccctgggagctcaaggctcccaacctacgcaaatcccttctcagccgtcaacccaaccgaaagttgaatcgttgtctcaacaatctcaaccgtctcagcaagtccagcctacaaccaacgggaatggacaggcttcgggtacatttatcacagaaaacccaacgcagaagaagaccaaacctggagaccccaatcacactcccagaaagcgaggccgtccgcggaagcaacccggcgaagcaacaaagccgcggaaaccgaagagacccagaaatccggatggcactgttgacttatctgcagcattgcctccaaatctagctgccatcccgggggtgggtattccgttttccatagctccgaatccgccgcctgctcctccagcttctacggcgtccagcgcaccgccggcgcctgtaatcggactggatggtaatccgattccgcagaagcgcaagcgtggacggcctcgtaagtctgaggcggacgggacgcctcgtaaaccacggccaccgcgggatccaaaccggccgaaagggactgggcggcctcgtgggcgaccccggaaggtggacgtgctggcaaggaagaaactagaagaggagcaagcagcagccgccgccgccgccgctcatgctgcggatcaaaatagtcagcctggagccggccaacctgcagccactcaagcgccacccagtcaagcacaacatggccacatgcaagctgggcacgtccaagtcaaagtcaatcaaactagtcagggacagccaagcaaaggacaaggacaaatccaccagtggcaggtcaatcaggccaaccagagccacgtcagccaagcacaagccaaccaagcgccaacgaatcgcgcacaagtcacccatcaaactagtcaagggcaggccacacaagggcaggcccaatggcagattagtcaagggaaatctggctcggggcgagagcaagtcggtcaaggacaatttggacaatctgtgcaggcaccgtctggacagaccaatcagtatgcgcaagggactcacccgggacatgcacacccttcgcatggccatccatcgcaagcgcccgttcagcctcagtctcaaaatcaggctgccagacctcaaggccagcagcaaatgcagccccagcagcacgctcggcacactcacgcgcagcaagcgcagccaatgcagaatcagttgcgggggagccccatgcaaagcatgcaagctagcccgatgcaatccatgcaggcgagtccgctgcagaaccagataggccagagacaacctgtgcagcggcctcctgtgcagacatcgagtcaacgacctcagtcgcacttgcaagctcaggtgaacgccaaaccgcagatgcaggtccagccacaaaaagcgcagcctcagatgcagaaccacatgcaggccaaacccgttgtgcacgctcagacgaccaagactcaggggcagacccagcaggtacagcaggcacagcaagcccaggttcaacaagcgccagcccagggtcagccgcagaaggctcaggttcagcagctggctcagccattgcagatgcagcgacaggcgccgtcgccgatgcagacaccggcgcagcggccccatcaaccgcacctcttggggcatggccagtcgcagttgcatcacgcgcaggcacagcaggggcagatccaggggcaagcccagactcggtctccgacttcgcaagctcaggcgcagacgcacaatctcggcaaggcacaccctcacgctcaaccaactcaacaagctcattcatcgtatcccactcactctacccactcctctcactctacccactcctctcactccgcccaatccgcccaatccgcatcgtacccgcactcgcacccgtaccaaccacaattccaggagcagataccgcagctgcacatgcactcgcagctccaccacctcaaccagcaacatcctgtctactcacaattctcgcaaagacaacagcagccatcgatgacgctcaacccgcagaccgggcagaagcggccgtcctcggtgctggacgacgatccccggaaacgcgcgtatatcatgccacatcagctctagcagtcctttgtttggtgttctgagataccatggcgcaactctctctgattacggtcttttccttgttgcttggttgttttgcttgcttctagccggatcttgtttgttaatgcctaatcctgggcttcattttctctgttcggttgtcaggtcaggtcttgcatttctatttatttacataataattagcgctagcattgacatatataatcaacgctcaatacccagtggccgtgaaaaggcccagctgcaacgttctcctgttctagtcgtcgtagtagcagtgccaaccgctctaaaccattcacacctttcttccctctcatcctttccagctccaatccctaatttggtcccgtttccatcgccattcctaccacactctctatatcccctcagacgcccctttacccacttgccaacctcatcaagtaagcccagatcaacacccgttctcaccccgttctcctcaaacatcttcaccaaactcaccgtatccacattccccctcgcccccggcgcaaacgggcaccctcccagtccagcaacactcccgtcaaagaccctgaccccaacttcatacgccgcccacacattctccagtcccctaccccgcgtatcgtggaaatggcacgccaacctgtccacgggaactccgttctcaagaagatacctcagtaacgaggaagtgagacccggggaccccgatccatctgtgtcactcaacgcaatttcatcagccccagactcaagtaagaatctcgtacagtgcagcacagcagacggatccgttggttcacgcgtgattgggtcagtgaagatacacgatatatacccgcggactcgcgggattccggctttttttgcagcgaccgtcacctcgcgggctcgaagaagcccgtcgtcaacagagcaattgatgttgcgatggctgaagggcgcggtggcggagatgaagacgcatatggatcttatgggtggccggggtgagtgcgagagcaggagggatagccctttgaggttgggcaggaggatgggaaggcagaagccctctcgcggctcaagttccagttcaaattcagtctcggactcgaagctagactcgctttgctggcttgactctgactctgactctgagtctgactcagaagcagaggctggcccgccgcccccggactgtgacagccgcctgacaacccgatgtccaagcacagccctccaatccgccaactgcggcaccacctttggagacacgaccgaggcgatctcgatcgtctgtagaccggtgcctgctagccggcggatcagggcgaccttgatctcagtggggatgaactcggggatgttctgcaggccgtcgcgcggggagacttcgacgatatggacctgcggttcaatttctatctcatcctcatttttatgctcattttcattctcattttccttccgaagcccagtctctggctctggcttggactcatggtagaggcgcataatgacttcgtacaatagagtgggatagccaggttagcgggtgagcgggttagggttagatacgatatatgtagataatcagaggatactctgcccctcagctcaagtcagagctcaagtcagtaagcttacagtataatatagtacaattagatctgatcgaagtagcaaagataagaggataagagggaaaatagcccgcgggataatagtccgcagtcagtctgaatcgggccgaggctgagcagtgacggcgatgacgacatgtatggaatgtatggagcgtatggagtgtaagggtcatggaaagcgcgagttcgagaagccgggagaagaacctctgccggtatcatacgtcgacgcggattgtcctggctatgacgggcagtgagagtgacccagctggtcgtctaaagattggctgccacattggctgccactgccatggtactgtaccggtacggtattgttaccgttacaattgtacccacaccgtatccatatcgtatggataccatacgccggttgtatgcggaccgtattcgtctgtccgtttttcgtacctaccgtacctcccgtgtctacccttcgtatcttcatacctcccgtaaaaatgcccgatctgtttgtctgacgtgagagtgaggctgcactacactacgctgcaactggggttgggctggccggagaataaatacagcaatacagaagatataaaaagaaggatcgaagaaggacatactctggcctgtattattgtcctaaaaacgctcattgatcaattgagcgcccgttgcctgtaaaactggagcaaccctgagaaagtagggcttgctagggctgcgggggagcccgttccccagcagccggttcgtcctagagaggtttgagcactcccttccagaggtaatcgaggtcagcaattccgtcaatcaggtgcagatgcaggagacagcaaatcaaggtcgctgcattagatgagctagatgagtgtgcattgtcttgtgctgtcttgtgctcggaagggtcggaactccgcacttcaccatgacggaacgccttctctttcgagttaatctcttaatctatttctccctaaacctaggcacccaagcacgctttgagctgacttggcctgttatcaagctggactccccaaccgattccccgcttgcttggctgtggggactgcagctgacgagccatgcaggcttctgcgactgttgttattattatgactatgattattattatttaaacatcggcaatccccccagttctctccaccctgttgcctacccaaacgagtcctctgactagagatatctctagatatccaagccttcagagaccatgcacggccttgtcgccgccctgctctgcgggctggctgtcgcagcgcccagctgcccagcgcccgcaccatcgctgggcacgctgcaaacgctcaagtacaactacctgagcgcccagaacaacggcacatcggcggtgctggtccacgaccagctcagcaacgctgctgcccagactcgctgcgctgccattggggagtcgctctaccccttcgcgtctgcgcccgccgccaaccgcactgagctggcgcatcagtttgactacctggtctatgcccaggacctgcgccgcgaccaagacgtctgggtggccggcgcagatgcaggaaaaggaggaaaaggaggagactgccaggcgtattcgcccagccagagagaggtcgtgtctgtcccctgcgaccgccgactgccggcgctgtgcactgccaatgtgcccccgactcgggatatcgaccggactgtcgtgccctcgtccaaggtcaccgtttcgaccgcgggttacacactgaccggcataccgcgatgcgcggtccttccggttcctcggcatcccgttcgccgacccccctgttggtgagctgcgtcttgcgcctccgcgggagtactctggccctaaacgcatcgacgccaccagactcggcgcctcatgtatccagtcggtctctggctttgcgcgtcgcgcgacatctccgaggactgcctgtacttgaacgtcttcacgccaatcgtgcccgagcggcccggcatagtgcgcaagcccgtcgcggtctacttctacggtggcgccttcaccagcggtaccgcgtcgatcatcgactacgacggcggcaatttcgccagtcgcaacgatctcgtcgtcgtcaccgtcaattaccgtctcggcgcgctcggctggctagccacgggtaacctgaccaccggcagctacggcacccgagaccagatcctcgccctccgctgggtgcaggcgaatatcgcagcttttggcggcgaccccagccacgtcaccatctttggccagtcggctggcggccagagcgtcgtcgccctgctctcctcgaccgccgcccgcggtctcttctccggcgccctcatccagtccgctcctgtcgaccttccctggtacacccggcaagtctacagtgaattggtcgtcccccacgtcgcgcaagctgtgggctgcggtaacgcgacgactgagtccgagtctgcgctgctccgctgcttgcgcagtctgccggcgacatccttcctcgacaactcgacggcctttgaagccgccacatcggcaatcgcaaccgacgtcgccgactcctacctgcatgtctcgcagctcctcgcctcgattgaaccctttatgcccatggtcgacgactccgactcggcttcgggcgtcatcgacaaccaattccaccgcttggtctcggaaaacactctccccaaccgcgtcccgaccttcttcacgacgacgccggacgaagcagccctgtacgtgaaccggctggtgcccgaactcggatcggcgcaatccggcctcaacaccctgctcggtcttgcttacccgccccccctcgcctctgcgctcatcaatgcaaccgcattccctacagacacaaagcagccagattctgtccgtatcgagggcgcctccgctcttacccacagtgaatggtcgtgtcctctcgcgcacctcctccgggtcgccgtcccgggcacatttccgaccctgtacagcgcacagatcactgacgggcatgcgcagagcaacggctcgacaccggatatttgcaagccgaacgccatctacaatgcgacctgccactcaaacgatgttctgccggcgtggggaacgctgaattccaagacgattgacgtactgccgtactacgggctcgctgacctgaaacacagtcagtttttgaatgatatctttggttcctttttcaggtcatatgacccgaatccggatcttgatatgctccgtctgcgcgggagcgcgtatgaacataccctcaatgtattcggagccgggtacaagatcgatgagtatactcctgccgaaaagaccgtgcctttgctgggacgccttcctggccggacggccaatccgggggttacggagcagtgtgacgttttcgaggcgtatgggtatacctttgagaacgccgtctttacggaggcttgattcactgaagagggaggttggtttggtgttttagagtcgtagggggctggatataatgaagtcatggtatatacatatacggtctgcgttagtagatatccaataatgcataaagagattaattgataccactccgtgcaaagtgtgcaggaatataggaccatattctgtatatttgttcataatctagcagaatccatgttgagagtcagggtcgttatcagtacctttgctgacttgatagggaggagtacaaagttttcttgtaggtcccagccagacttcgccatctcaacaaggggatatttgcgccacttcaccc

SEQ ID NO: 1835 - DNA, 2092 bp, Emericella nidulans
ttaatcagtctggtgtcagtggtaacaccggtagctttctgattggcggcctattacggtccaggaacgaactatacagaaaggttcacgaatttacgatctagccaagtaattggttgatgttgatgtgactagaaattcagatccagggaaccgagtcggagcgttggaaaacaacgacgctgcgcggatatacaaggtatgtaaatacttacacactttgtgcgttagactatattctagcacatccatatttcggttaaatgctaaccggcaaatgacccataccaagaaacaatgctgcgaaatcaggtaccttctatctagccgagccgtccggccagcgttttgaatattgatggatttgtccagatgctcggttttgtcatcttggggaacccggaggacgctgctccgccaaggccaagtgatcataccgtaccggcccccagcaatgctgttgcccctcgtgacagtgaagatttttggcggataaaccactgcatctgggctaaactgaaagttgggagagacggaaaaagcaatcagctgcggctattgatgttggatgaaggggtcgaaggctctagtaaggcttttggggtgctctagatggacattttccgcggcccgcggggcagctattccagttaaaatgttatctttggagcggagatgcgcctcgctgaagcatgtgcttggtcattgtctatggtaattgttgatctgaaggtgtaggttgagatagtggctttgcttttcgtacattcacggtatatcacctccggcggggtagctgtaccctgtgcagcgatgtcccagaataacgcccgccttagagtagccgctggtcatattgccacgaaaatggattaattgctaagccttactcaggctgactacggcttccgctgaccaacaggacacaaaggtcaggatcatctgttgagtgagtgctctctgttggtgaccggtgaagattgaacagcaccagttccagaagtgccccaccgcgacatcaccgtccccacctgccgtttcgatgctctcgagttcaacccctccatcctttttctgtacagttcccccacccgtcttctctttccatccttctcttctcctctccccttccttttccattgccctgctcttgctccaatccccccttttatttatatacccagacaaggcaggtttgattactagacagtacggtgttctacccatccggcactctgcaaagctctctgaccgcggctttcccctctcaacagataccgcaatcatgggttacaccgagcttgatcaattggccatcaacaccatccggcttcttgcggtatgcctcttcctgaactccctcttcttttagttctgtgttttgtggtgctcttcgtaatcaccacgcgccccctggagtttgcggagaatgaggtcacggaattgggagtcagacgctgccgccgataaactcaatccattgagccctcatcgcgttattgtttgtacactgttcgctgcgattactccgctccggggaccgagttgcacagtgtcattgataaaaagcgttggaatgacgttatactaacagcattccaggttgatgccaccgcaaaggcgaactccggtcaccccggtgcccctatgggcatggccccggtggcccacgttctcttcaacaagttcatgaagttcaaccccaagaaccccgaatgggctaaccgtgaccgatttgtcctctcgtatgaagcccatttctcttgcgagtacgatcttcgctaacgtgctcgctatagcaacggccacggctgcatgctccaatatgctctcctccaccttttcggatacggcatctccatggatgacctcaaggcgttccgtgtaagcaacaactctattcgttctcatactgatcattcaggccgttagttaatttatcaattcttatagcaactcgacagcattactcctggtcacccttgaggttacaacacaacccgtattgaggtgaccacttgttcccctcgggcaggggttatcccaacgctgttggtcttgccttttgcccaagctaacagtgggtgtgtct

SEQ ID NO: 1836 - DNA, 2523 bp, Emericella nidulans
cgcattcagaagtgcatcgagacttttggccgacacaacaccgacaagacgttgcccccgaagcctgcggctgtcccgccagagggagcgaccgttcatctgcaaaagactccccgagtcggtcccgacaccggctctcccgaagtgcaggtcgcaatccttaccgcaaagattctgaatttgtctagacacttggaaactactaacaaagacaagcacaacaagcgcaacttacggcttctcgttcacaagcgacagaagctactccgatatttgcgaaagaaggaaaggggtggtccaaggtggaagaatcttatggatacgctcgggttgtcagacgcttcgtggaaaggcgagattagcatgtaatggttcaagcgtttgtacattagttgtttctgaatctctctccaacaaagcgttggcttgtaactttacgatatttgacctctggcgtgttaggtctttcgacgctgcttctccgtctttcttgtatagatacaatttcaatcaactgccgtcactgagggtatgttacgtgtttcttggggaagctacgtggccagcaatatagacttcgaaggtatttctgtagctagctgagtctgaggtgctgcttcatctaagtttatcgtcctcaccctaaatccatgccaggcagttaaagctaattttgacctgcaccgaacaatactgttccagcctcgtcttccaatgcaggcagttggctagggcgtgatagcgcttacagaactaccaacctcctgatatgaatcatatctaggttcattccctaataacaaagacaggcaagaaagctacgtctatttctttctacacgtaaactgagccaattgggttgctgccagcctatcgccccgtcttattcgtatgctgccatgagtggacctccgtataattcatcctcagagccagcaatacgtctgatttcctcttggtagcccacaatggtgatgttagctgaaccgcaacgttcaaaatgagaagttaggaacaagagtgatcgactaatgctgtgactggacactgatggagggcctctccaggaatctaaacccggcttaatcgatgagcatccttatttcaaattaacacataagatgatgataaggtccttttccttacggacgaactactttgcactgacagcctatgaatctaccgaatgttttatgaagggtggagccggggccaaaacagatcataaagtgcagtactgaccgctttctgggtttgggttctgccggcatgtcacttgttcttggcacctccttccccaagttaattttccctcacaacttaatttccgcaacctcatctcatctgctttctaacacttcaacatctcatcctaccgaaggtgagtaaacttttgctagcaccagcagtctatgtcgcaaccatagaagattgtatcaggacctttgaggagtctttgtgtcctaaaattcttctctcattctatatcttccgcacgcgctccccgatcttcaggctccaaatctgccaagcaaatctctcaatgtacatttccccttcttagctaaagctcttgaatcgcaagtcggacctcgttttatcacagttactcttcattgactttctctgtcgcgatatttcacgaagtccttgtctaatcgcgcaaacacaaatatacagtcagaatgcgtacccgttctcagccagattcacctggtggcttcgtctccctcgatgacaataaacgcgctactcgtcgtactaccagatcaacgaggtctgcttccagagctgtttcccaggaacctacttctgaacagcctgccgagcctacaacacaaccagcgactcggtcaaaaacccaggcacgcactaccaagaagaccactacgaaaaaagccacctcgactacatcaactgcaaagcctcaaactcgcaaaggtgcgaggcgtggaacgcgaagtgccactcgaagggcggacacaatgcgaccgaagaagtgcaagagagtgttgaaaagaacactcatgacactgtgcgaacggataataaggaaaatgttgatgtcaacactggagaccttgagtctcgcccacttgcgtcggattcggctttaatggaacctaagaattcagagcgtgagtaccacacctatcattgtttgtcagctttttatgtcatcgtaaatttctttcccctcttctttcatctcccttttactctcaaaggagtcacaggaatccagagattcccagtcccaaaatgtccgagtgctgcaggatgccgaaggaccacaggtgtacgcggatatcaagttgaccgtgaaccgatatatgccgacttctccgcgccggtcatcaagggtcagatcgatagaccatttggtaccccaagccccaagggacttaccggtcttcgtcaagtacttcgcttaatcccatcccggaaggagatgactttgaccatcctgcgagcgccaatattggactaaacaaatattgccctctcaggccaccctatctc

SEQ ID NO: 1837 - DNA, 3464 bp, Emericella nidulans
agcgcgcccaaaatcagctgttctcgcatctgccgggaagtttgaagatccaaaaagtcacattcggaactcttcctctatatctcacacctcgctagcaccattcggccggaatgcgaaccgccaaaggtcgaattctctgagaaacgatgtcacgtccggtacatttgcgccggagttcatcaaatcagaggatctccgccacggcgctgaccagattcgtggacaagaaggggacaatgacttctcgggaaataaatacgtctggttacgtgatcccgagaaggcctttgtcaaagggttagttttagaagagcaagatggagctcgattactggtacagacggatgatgggcaggtatgagcaaccggtgctaaggtcatccgcatacttacaatctgcaagcaacgagaagtggacgtcgaccaagttgatagagtcaatccggcaaagttcgacaaggcagatgatatggctgagcttacacatttgaacgaagcgtccgtggtgcataacctccacactcgatatctggcagatttgatttatgtaaggctttatctttcttccgcttgttgccaaagcctgattgacaatacgttactagacctactcagggctgtttttggtgacagtcaacccttactgtcccctgcctatctattccaatgagtacattaatatgtacaagggacaaagtcgcgaggagactcggccgcatattttcgccatggccgatgaagcatttaggaatcttgtggaagagggcgagaatcagagtatccttgtgacgtgagtctttgcgacgcatccgtgtaaatgcaaattctgacgcccgcacagaggagagtctggggcaggcaagacagataacaccaaaaaagttatccagtaccttgcagccgttgcaacatcagataatatgtactctcgctcaggaagcaagcagatgaacaccctttcgcagcagattttgagggcgaacccgatcctcgaggcatttggtaattcgcagactgtcagaaacaacaactcatctcggttcggcaagttcatcagaattgagttttctcgatcagggcagatttcaggtgcttcgatcgattggtatcttttggagaaatcccgcgtggtgaaacccaatttgcaggagagaaactaccacattttttaccaactactcaggggtgccgagcctaaactaaagcaaaagctgcttctgtcgaacttacagatcgaggacttcgcttacaccagagaagggaacgatacaattgctggagtttctgacgaaaaagaatgggactcgttgctcgaggctttccatatcatgaatttctcggaagaggatcaaatgtgcatccttcgcacagttgcagctgtcctccatctaggaaacattaccatcgtgaaagaaagtctacgggctgatcaagccgcccttagtcgagacgcccttgatagtgttcataaagcatgccagcttttgggaattgagactgagccctttgtcaagggcttattacatcccaaggtaaaggcaggccgcgagtgggtagagaaggtacagactccggagcaggttcggctggcattagatgctttagcaaagggtatctacgaaagaggttttggtgaccttgtcaaccgcatcaacagccgactggaacgaaacactgtcacgggtgaagacagctacttcatcggtgtacttgatatcgctggttttgagatcttccaaaacaacagctttgaacaactctgcatcaactacacaaacgaaaagctgcagcagttcttcaaccaccatatgtttgtcttggagcaggaggaatacgcgcgggaacaaattgaatggcagttcatcgactttggcaaagatttgcagccaacaattgacctcatcgaagtcacaaaccctatcggtattttttcttgcctggatgaggactgcgtcatgcccaaagccacggataaatcgttcaccgagaagcttcattcgctatgggacaccaagtccaccaagtatcgcgcctctcgcctccgacaaggctttatcctcacccactatgcagccgaggtggagtattccactgacggttggttggaaaagaataaagaccccttgaacgataacataaccagactgctcgcatcctcgcaagataatcatattgcagctctgttttcagactgtggaaacgcagatgaggttgaccatcccagaagtcgcgtgaagaaaggcttgtttcgcacagtggcccaaagacataaggaacagttgtcaagtctcatgaatcagcttcactcaactcaccctcattttgttcggtgcattatcccgaaccacaaaaaacgcccgaagatgttgaatgcccccttggttcttgaccaattacgctgcaatggtgtcctggaaggtattagaattgcgcgtaccgggttccccaaccgattgtcctttaatgaattccgccaacggtatgaggttctttgccgggatatgcccaaaagctatatggatggacagtctgccgcccggataatgctgcagaagctggctctagataaagcgtggtttagagtcggccgcaccaaagtgtttttccgagctggcgtcctcgcagagttggaggaaaaacgtgacgagctcatccgtacaatcatgacacgattccagtctgtagcgaggggttttgttcagcgcaggatctcaaacaaaaggctgtatcgtgcagaagcaacccatatcatccagcacaacttccgagcctatttggagatgaaggccaacccgtggtggcgtttgttctcgagaatgaaaccgcttcttggggagacacgtactgctcaagaagtgaagagaagagatgaaaagatcaaacaactcgagacgaaaatgaagcaggaccaatccgaacgccagaaagttgaggaagaaagacggcgagcggagatagagatacaacgaatccagcagaccctggagagcgaacgggcattggcccttgacaaagaagaaatcttcaaaaggctgcaagatcgcgaggtagagctcagcgagaaactagcaggcgctattgccgaccaagaaaacctcgaagatcaactagacgaactaatccttgcgaaaaagaagacggacgaagagctcgacctgcgaaaaacacaactcgagcaggccggagagattatccagcgcctagaggctgagaggaaggagatgcagcagaagttggaggatctggagcagaagctgcttgaggcacagagcagtgcctcagagacggaaaaccatatgagggagcttggacaagaggtcaaaatgctgcaaagtcatctcagtctgaaggagcggaaactgcaggatttggaggcaaaactgctgaagaccgaccaagatctggatgtcaagctggcaaaaacatcaaaggaattggaccgatcgaagaaagaagtcaag

SEQ ID NO: 1838 - DNA, 1993 bp, Emericella nidulans
ggtgccgcgggagaggtaaggccgttgcgggatgtagaagatgtcttcaaagcgaggcttcttcacgcggccgccgtagacgggccagagcgcctagaattcggaaaagagaggatttgccgcagccgttagggccgacaatgaggaggtggtcgcctgggtggacggtaaatgtgagtttgcgaacaaggacgtcaccattgggggaaacgatggggacatcggtgaattcgattgcgtcgctttcttcaacgatgccgcggccggagagtacggcagcgttttcttctgttgaggcggaggacacaagtttcttttcgaagcgtccggctaggaggtcgtccatcacatcaagcagggatgatacacgggctgtgaaacctgctagctcggagatttccttgtaggagaacattagacggccgaaggcgtctgatgaggagagtaacattcgtctattagtgacaaaacctgtttcacgcattagttcctattcgagtacggttattcaaccgaaaagcaataaggtctcactttctgtacggtcacccattgtctgggtgacttgatcagagattctaaagaaaaccgggacactgcacagaatcaaacccagagcgccccagaagtacttgataacgaaatcctccataaatccgtggtataggcgcctacgcaggattcgattcacatgcttaatgagggtgaaatagcccttgtccaaggtgtccttctcagcttcgtggccatgatatagagcaatttcttcacagtagtcgattaacctcgaatggagaaatctgaactcgccttccaggcgagcttcgtcggcaacgtatttaccgaacggcggcgtcaatgcgcgcatgacgttggcagatagttgaaccaagagactcataataaagagaccttcacctccaacactcttcgaaagcgagtaattgtagatcatcatgtcaagtattggcttggccagattagagtaaagttccgccaagctatcagagaatcgggatacgtccactgtaatgagttgatcagggttcttgactcggtcgtccaaggccgatatcgcatagaaggtcatgtttgataggtatttgtcgtgaatgtgatcggtaaggcgcttgcggtagctgagtgcaagcttgcactgatgataagacaactatttcggggggaaacatgttagctacgttctgttccgacagcaattagtttaaccctgaatgtgcatgatgctcaccatagagtttgtgaacgtcgcaggcaccgcaacaatcatccaccacaccagtcccagcagaaagtcctttccctttcctcgcaccagattgctgacaagccgaccgtttagctcagcaacgtacagactgaggagcgtccgcagcaccaaaaagacactatggcttatcaacaagcgtaactctttactccgccagcccggtatcacgatcttgagcagacgtgccaagttccggaagaattcacgattaacgcccaccttcttccgtggtttgtcgccgccatcgccgagactgctggttcctggtttcctccgcagatccacctgacgctgaaacgccgccttttgctccgatatagcattatgaatacgctttgcgagggcagcaaatagcgcgagatagactgcgcgagaaatatttgtgcggtggcggaggtacaatgatgccaggctggagagaatctgtcggacggaacgttccctagggagtttcgactgagcagccatagtgacggaaatggccactcacgcaaggataaaaatgactttatccggaatcaacgtaaggcaacatgaccagcggcgatacttctttgaggaaagtgatgatattgttggatgttgcttgaagaatggtgagatagctgaagtgccccatgcatgtgaacgcggccaaaacactccgcaaaactggggatggagccgaggtcgggccagggtcgagttcgcccatatatcacccac

SEQ ID NO: 1839 - DNA, 3638 bp, Emericella nidulans
ccggtatcatcgcgcttcatattcctatggtgtggactggattccaaaaaatgtcatgctcaaaatcggttaggctgctgagaaggaggtgtatttattcgacgtttcttatgaattgattaaattctgctggcatgagaagacaagcaatgatatccatgggccgtttatggaggatgtttaggtggaagaagagcagggcgccggcatttgcttcctagctcctggtattaatggaactcctaatataccaggtacagggtcagcgacgcaattggaaattttctgaaggatgatggcctaggcacgcctggccggatatgtgagacttgtatcaaagacacaggcaagaggaaggatattcccaagtctgttgccatcgccaaacaaattgaccaccctcagaagtcttttctcgttcagccacagcctagcggcactaagccggtgggcagagggctcataaaacagcggtaccttaggttcctgttaagaagcagtatttaagagcccgaacaacaagtgtcaagtatcagttgtacttcatcatcgttactcataacgaaaagcgattttcgatgccaacgacaatgcaatgcgtgggcggtcatggagctcacgggcagatgggcccaagtcaatgatggatgcacttcaacggatctggcgctacctgactattaactacgattacaactacagcccttgttgcctgcttacaggcagcttctgcttaatgagcacgcccagccccaatgctatgatgggtgtcactttgcatcaagaattcaaattgaacccgttggtgtgataaagaggtatgataagcatctagagcatcgagacgacgtcacagctgatcgaattagaagtaaaggaaatactcaccatgcccaaaacaaagttaacatcgcttctggaggaaacggctaaggagtacgagggcaaggcttgtattgcccacaccaagaaacaaaagcttggtccctgtagctcccgggtatggagatataaagtgaatttaacggatgtaaagcctatgtccaacgatagagcagtagtgcttttgcgcatatcgttagttcgtatttcattttgtataggagcgataaatatatattctgcaggctgagatttatgtacttgatgtgccgttcatataaccacagtatattacaccatgtaggctccaggaacgagcttctaattggtcaagtcagaataccatagccccgcgccgtgtctttatcacaatcgccccgctctggttttctgttctcaattccaggacaattacagccagattctcctcagactttgtattgacagtaagtaccggccctatttcctgatcctctgcagctgttcaaaatatattctatcaagtcataatactacaattggctcgcagagaattctggaattcgagatgtgcttccactggctccccgcacctcacaactgccatatcattccatctgtttccattactctttcctgtattcctacaaactgaccgcggtccagaaatatccttagatcctatacatctgggctctagtcgtacggttgttgctaattcctgcccatctaatccgccctctcgaatctccgaacctccgccctacgcgtccgtctgagagtcggcaacgatacctgataaacatacaacatgtccttccaaccaacaccgactgacatccccgtcgcaattacaaccccatttacatcttccccctccgacgaaccccgcctgcattcagaacgccgcataactccaacatggaccgtccagcaggtcaaggcaaagttggagaccatgactggcataccaccaagcagccaaaagctccgtctcaagacacccggccgtgcagaacattgggttgatggcgatgacacaataattggggagtgggggttgacgcggggatgtgagattgaggtacagttcatcaaaagaacaagaaaggtgatttggtattaactgatgcctggataggtccatgatacacggccccaagcggcacgagtgaatttcaccgacctctcatccgtggagaagtacgtccttccaacagagacatacgaaagcctgccgaattcggtccttgcgtggaagaagagccagaagctggggcggtttgatccgaacgcgctttcgccagttgaagcgatggctgagcaagcgaggaaggataaggaggaggtcgagaaacgtggtaagtatcctttgttcgcttatcaccaaacctgtgtggtgaacgatgagaatctggtggatggcgggtgctgttaatgacactctgcagacatctccgtttcaaaacgagcaatcattctcccttcttcaccaccccatgtccgccgtggcacgatccgcttcgttggccccgtcccggcaatcccagttcccggtgttgacatagagaccgtggacaccccagcactgcccatctgggtcgggattgaactcgacgagccaacagggaagaacgacgggagtgtcaatgggaaacggtactttatgtgcccaaatcggtgcggagtctttgtgaaaccggagaaggtgcaggtgggggattttccgccgcttgggctggatgatgagttggacgaggacatggaggagatctaaactagagcaaaattggggtattatataaaagtatgctaatcgactcaaatgtcgggtgagcccggtgttcctcgttctggctcaaagagaaatgttggaaaggtaataaaattgatagatggatacaacaacaccgtaccagggtaacatgagggcatcgctaaaaccaaaacagtcggaacagtgtcgaagctacaccaacaagatgagaaacgttggaaattggtaacgtaacggtatgcaaaaaggtgagttgtaaagtcgctggaaccggatcgggataatagaacacttaaggtgatgttgccttttcaactcaagcagcgggcttctgcttccccttaggcctgcctttaccggctgtagccttctgtggcctggaacgtgctggaggggtgtttgattcgccgtcaagcgcatcggttttagacgcagaaccaggagcatcatctccctccgccgtgctagggacacagccctgggtgaagaacaatcgagcatctttgttgtatgtgtttgcgaagctatagtagttacctattatgggtaagcggtgcaaaatgagtggtatgggttgcgattgtctaatactgaccacggggaacctgaaagacgcatcccttgccagcactaaattggacgcctgagatgtccactagaactcgcccgttgacaacgtagaatatcatatgcattttcttcgcgttctttggcttcttgactccgccggggggtagttcaacgatgcctgagccgatgaatggtgaactcagaagcttggcgaacctgaatgatgcgcccttgacatctcgagtctcgataccagacggggcgtacgcgatatctgtacggcgtcaggttcgtcgattattgatgaaggtttggtgtacatacctaaaacttcctcctcgtctagagctgtctgtgtctcattgtcccattttctgatataaccatgtaaaacgcctcccttctcctcgtaaggatctcggtattggtc

SEQ ID NO: 1840 - DNA, 2432 bp, Emericella nidulans
caatactccataatctcgtgaaaaaggtcttcatgcaccaagggctagacatctccttgcgccaaataatgttctattttattttagatcgcaccagtgtactaaactatcttgtcattctaccaggaaatatatcatgtaagcaaggatccatcgcaactcacttttcggctaggccgaagctccaatagctggaagtactttttttttacaatactcctcaataagatcatctagaacattgcaaacttccatcagcaatcagcactaccatagcctgtccagcaaagttagggctaggctacagcattctcctcctagctactcaaccctcgaaaataccactccgtcccccgtcatggacaatctcgacgactctggatgcgattcttggattttgctgatatgggggcaagttcctgttagagggaaggcttgacatctgcctcagagccaccccgtatgatagagtcaggaagggccctcttcaagatttagaggagctggatctacgaaaattataacattctttcgtcccttttgaagtcggtgatagcgatcccttagaacctgattcagagaagtgcttcgttgaatactgaacggcgcaagctagggaaaagatgtccaaggtggtacggagtgtgaggtctactcgaaggtgaaggcaagagtgaggccatgatgccaagctcacacttctttatgtcgtggcagactttctgcacttgagcagcggctgtcatcccttgtctgcggtcaattcctcggctcctaaatcccataaatctggcccctctgactaccagatatcccagtgggccagtgttcgacacgagacgccgttcaggcacaatccgaagctgcctctagagtagagggaagatagattagacagagaacaagttcctgtgtcataaggatctcccattctctccaggatgtcaaacatccatggataatccagttccttgagcactcagtgtcctcttctccaagctcagcaagctcttgagaagaccgtgaacatcgccattgcgtatcaaacgccgccacagcagcagtcctaaatgcctatcaacgaaccttgcaggcctccacgcgtcttagtatggtttctcgagataccgggccgatcctcttgttgggcgggacacagctgacccggcatgtagaatctagaaaccggccaagatttaagctgatcaaagcatcatatataaaatcgaagcttcccatgcctatttcatacgcctggcattagcgggtgacggtctcagacgttcgacttttagttcacgttatcgagaggagacgagtaatatagtggacgtccgtaaagagcccatagcgacaggtttgctgtaaaatatgattaattgccacacgaaaccaaagctctagagatgatggattggctgacgggctattcgcttgagcgtagattatgagatggcatttggtgagtgattgagggtaatgtggagggtcgagtgtcaagtgtcaggctcgagtattgtgccaagctccacagcccaagcttgatctgctggagcttctccaacttgtcccctgactgctttttgtttaatgctcagtccacgatgtcgacgacgagattgcctaacatcccgtctcttcgcaaataccaactgatccaggagcagtaagttttggctgcagaatcaagataaaatagtatctcattgttatcagtgcaagcctgaaacatgcagctccccctggggtctatgtcagcctcagtcctggtgacccctctctctggtcctgcgtgatcttcgtccgctccggtaagctacacttattgcgattgaagatgcctctaatgatctcgtttgcaggcccttacgcttccgccatcctccgattccggatacgcttccccccgtcctatcctgatcgcccaccgctcgtgacattcgctacggacgtcttccatcccctcattgtacccctcaccacatatactttcagcactggcgtatcaaatgaagaccctgtcagcgcaacggatgaagagcggttgcccccgggaggcttcagtcttagacacgcatttccccattggtttggaagggggagacatgctccctcatcgaggactgtgagtctcaatggctcgaataaagggggtgcagaggtaaacctccacaaagatcctacgcaagagacttcagcgccaaatccagatgagagcgagggcggggaacaagacgacaaagaaggggaaggagaagaacggacatctgttgatattgctccagcagaagctccaaaaatgaggatatcagtcccggttctagagattctagattacatccgaacttcgttcgatgatgaggctgtccttgattctgtgccgctcgaggctgctgggaaccaagtgcatggcacgcatggagagctcaccg

SEQ ID NO: 1841 - DNA, 4627 bp, Emericella nidulans
attaggaactcatcctgctggagtttcaccctgccctatatcatcttggcatacaaaacacccgtttttactacccgggttccatgggcagaatcttgaccgtgcttgctcgaactctaaggacgcagtcaaggcgaggcacagatggaagagttgcaaacgccggcctcataaatggcatacaaatgctgaatcttgtatcttgaacaaaaataatagaatctctatatgacggcatcttttctttctggttacgtagattgtttatataccgcacagcagtagctctccccgttccttcttcctcctcacatggagctaagcactgacaagtcgacgaatcgatgtatgtgttttggaaccggagagtacaccgcttagaagaatgccgtatactcaacggtaaggataaagcggaacggaagccagaactaggactatgtagtcgcgtccgcctggttacagcgatggccgcccgaaagcaggagttttttcctcaaaggagcctgcgtaactgtaacagtggcttcatctcaaagggagacgacgctgatgaggccgatgcggacatattgcaggcaagccgttcgacgatgcagtctcttgcgaaacgtgcgaattcgtcttgctgtagtagacgcggtggcatacagtagctgggctgtgtctgcctcatgaatgcatctacacaagattgtgcacagcctcattctgcgttcaggaagactcctgtctcttcagtaagaaaagacgtgatgtggagtatgtcagcgccacgcttcattcctcgacctcgtactcttccatctcaaccttaaagtattcagcgacctgagtcttttcagcagccgcgtattcagaatcgacaataaaccgcactgctgcgtcccggcctttttctcctggctttgggcgctctccgttggcagtaactggaatgagagggtgatgaagagccccagtcgtcggtgctcctttttccgtctttgagctgttggttgctggtcccttgcgcgagtcctttgtgagtttgtcttcatcaatcgagttggtgtaccgcgggagattctgttcttctgcctctttgttcaatggaatgcgtacggtgaggaagcggtcagcgggaaaatgagggccgacggtcgtagcactgcggttgtgtgtgtatagctcgaggaggtcaagtagagtttctaaatccattagtcctctgatggcttctttgtggcttcgacgtacccataacctcctcccggcttgttctccatctcgcgtagtctgtcccaagctcaacctccttgattcgttgttccagtaagcgtccggcgagctccaggcagctgaaagccatcgtagatgtcgtctgcttgagcggcgcaaaggtgcgatagaggtcttgcgagatgcggtaggctacgttcgagacttctgattgaggtgtaagtctatactgtcttgccagctttatgagagttttttgtggatgccgcgttcgaaaatcgaaaccggaactctcgagcatgagtctctcgaggccgatgatgcctcgggcgggttcgtcgagtatctattagacccgatgtcagcattcagtcgcaaggcattgttggaacaagcaccatacctgattatctgaagagatgtgttctgattgcggtaacttgagattatacgccgcgcatagaatctcacgcgactttttgagcgtgtcttcgatcttgcaggccataaacagggcagccgcggcagcatccttaaccgttagactcggtcaacaaaacgagaatgtcagaaaccttaccatattattgtagtccgtgtcgtggtgtatcagccggaacttgtgataatataccactgcagtattgaatgttcgaatcggcctatctcattagcaagcaactttcacagttaatggagtgatccacatacagattcagcgcccgacgaacattatcgatccaggtcacgccctgcagacgtagagactcctcacgcagaggattgacgcccattgcggccaggcattgctggatggtctgctcgaagatatacggctttgctacctggatgaaggacgggtgaattggcggaggatcaggcagggccacgtcggagccgggagcagtcctcgagtctcgctgctgttcaggagccattctggagccgagcttgaaaatttcctccagaaaggttccgcttgatgatttgcggactgcgggattgctatctggaacatcaagcagctgctgccacgtgacggtgaaacgtttttccgagccggctatactagcaataggtgagcgagaactaatagatgagatggtgatctagatatgaaaagatgtaatttgtatttgcttaatctcgtaaattatgtataaataggtgatggtggaatattatcaccacaggctcaggggaactatatacttcgctcagccatacttcttgagcagcctctccatgattgatacagcaccagatcgatatccagacccaaagatcgcatggtgattaagatggtgatacctatggatgttaggctggaagcaagtgggaggtcaaggcaacttacagttcatacagcctgacccgatcctcatactcctcaaccggctctgtcttcggcacgatcttatgatactcattgaagaaagccgacccgaatcccccaaacatcttcatgatccccaactcatactcactgtgcgcataacaagccgacgggtcgtagaccacatcaccaaccacctcgtcctctttccgcccactccctacaatgcggccgcggctggcattcccactccagagatccccatggacaacaacaggagtaattccctgcccttttccagacgtatcgtacccgagatgtccatcccccaaaagcgccgggacaacaatgtctgctgtcttctcaactaaactcctcaatccataatctttcccatttcgcttttcggacgtcgccaagattgtcaagagccgctcatttgcataaaattccgcccacgactcacacgatcgattcggctgttttgtgtccccgcaaaacgtcggcacggggaatccaaacagccgctttcccgtcttcgggtcaatcggggcgggcgtcgaatggagctttcccagcctctgtgcaagagatggaccaccatgaccagcagctcggagatcgaggaactcagtcgcgaggaagtagctctttccaggcttgccgccctcttcaagagggccccaagctatggcgcggggacagaaacccggcacggcggacgagatagcgttcagggattcgtattcgcctagaaacatctccttcgcggcttcgccgtcggcagaagtcttgacgaagtacttgcgctcttcattctggccgtctgtgcctgggacggtcgctctgactacgcctgtgctggtgaagccggagcctaggccggctgtgctgagtgtagctttggaggggttgggaatggatagggcgcggagaattgaggctggtacttcggacattatgatagtataagatttggtcgtagtagcataaatttcgagagtgtgagatggatatggagaactaacgactcagggtacctgaatgatggtgtggtcctatgacgttattttaaactcttatcgataaggtatttctatggttgtggcctgctgaatagtgccaataggaaagttacggcctaaaagtatatcaaatacaagcacagtgatggagtccaagatattttgtacaccataagtggttcatttccagcatcaaacccggcaccaaccaggcagagacaaggaatgggctaatttacaagcaacgctaagagtgtgtcaacgagtttaccaagtgcagtgccgtcttcgttcgctcgcgaacgtcaaggtccgggtcatgttcaaggctagccagtcgatctagtaccccaattgaacgtagctcgagtgcgcgtttccggcaaccctctcgatcgtgaacatcatcctcatatgtgaggttaattaccacccacacgcaattggcacggacgtctcggtggctgtggttaaagtaacccatcaaataacgaatgagatcgcggtgtgagactatgagctgccggtaccatggaaggcttgcagcgaggtggatgataacgaacgttactgcgaccaaaatctcagtggggacctgaagcgcgcgatggtttggggactctcgccgatgaggcagctggatagaccttgggcgcagtttatcggccaaggtatccagcagcaaatcctggccgagttccttgaagagatagtcaatcatttccgatgcaccaggcccacatatgacatttcttagaagatcaaaggtttgctcttgcgccgcaatgtcatcctgacgggcttgtgtggtttggtcaagatcgccatgcaaagcgagcttacgtcgtctagtggcgtctggaaagaacatatctagactgactttggatgatggcacaggatcggtcattttcatgtcctcatccctctcccggaagtcatccatcggattcagcaagtctacccgttcgccagctgaattggcccgactcatcccgcttggagtgttactgtctgtatcgtccgcagtctccgcttattagaa

SEQ ID NO: 1842 - DNA, 2134 bp, Emericella nidulans
ctggatggaggccaagtgaaaagacagcgaagcgacgatgcaggtggccctcggacaactcagagcagtggacgtgtcgcgggttcgcatgcagttagatggtgtaagactgggaaggcgacaggaggccaggcgggatcagcggggaaataacggagcaaatcagtgtcagagcttccaggtcgcgggccaggttaagagattagaggaggactggctcttgctcttgtggtggacggaacgctggattaactctggctggactggaacgggacttggagaggggaaagatcacgttatgcgtgactaatcaaagcagagaacctaatctggctgtggctggtacgatgtctcaagatgcaaagcaccgccacatgaggctgggctgccacggcgattgctgacaaggtgaggtggacgatggaacgataaaacctggagggtcgggctagggtcccaaggtttgcttctgcagaagggcagagtcagtgagccacagatgtccagaagaacaacctgccgcagacgggaccgatctgtgggtacaggcgacgggggtgggtgtgaccaacgggcaaacctgagtgtagttctagagtagttggtccggggggtatgcgccgtacgcaaagcaggatggggattagtgggtggaggggcacaaagtccggaggaatgacgaggagtggagacgaaggttggagatagatgagcggtgcaccagacaaagcgaggccacgacgctgtagatttgacgaagagttgaaggattcgttgttgagggggacttggtcacacaggataagtcggccaggccgggctgtttgattggctgtggctatgcatcatttgtaagctgcacagttcacatccataacttagaacttggaaaacacactcagtggcagaatccgatacgactactgtacctacgcccatgaccgtcggttagcgcggcgcggagtttctcttccgcttctagtcaggctaactgctagcaaggtcggactcgagacctgacgaaacaggactctgcaagcgcggtaatggcggcctcgatcagcaacctgtgaattgggcagcgagcgaaagaaaaagcgaaaaagaaaggaaaatgaaagaaagcagccgatgataacgaagaaacaggcgaagagtttaaacgggagaagcagcaaaagggaatgatcaggctggcatgctgtgatggagagcctcgtccgcgatcgatcctggtcatagcacactggcagtagacggagagaactcggaggagcggccaacgcgaaggatgaataaaacgggcagtcggctgggcttttcgagtaccattttctagatcctttactactgtgactatgaccgtgaccgtgatatcgagtcaattcgagttcagaatgctacagcctacgctacgataagcgccagttgatcacgatcaaagttcatgctgaccacgagcgatgatcagatcccctaacgtcgaagcatcctttttccgaagttggacgacatcttccaagcaggaaatgatcaacaatccatcaaagctgcggaggatctaggatccttttgcgaagaacaagcaagtaatatcatggaagcgcctcgtctgcttccccattgtttagcagtcttgaagagcgccaatcgcgttatctcgcacgaccactgcttgtcgactgccagctgagcatccctagtggctaacccagtggcgaaagactcccctaatgcatgacaggatgcaaggatctattgagttgattctaggcttgcaggcgctgcaggctagccttgatgctgtagattacggcgcggcgcttccgtggcatagcatgttggatttagcagcgcacgggctgacgaggccaccctggacatgacgccccaatgcctcaagaggatcggacgcactcccattgaccgcatggtcgtagctatttgagctgataagcttcactccttgctcttccctcagactatacgaagtcgaagtataccagcgacaggaactactataagccatacattccataccgctccgtagcatgaatctacagtactatatatactttgttattggcgttgtggttgactcccaaaaaaaaaataattagaaaaacagccaaaa

SEQ ID NO: 1843 - DNA, 2963 bp, Emericella nidulans
cccttgtttcaacttctcagctgcgaatcaaagatccatcaatacgagcaaccaaaatgaacgtcaacaaaagattttaccgcttcaaacagtgggctggggaaagaatgggcggcgaggtcaagaccaatgtctctgatgactttaaagccttggaaacggaaatgagcgtgcgccacgaaggtaagcgaatgctggaccgattttgcttgtttaccttatgctgaaattccgcgtggtttgaaggtatcgaccgtatccacaagtccatgaccgcctacgtcaaatctatttccaagcgcagtgaaggggacgacaaagagaaaacattgccaattgcacacctgggtggtagcatgattactcacggagaggactatgaagtgaactctgaatatggacgatgtcttaccagtaagttgaatgtttgtgcgagcccaaatcaatccggaagtctgactttgttccagtgttcggaagggcagaggagcgtcttgcttggattcaagagtcttacaatcgcccaagcgacctcgggctggctggagtcgttggagcgatctcttactcaattgaaagataccaagtatgacgaaccttctggtttgatttagggccttatcttgtctaaccggttctagacattcccgaagaggttggacacttgacgtcttgcgtatgatacttcttctatcaaagaagcagaaagcaaagagggaggattctcgcgtggaggaagagctgcggacacagaaggtcaaatatgaagaagctaacgatgatgtgtatcgccggatgcttgacataaaaaattccgagccagagaatgttatggatctgcaggccttcttgaatgcccaattgaattatcatgagcaatgccgggaagtgcttctccgactaaagaacgagtggcctgctgagtgagtttcacctgtgcacaattgagttgaggggttctctcggactaatagggctaggcaaaatgcaagtcaaccatcaactggtcacaacgggagtcgttctcgatcaaacacggcccattcgtaccatgaccgctttgaacccctgcacgaagaacatagcaatggtgttgaggcacgaccggccattaaatctaacacgcacagttttgccgagtcacctatcagaaaagcctacacgcaagagacttcacctcatcgacctgtcctgaaccgcacctcgacatttgagggctcttcaccattgcgacaggtccatgagcatccggttgccgcccaaattgcgacgcgaacgaatagcgaaaacctcattacgaggaggaacagcgtacaggctcgtccgattagcagggtggtaccggaaccaacggaggacgctggatatcacagtgggagcgtgtctgatcgttcagacaacagctggactgaatcccgccaaacgccatttggcagcaccgtttcaagaagaactagctccagcaccctgaacggattcccgcacaagaaagcccctccgccaccaccaccctcgcgcgcaaagaagcctgcacctccacctccaatgaagcgccccgtgctcagtgcagcccaggtatgaggagtttaataggaaatttatctaggagtacggcgggactgggagttatgtaggacggggatagggcttgtacagttgaactgcgttgtggctatcttttctccgcaatcacctcgcgggcgagcttttgaaggcggatcattgcgggctaccgacgaggttgcttgtgttttgatattacatactattgttaattgctgcttaattcagtgctgtcgttcatttcccatcggatgaattaaattatgcgaaatgtaggcagtacgcacgcagtatggcccaagagttcattactgtagatccacgatttggagtaaacggctaatcccggcaacgccctagctaatggccacctcctactattccggaagcggttaatcgactgagtcagcacgcgctcgtgcacgtgacggcaaggacggcaaacttcttccaactcctcttccccaacaggccctgggtgagcaccgccgaccagcacggaaagtcgcgaaagccccgtccctccatcgccattccatcaagacaggctttccacgcgctttcttcaacatccaccctccttttggggcctttatccccgccccaacatcgcttttacctccccctcctccccttcttgctgattctccttttgatcgcctaccgccctgtgccctccgaccagtctaaacatcacgaatcctatcgccaaggtcctgatacaggtcgctacttgtcgcatccatcgacaagacacatctagggccttggactttcgtgattttgcgcgtcttgtcgccttatcatcgcgaattgtcaattacccttacgaatttcctttccacgtgtttcgctttctccctgacttcaagtgtcgcataaaacccggcgccaacgtgtctcttatatttatgaatagacaataaacgcgctcgatcatgacgtccctccagacacccccaaataatgtggccccggcaaatatgagcctaccggcaaatttgacgccgcagcacatacaagaaacccttcaggtatagtgttgctgttttcttatatgttcatggtctacctcatgctcttgtcctccttgccaattgaacttagctcctcttttatttgctgcttaacctaaaagttccccctcctgtttagtcgctctattctaattcatcacagaaattcaagcagatgcaggaacaaggtgttcgtcaagatgaccccgaatatctaaaggcacacaatctcctctctgctgttcagcggcaacaagcttttcagaagcagcgacaattagcacagcagcagcagcaactccaggctcagcgccaacagcaacaaaatggttcttccacccaagaggccgtggcgccgaatggagtcaacagtaagactttcgc

SEQ ID NO: 1844 - DNA, 2416 bp, Emericella nidulans
gtcctcgtggtgcagtcacactgaagtctcgacggccgcggcatgtcaggtgtccggttatcgaaggtatgaacaaagcgagaaagttattgttgatgagagaggtcgtgaacacaaaaccggacatggtatttattagaataaggagaaataaggagatcggaaggattgttgcgctaaatcaagtctatggaaatgatatctcaggaaataatggcttatgaacccaggacccaagcaacaccgatcgctatgaagcacgcactaaacccgcacgcagaaccctaatctcattaaccagtctcagtttgtgtcaatggagctatatagctgattcagggactgatcctggaaagcagggacaagaatgtccatctctagcgacggagcattgcgaagaggaggatggctctctaaccgtctccatggacacagttcacgacaattgtccagatccactaaagcttctgcaggatggattctctgcgcagcccatattgcatccggtataggcgaggggggtccaaggcacctctcggtccagaatgtgtaggtcgccgtgccggctgcttcatctatccgaggctgttttcgtggacatcttagaagagtgttgcaagagctgcagaccgagattcgccgacatgaagagcagtaattctcgttcggctggcaaagcgcggtatggcagacgccggagagccatagatccaccgagcgatgtgcacatccaaagcgagcggtcatataattctcctcaccaagctggcccgcgactgttgtcaagtggtattcggttctgattttcagctggtcatcaccgtccagctcagggtagatttcaactcgaatttgagtaggtccatattccacagagcacgagtgccagcagaagcgctcttccacaccaccgaattgtgacgtcaggagtggcagagccttctgtcgtatcttcaagatttcaatgagctccagcttgtcgcggaaagtcaacttcttgcaagggcataggtcaaccacaccggcaagatcacctagtatgcacatccgcgtctcggcattgcgcctcaattgtcggggggggaaagcagattgcgagtgtagcttcaggcatcttgaacaggctcgccaacgggcatcctcgagtaacttgatcagctgccatcgagttgtagcaaaggtatgtccattgcgataatggtggaaaagaggagcaaaatcgcgactgaaccgaagcgatttagattctagaacggtggcggatattgagagaagtctcttgcaggtcaacgcaagacaggcctgcggtaacaccgttaaatgtgagataatttccagtagtaactctgtgggaagttcaagaaggtagcttcgcttcggtggaccgggctccctagaacgcgcttctatggcgtgagatgggcgattcttggtcatgacggcccttagtttaatcccagcacggcgaacactatgcattataaagctctgaagtacgcgaaaatcggcttgggtcgtggtccgagatataagactccgaaacaaagaccggtgtgaaatgcgtggcgaatcttcctggcaaagtttcatgaggataggagcgtctattgacaaaaattggtgtgtgcatgttctgagggaacatagtgtttaaaaggcaaatggcgcacttgcaccgcgtgatggagttcgacatgataagagaagatggagggcattttgactctcaagtactgaacacagatggctgtccacttgttgcaaacggcacgcgcgcggtcagtgtggtcagcgcggtccaggctgggaatggctttctttgtttagccccccgcatgcgccgtgctaacagctgttccgagctcgaggtatctggaattggctcgaattgatatccttctaatttcggatgaaagctcaggattgttagacctgttggcgcagtttgaggcgtcccatacgagccgcatgcggaaagccccacaacagcttcaattggtactatcacctaaacaagtacagagagagaagcgcctatcactacgatgtaagcggtctactgcacatttcaaaggaagaaatatcgcctgaccgtcactgcgtgcaccagagacaaattcaagtcaggcgaccggcgtcccgctgacatctgttttctgcctgaggcataaagagctgtcacatggccatgagggtactaacaagataaaaaagatggtctgaagccgcaaattcgaatgaacgctaaacgagggtgcgaacgtatctcacgaccctgagaaactgattgatgactgacatagtccgtgtatgggtctgcccaagggtgagagatatcacgtgatcgcttgccacaagctgacgcagtactagagcaactcttcgagcatctagggtgataaatttataccaaaaa

SEQ ID NO: 1845 - DNA, 3493 bp, Emericella nidulans
cacccgggtcgcatggaaggcgaactggtcgcctttcccttgacgatccgcgttctgcggctatcaatgctatttggggcacttagagacccggctatagctcaccagcgtaaacatatatgaagcaacgaccgcttagcaagtcttagatttcattcccattagagtcaaggacttaattacatctataattccatttgaactactttcttcgataaattcccattcgtcatacccagtcatcatggtcggtttcgatatgcacgggttgacgcctgccccagtcacgccgttcactcctaccggtgagatcgactacgacgctatccaacggctgggaagctggctcagtagtatgaacggcgtcaaagggctcgttgtactaggccacgcaggggagggcacctttctgactgccgaggagcaagtcgcggtgatcaaggcatttgtcaagtcagttgacgacaaaatccccatcatcgctggcatcaccggcgaaggaactgaggtggcggcactagaggcgcacgcgtgaaagctgctggggcgaaacgggccttctgtatccatctcacggctggctgcggtttggataccaggacggagcaccccaggatcgctaccgccgtgtctacgaggtcagcaatctcccattgattctcttccagtatccagacaacaccaaggccacatatagcttgcagacgatgctcgatatcgctgcgcaaccgggtgtctttgcaatgaaaaacggtgttcgaaatatgcggcgctgggatacagaaatccctgtaatccgacgcgagcggcctgacctgcagattctgagctgccacgatgagtatctgctacatactgcctttgatgttgacgggtttttggttggatatgggaatattgcgccggagccgctgattgagttgattgaggcgggcaaagccaaagactacagaagggccagggctatccacgaccggcttctcccggtgaccaagagcgtctatcaccgtggatcgcacatggaggggactgttgctttgaaacacgcattggtggcccgagggattctctcacacgccaccgttcgatctccgcttcgtccgctggaggctggtgctgagcaggagatccatgctgcaatcggcactgctgcattaggaaaggttgcatagaccgttatgttccttagtactgtgtatatactttcagtcagtagctttatggcacccaatctgttttagcttagttggtcggagcatccccggctgcagtgccctagcggattaagcggagactagaccgaggtcaatgtcggcttttcctgctgcaaatacataagcagactatagttgcatcatctttggggtaattctctgttcaaagtatgcgctttctaatgggtagctttaccgtgattgataactattccttccatgtcagattctcatagttcagcttgctctccgttcgagaaccggagaaaggaccccaaagtcagtcgcgcctgtgattcgtgcaaagcaaagaagatccgctgctcgggtactctaccgtgcaatatatgctccagaagaaggttgagttgcagctatgccagtcgatacgctcgcggacgtccacctactcctccaccacacacacagagccatctaggacgaagtacagatagtgggcgagaactgactcccaatatccagacaaatgccgcagagtcacgcgcaacatctgagctggtaatcgaaggccagtactttgaccttacgtcgggcctcagctttctgcaccgagctacgagtaagctctcggcgcaaagggggcaatatgttgcccatggatatctcgacgttcaacgaaaccagcttcttgcgtcagcaggagaccaaccgttctatcagggtgattccagtgccgaggcagatgtgctgccggatgacgcgacaacccgggagaggctgtccctctatttcgatacgtgcgtggtcacgtaccgcatgcttcatcgccagaccgtagaacggtggttagccagcatgctgcaaaacagagagcagggccgctctatcgccaactcgctgggaaacgcccgtacagcgagcatcctggccatcctggcaattgcagaccttcggtgcttcaagctcaagcgcaagcacagcaatagcgccttgaatgaccctcagcttgagtcttgcggtcttcgcgaaagcgaccctcttttctacgcttcaatgatgcgtaccgagtcggaaacagggtttcctaccctggaatccgtccaggcgcggctgcttcaggttctatatctacttcagacggggcgcatgaacaaagcgtggtataccttcggcaatgcatgtcagatcatctcatcactgggtctacatcggaaacagtatcggcagcataatgctcttggcccacaggcggactacatcgagcagcagtgtgcgaagcgcgtcttctggactgcgtacacgattgacaaatatatcagcgttgttcttgggcggccatgcctcatacataatgagggaatcgatcaggaatttccagatctggttaacgatgagaacacggggccagacggacgcctgacctctgatgcgagggaggagtgtcatgtctcgtctttgatacaccatgcaaagtgcgttctcacccgatttggagggctttgggtgaggttcaactaacgtgcatgacagaatcgcacagctcatcgggcgaatctcgaccgacgtgtactataaaaatcaaacagaccatgcagctgccgccaatgtcctcgtgcgtgagctgcaagagtggcgcgcggagctccctccccatctaggcactgtcaagccatcaacccttattccaagtttccggcgcgaggccacggccttgcgtctggcctattgccatgcactaattcacgtaacgcgcccatttctgctgggcgatgggaagcacagttttgacaacgatccggcatcccggaccaaaatatccgagtgcttgtctgccgcaagaaatgctctcgagttgatcggtacgattgttgatgaccatgagctgtcccactctttctggtggacccagtacgttctgttctgcgcacttgcagttgtgtatgtatgggagatccaacggaatacgcatcaaagtcttgaggacagcggcggcctgacccatgcatctcacgagaccttgtttgaactggctgagagaagcaggtcctatctccggggcggcgctggttcgctgcacctctccaacccgaactcccgctacggcttgattctggaggaagtacgactggaggctcaacggcaggtgtcacagattcgaagtcgaagtactcgtgctacattgggaacggaaaaggaggcggaaaataggccgcatgaggcatggagcgaccaaccaaagccaattccaggtccaaatgatgaactggacatcactacaagcgccattcgcaacgctggctccagtataccgaaagctg

SEQ ID NO: 1846 - DNA, 5011 bp, Emericella nidulans
cttctcgttcagtcggcactgaatcttcttggaccccgtccattttgcgagcgcgctcagcatcagcctctgcctgcgctatccgtttctcctccttcaatagcttccgtcgtaacttctcggccttcattttggctttcgcggctgcatcggcgggatccagggcgactcgagtctgctctttcttttcttggtcctttgcacgggtagccgctgacttgcgagcttccctctgctgccgttgagcttcttctctggctttcttcgccttctttgcttcctccatagctttctttttctcttcaattttcgcttgggtagggaaacgcttcttgcgctctgcgatccaagctgcgatatctgcagatgtctgcagatttgatgttcgtcctttgtacgtgatttgcaatgctaccccagtgcctgggccaccggatgccaacctggtttcctcatcggcgtcatcttcctcctcactggactcgtgctcctcagtcttcggggttaaccctagctggttatgcttccgcttcttcttcttgggttttcgttgcgaatcaaccggcgtagcggtttcaaaggcagaggattacccgaactagggaccggaggtggcgccgggaatcgtggagctgtcgactgaggcttgccaaatgctgacgtgtggtcgcgcttgttcgcatgtttgccgggagagctctgattattataggtgttgttctgacgcggtccccgttggctgggacgctgcaatcctggaaatgagcctgaatgtcctgtgccctcgaaaccccagcggataggagggcccatcattgtcggctgcaccgatggcgtagcattttgatgagcaggatgtgtttgagtgtatggaggggattgttgtgtaggtgttgcatatgtagtaccatagcttgattgatgctgataagccgtgccattaacggcaggttgcggataatgcgacgtagaggcgaatgtactcccagtcacggcattcgaaaaagcctgcgaagacgactgcgtataatgcggcgtcggaatgcctgtttgttgatttggcatatgttgagctgggtaccctgagtgtgtcatgggcgcatatccagcatgagctgccgcgtagccgccagagtgattggcatcggagctcatgaaatgacctcctctacctctattcccgtagcctctcccacggcccctgaattggccacccccgcggccaccccgttgaccatggtgattctgcccatacggcgtgaacgcattgttatgagcgtattgttgttgcggcggatgttgtgtaggaggcggaggtggagggggagggaaggagaatccctgagggttcatggcggggagatctcggtcgatcttcagggatagaaagcatgcactccatcctcacagcatcgtaaaggttgcgacaaagctctgcagctcaaaagtgcccttcatgaagcgggtccaagcgagtagttcgcccgctccgatggcaaggaatagttggactggtcacgtgcttaatggccagctaaaaaaaaatcgagcaggttctccggctgcgattggctggaggacatggcatcgtgagtcctgctggaggttttgggctttgagctcgagacaaaagtatcggcatggccagatgagctttaatctatactgtttctgaaacttctgtggattgaattctgaacatgggatctgcattcaatcaaacctatcctccgctgtgatacctgaaaatcgagaattcgggcctgcttttccgcggtcccttccaacatcatgtttatccttgtgagtagaattaacccagtccagacggggaacagatgcttaccggtgctggcagaccaccatctcagatcttattcagatttccccagaggatttttcaaaatatagttccgttgccatcgaggacaacattaatgaaaagtacgccaacaaagtaagcccatctcgatgtccctcaggttcacaaccctagtctcttaaaacaattttgctgactttactggtaggtcattcagaagattgggctctgtattggtttctatgatctcttagagtcatcagatggtctgatcggccatggcactgggctcgtcaatgtgaacggtgagctagcccagtctccatcccgatctttcatgatgttctagccgactgacatatactacagtgaagttccggcttattgtgtttcgcccatttaggggggagattgtgctgggcaagatctcaagcgctactgaaaatggcataaaaagtaacgatgggtcattccgtgatgacgctgtatgctaattcactggcaccagtcggcgtagaatttttcaacgacattttggtacctccagaactcctttggatggcgctagattgtgagtctcacacagtctttgcttggccgtggctgacgtgaagcagtgattaccaggaccaggtttggatctgggaaaacgaagaagggacgttctacttcgatgtaggagaagttgtccgcttccgcgttgaaatggaagaatggcatgaccagattcccaatgctcctgatcttggagatggcgctccaattgaccgcaagcctccgtattctattattgtatgtacagatcactggaattctggaatatgcccttctaatggaatacagggatctatgcagatggctggtctggggccaatatcatggtggtagagagtgtttttgataagatttgtagagtaacgccacggaagcaattgtgtacattggtatctgtgtttgaatgactgtatgacccgcatattagactacgaatgattcatattatatatattgtacagcgaggtagaacactcagctctccctcgggttcctacatacggtgtgtcgagtgaggctcgaaaaatgacgtgctcaagggcgccgaacgcgacacggccgggcctcaacagatgatgaatgcgccaggaacattctttttcaaggactaatctgagcgacattgcattagtgcgattttgatgtatggcctcggttatcgccggaacgagattggacagtagtcacaataataacagtcaacgatatacagactcgtgttagatagtggagtcgagtgtcagtcatcgcttgattgcgggaagcgtggaaccggatcgagctactatacgctgtcctgagcaatgcaacgtaaaagaaacctggtggaggaaaataatccgtaggcaggcaaattccattataaatgctgagaaccttctcgctggaatgccataattattcagtttatctcggtgacgaaaagattatcattacaaatcagcggtcgcaaatactttgtagtacatataacctgaagccgttaccagccatcgagcgctggacatcattttgttatcgtttgacacatctgctggccaaggggtagaccgccattgcattctttagcgcctcgatccctttatttttcttatttgagagctccttggggtttcttttctcagtcccgtgacgatgacgatgatggcgggacatccagatctcccctccaacggccagaacggcgactcgaacacacatcagcagcgccaatttgcgactctggccgtccatgctggagctcctcacgatcccaccactggagctgttatcgcaccggttagtctgcgcttttgagacttcccattttgcctggaccagcgctgactgtgacagatatccctgtctacaacgttcgcacaggaaagtgttggtaagccggtagggctgtacgaatacactcgaagctcgaatcccaatcggtcagtacaagatttcaaattaaaaattcagttgaatactgacttcagccagagacaattttgaagaggcggttgcttcgctcgagcacgcgaaatatgcactagcattctcctccggatctgcgacgacggcaaccattctccactcgttagctcctggctcgcatgtcgtttccgtctcagatgtatatggaggaacacacagatatttcaccaaggttgccgcggcacatggcgtcaatgtgtcattctcctcgtgcttggaattggacgtggagaagctgatccggccaaacgagactaaacttgtctggattgagactccttcgaaccctaccctagcgctggttgatatccgcaaagttgccgcggttgcgcatcgccatggcgttctggttgtggtcgataataccttcatgagcccttacgttcagaatccattggatcacggtgctgatgtggtgattcactccgttacgaagtacattaacggccattccgtaagccaccttgtctccggtcctttcacccgtgtgctaacgatccggtaggatgttctgatgggtgttgcagccttcaattcggacgaattgaaagagcgctttacgttcctccagaatgccattggggctgtaccatctccattcgattgctggctggctcaccgtggtctcaaaacactgcatttgcgtgcgcgagaagccacagccaacgccacggctgttgctctagcactcgaatcttcacctcacgtcatatctgtgaattaccctggactcaactctcatccgaaccgtgaaatcgccgtcaagcagcatcgcaagggcatgggaggcggcatgctgagtttccggatcaagggaggtcacaaggccgcccatctgttctgtgaatataccaagatcttcacacttgcagagagcttaggtggtgtagagagtctctgcgaagttccttcaagcatgacccatgctggaattcccaaagaagagcgagaagctgctggtgtttacgatgacttggtccgcatgagctgcggaattgaagatgttgaggacctgacggctgatacaatgcaggcacttgagagggctgtggctgcaagccaggcgctggagaacggaagtgcttgattaagacacaagtaaacttgacgacggtagagcaatagagccttttctgataggatagactcatgtcgaatacgaagtca

SEQ ID NO: 1847 - DNA, 2199 bp, Emericella nidulans
gcaaggtaagctttcacgtctgcatgtctgctcattactgatgatgaaactatagctgccatgaggcttcgtcagctcggttcaacgcaatccgtaaccttcatcgcaccgccagaagttcatcagagcatattgcacgtttgtaataagacctcgaaagataaactggattcgtctgacgtcgtcgcttggctgcttgatcagacgtgcgcagtcaacctcgagctctcgcctttgtactttgcccaaggcaaagacttcacttctcgattgcaagcagcgacagcgcacaaaatgatattttccaatgttgaacacagaacagcctacctcagagttctgcagcaacccgaacagcaaaccctcgagcaactatacgaaccaacctaccgcgaagaaactgcatcgtcgttatctgtcactacctttgcctctgcgggtaaagtgggcaggctcatgcaagcgctggagaagcgacgactggagtctcataagttggcgtcggtcattagttcagctcttgagcaagtagaacaggaacgcgaagtggcatatgagattgaggaggaaagagaaatacaacgccctagtcagaaaaaggccctgcgctttcccggtctgcatgagtccatcttgaattttgccaaaggagaaccccttgggtcttggggcattctatcagcgtctgaatggctggaaaagacgcaccttggggagaagtacaaaatcgaaggctcctcgctagtatcccatctccacctttctgcggagttttcaaggaccgacaagctgaagaattcagagaaaagcgatacctacatacggcccgtgaattggttgctttataataccgttactgagacagctctggtgattattagtgaggaagcagaaatcctaatcccaatcatgagggcttctacttctcgaaccactcatctcatcctctatgcagcgccctggaccaaatcaatgctgcactttaataatctgacttactattcgctacccagcctccgcgatggctggactcccccaacttggctcccgtttgagttaggtattatcgcaggaagactctactttcctttctcagagtacgaagatgcctcaaaccctctttattcgctcgcccgcaacccagacggtgaagatgaatcgctggattcctgggccaagaaccaccttaacttcttgcaggaatggctcgcaatcagtcgtcagggccaggacgttaccgataccccgatgggctacatctgtcaaaactggccgctgcgaagggagcaccccttttttgctacaaggagtgcccaggagggtatgaatgcgcctggactggagtgtcttcgatttacgatgtcagatcaggaggaagagtactatagtagtgatgaagatttgatggaagttaatatgggcggtaatgttgatgatgaggtacatggggaaaatgttggaattgagtgatggacttggattgcaaggtattgagtatcgcagtgactagtactggctgtgtcatattgttcttctagaatgtttatactgtatttcatgcgcgttgtgtacgtagatagatagtgaaagagaagttagacgcctcctcgtgagggggctgtgtctagattttccatcttgtgcctccgtgctgtaatttaactccagtcaccatcagctgtgctagtgtgcaagtagaattcgcatgaccctctctatagccaggctgagcaatctgtgaagatcattagagctacagaccagcaccatcgagttgatccactgatggagaggaaaccgtgtcaagatattctaacgtaatgtgctgagatcagagattaccataactctatatctgcaataatctgtcagattatgataaaaagtgcaactggctatctcaaggcaacccatggctgatcctgactccaataaaatttcacaatagatatgttcaagatcccgtcatgagtatagacctggcatgaagaaattgtttgtcttatataccgtagcaactgacaagctgcagaagcttcccaagctgaaagaggctgccacgaagggcaaggaaactatggtcaatcatgatcggacggactttggctaaacaatcgaactccgtttgattttcctgactggatacgattcgtgatgatgctgttgaatgaaaactaacctggtttccttgctagttca

SEQ ID NO: 1848 - DNA, 4770 bp, Emericella nidulans
aaggttgtgaatatgagatagtattagttgtagaaaacggataaggaatatattatttaagattaatgagtaaataatacggagaaaaatataagtaatagtaacagtataaaatagaaaaaaacatagaacatttaagatagagatatataaaataatagataaatttactacaattgagaaactaataattagacagatttaatgagagagatataaaataagaacaattgggaactaaaagcgataccatggagagtagaaaaaaaagcataaattagatacaaccacggatagagcatatagtaaaataatgagtatagcaatcacgaatgaagaaggagaccatataggggatagggttacccttccaagggttgattctataaaagtggatcaataccaaggttcctgccccaaacaaacggacggcgaaagaccaaaacaaatgttgcattaagttgcccgttaatcctatttaccaccatggatcgcatctctcgtgcttgtttaggtcatccttcctcaaacacgactcgattatattctagcattagcgggcgtagtgctttttctttgtctttcgaacctctgaccattcgtgttcatatttcattactttaagtcgactagagcgcgtttctatctatcaaacggaacgagacgtctagtttaggatcaacatgataccaggtagatagatgtgcatgcaatgattcaatcattcattcgtatactcgtaccagaccgtactataccagataacagcccaagatgctctttctaaagacatatatggcccagccagggttgctagatcaggtctttctgcgtcatctcgtctcgtaaagaatcaataacaggcgaaaaacggccggattgggagatagcaacacgcaaatggggtagataggtgaatggaatgccaccataaacaacaaacgggtaatatgcagagaacgaaaagagaatagaatggaatagaatgaagagaagacaaaaagcgaatgatatgacaaggcgtctagtggatatcaataactttttcccttcctccttttagcgttgtccttataaggcaactccccacacccctcgccctccacaaacacctagccaatcgcgcgggtgaccagcacttgtggttcctccctgcggcgaccaactgatgtttgagatctcgtagtcacattgccatgcagctgcggggccacgttcggtagttgtggagggggcacctgggttgtggacgccgggtggaacgggggtggtattgtgctggttgatgaggtcccagagaagaacgaggcagtcatctgcgccggaggcaagaacaccacgccggttgggagaccattcgacggtattgaggggcgctgagtggcccttaagttcgaggagagcttggcctggttgccggacgtcgagaactcggactatgtttgaatcttgggagaatgtcgcgagaaggtgggcatcgtgaggcgaggctgcggttatgagtatagtgttcaaagtgctttgggagttctggggcttaccggaaatgcgcagcagtggcgggggccaagtggtagttggtgcggagggacttccattgccagggctcatcactaatggcatggtctcagcgtcaaaaatcaagaagcattgtcatgtatagggcttacatttctcgttcttctccgtcggctcgtatatgatcgtgctgtgttccaggctccggagatcaaacatgcgcacacttccatcagcgccacagctgacgaaaacgtcaacgctgttggcgcagaaacgcacgtcgtacacttccttgtcgtgtgcaatgagctgcgtctttgccgtcaatgtgggtatatcccagatagtgcaagttgtgtcgatgctggaagtgataatcaggctgggagatatcgtattccagtccagagatgtaataggagcggtatgctcgggcgatttcgaattggaaagcaacgccagaggcgagagtttagctgcaggcatatctctctgacctgacggacgtgtgatagagttagagctgtgttgaggctgcgagtttggtaatgaccataaccggagatgatctccagaagtggctagaaggtcagtggattgcttctgggacgacggcggttcccaaagaatgcgtgtaacaggatatgagtgggtggcctcagcggatttcacgtattccagcttaagctccccggcactggcatcaggagtatcagggtcgggatatgccaggtgagtgtccaggatttgtatctagatcggtggttagaaataggtgacaagcgtattaaccaccattatgaataaatcttacataattatgatggtcttctagatagcttcccagagcgatttttccgccaaaggaaccaggatttcctgaaatcggccacttgcaccagtcaacagcatagatgggccaaggggtaatgtagttgctgtttgtaggcacctggttttcgacactttttgaagcagctgcacccgcgtttgtagcatgatcaccgagaagatccccggaaggccgaatatcagccaggcccagaggcgagtatttagcgccctggggagttggcggctggaatgcagcattcggagacgacccatgcggcctgtatcctgccgggctcgacctggagtgtccatgggaattcgccgcattggaacgcggagtggttgactggggctgcggttgaggttgttgctggatctgtgtagataaatgaggcaacgttggaattgtggacggggctgtattcatggatactgttggtggtcgattggcagaattgccgggttggagagagccaggaagcgtccctcctgtaacgcccccgcttgcgcctccatattggttagactgggaacttgaagaatggatgtttatggatggaagatgtgtatcggggctcgtagggtattcgtgggacattggctggcgcggatgaccgcctgatgtagagtttccggccggaatgtgaagctcttccggttgacggttataaatagtcgaccgtctggagtcgaacggctgcgcggggtttgtcatcgcgatggcggttgtagaagggaggatagtctggaaaggtaatcgccgcaccactgcaaagcagcgggctctttacagcgcaaactcgtcttggtcgtttggtcaacaccactgtggccctggttatagttgggtccgttgagagactccccccttcttaatggatacgggcagcaatcggcacgcttgtgaaagcacttagacgcgacaaggacgcgaacctggttgaagccaaacgaaggaccttgcagattcgaccagattgcaattcaacaatgaagagtcggatacgagtcaaagtccaacgaatggcgtgcagggtgagccaagggagacaggaagtggaagagcttcttaggctggagttctggatctccacctgagctagagtcgagtcgttgcccgcgatgctgagtcagccgtttgcacgggacggtaagattgaactcattggtattatcttaccctttaggtacagcctccgcttcctcggctgcttttcgtcgtgctcggatgctatctggttaattctgattccagcctatttctagttctttgcttcctcttactctcataaaggcctgatcgtttgtgcattctgagtccctcactcgcagccgtcattccatgacctcattttaatacatccgtatcggtctcgtttggtgagcctcttcccctccttatcttgagcttccccgcgatgccttcagatcgcatcaccccaccatcggctttgcttctactgccgcctcctccaattgtatctttcgatgaattccgaacagtctacgagccagtattatcttcggtcttcgccaacctcttaaatgcgctcaatggttcaaatcgcaccgcttctttggatattgcactctcattgcctggtctcctgtcgccatcatgtcagccgccgacgagagctttcgcgagccttcaacgcatagtggaacatatgtacaggctcattggggtcatttccattgaacggaaaattgaaatggaggctcccggtggcattgactcgcgcgtgatcttgctggatttcgactctgtccgaggaacaccagctacagctgctaactctggtctggtcgagcgcaacggcccgattgttgatttgaaaactttggctagctccgggcgcctgtgggataatatttactatccggaaacctcggtaggccaggagctggcgacggcgtttagtaatatctatacctcaaccaaagaccccaatggcggactgccgcagtcaatttcgggatcgcctcaatggactccgggtcaatctttggtggattctgcgggatcggtcggatctgccctacatcactcagtcatcttgggaggcacctttgaccactttcacatcgggcacaaacttttgctcacggccactgctcttgtcctgcaacctgcgggaactggcccgaccggccagaataggaccatcacgatcggtgtgacgggcgatgagatgttgaagaacaagaagtacgctcagttcctggagagttgggacgagcggtgtcgaagtacgggcgcgttcttgacctcgatcatggacttcgggcctcccgaaacagagcctgcccacattgagcgaatctataatccgggaccaaacgggagacagatagtgatgaagatcaggcctggaataaccctgaaaatggcgcatatacatgtaccgtagg

SEQ ID NO: 1849 - DNA, 2353 bp, Emericella nidulans
aagtagagtgaaagtaattaagtgtaggaagatgataagatagagtggtaacaaatgtgaaggcgagaattagtaggatatgatgaagaagatagtgtgagaggaaagtgaataaataagtggaaattagaggatagatgagtggtgaagtgtgaaaaggaagagaaaggggggtagagagatgaagaccaggaatgatgaagaggaagagaaggtgggaacagaagaagtagatatagagtaaagaggagactaataagcgaagtgtagatagagaagagtgtgaaaaataagttgagtaataaagagataatagggaatatagagatgaaaagagaaggttgaatagtgatagcattgaaagagaaatgaataggagtaaaaatattgaagtcttaagagaagggagaggatagaaagaatgaggagtatagaaaaggataagaaatgatgatggttgaaagaaatggattatatgggtagatgataagaaaaggaaggagagataagtagtgaaagtataaaagggtgaagacaggtaactaggtggaacagggaggatagaaagagggggatacatattagaagaaagataaaaccctataagtcgatttaagatcaagttagaccgtggtttaagaagtcaaactagaggtcaggggggacataatgctcctcaagagaccgatcaaagtattatggctgttcccaatcctcaaatgctgattttctacgactggatatatggaagatatgctggcgtctcaaaaggattctgctgctgagcggtcgttctcatctctaatgaatggcgagactatatagttgttgggcttagctgcatggcggctgctaccacccagcagaggttgggtcagttatgccgcttgaagcacgcgcctgatgtggtgtaatgcaaagtgtctcatagcggctctataactagacgtcgcaagcattaacctgaagccagaataccacaacatcttgccaatcgtagaacgagaataatttttcgcccttgaactaaatccgcaatatggacgggtactgagaatccaatacctcggccgtaggaatggaaggccgagaatcacgacgtaatcctgggctagtaaggccggccacgcacactccgcctctccagagcaatgggacggctgcttgctctttgcttcagctattgtcctagagggcagtgccagatcaatggtatgctctgatagtcagatgaagcaagttcatcctgtctgtcaaagatcaactgcgtctaatacttgggcccgagccgtgcagtcgttattccaagagggtatcaacaagtaattatctctatcgatagcataaatgtcatgtagcttgtgcggtagttcgaggtcaaggctggcgctgtctgtcgtcgatcattatcgacgctttgagcgatctttcgcgcttggacagcgacggtctatggctgagacgcctgggcaacgaattcactaagggtaggtctcgtttctggagagtcagccctccatgtctgccataaggtcggcgatgttgccgctcctggcgtaacccctctcattctgttgagttgatacgtctcgatagtcaattcttgccgagagagactaatcttcatctttctgctttggccattacggctcaagaaatgcaactctccgtggtgtggataatcaacgtcccaggatacccgttctttggcttccttgtcagctgtgtcgcggcattgcagtggaatcgccgcggctatatcaagcataatgacatgagtaagtattgcagaaacctcatcctggagtccgacgtggttggggggctgcacgtcagggtattgtggaagattgactgagagctcataaaatgtaccaaatggcggcacagcaaggttcgttcggatttgaatgcggaatgagctctgtggcgtaaccagattccctgagaatgtcgacaaaaaaggcgcaaggaaaacccctgccactgcttcaaccttcggaacctgattgcttggctgtagcgtgccaattgaagagaactgagttgccttgaagtcacagggaatgccagcggactggagcacaccgcggaggtcgtttatgagcgactctaaccattggatatgagacttgtgctgtaagtaagccataatcggccgtagaatgtgatattcggggaccggtcggcgcttcggagctagtgggggagggggttgtgtcctgcgacgaagattctgacggtgggcgtatgtaagaagtatacgaatggagtgagcgacagcatcggcaaacacgtcttgctcagtggaatcagctgcatcggggtgacgatcctggtaacagtcgacccg

SEQ ID NO: 1850 - DNA, 2475 bp, Emericella nidulans
ttgccagtcatgtaactgaggaatttcatatagctcggcggtgcaagcattgcacaccagtggtactgaccaccagaagtcggcgcccttgcactgtcagtctccacttgcaatgcgaggggggtatatacattgaggccaattcagataggaccgcaaagcagcacgcggtgcctgtccaggcgaagatgaacgcatagacggctcctccgggaccaccactagatcagacgctgtcaattgcttgtcttccaccacgggtaccgggtttcgcgttactgactttgacagaggtagtagcaaagtgctggcgagcaagcaaagccattagccgaggacataatgcacgcgagggggagctcgtacttgaatatcccttcccatgtcgcaaggatagtgcagctgaaaccgagggtggatagaattccgaacgttcgctgggcggaaattgtaagagcaggcaatgagagcaaagggcagatcggtcctggacactctactctaccttcaaaaccgatttcttccccaatcgcgccagttcgctgacgtcgcggtcctggaccgtgacgctggccgcgaccgcaccatgcttgagctcctgtgacgccatctctgtccacggcctgcgagtcgtttacctacgcatggccagacatgcccgggcatgcctcaatttttaagtcaaagggccggctcgcatgagcgcgagcatgttagccaccttccgtccaggtcttagtcgcattaatatacaaaccctgtcatcccctgtctggtccactgtgtgcttgacggccagtctcgggttgacaccaagcttagcgcaggcttccattgcttctttggtcttgtccggctatcggcgccggctgcaacgccatcttggcctaaaagcgcgaatggcctaggtgggtgaatcatacggcatgttacgcgtactgggccagaccgctggcgtcctggaatgacacggtctttacccatcggagatttagctagatctaaacctcggtggctcggagaatttgacttacttatgctctgtatttgcttctttatctcttgaaagggtatcttagtactacgaagccaaccgagccgataagtattgcgctcaaggctggccacgcttatagggcaacacgttacactgatttttaccaccgtctcatcctggccgaattctctagcactagtctgcgccctaagagtttgcttggctatcactcgctcagaccccggtcgatcagccgtcctggcgcccagccggtgcccactccgttacgcgccgcgtcttggccagcataggcgatgcgatcctttcatttagtctgctgtgtgtgggctattagacgatcggggcggggccggtctgtccagagtacaggacagggtcccgagtggcagtcttttgtgaatgattccggcacggcgcagggtgggatccttgtccctatgacatgatactgctttatcaatgctcatcgggtcggtcttactcttactttttaacattaaatggtaagcaattcctcgtgccgatgccatgcgccgatgccattcccagttaatgggcctgaccagcagccatggggagattcgctaacatcgacacccgagacccagacgttttcgtgaccacctggttcctggtcgttgttgctgtgctcagtgtcctgattcgggtggcgactaagtgcagggtcttccggcagttgaccagcgatgattatctgataatcgcagctttggtacgtatcccgcactggcaaagggaacccgaggatatctacccagtgatcttcagtatcttacacagtctcgtcacaggctctttgcattgcacagtccggcgcgatctccgctgcagtagcgcacgggtatggggaccgattcacgaccgttgcaagtgcggatttcgtccaggtcatgaaggtatatatacgggccatttcattgctgagtacctgatcgacagtcctaggcctgactatactgagaccgctgccagtgccagtacgctgcctctatcctgtatatcgcaagcctctgcctgtccaagctctcgctctcaacattcatccacaacttgaccccagtgcacagagaccacctgctggcggctgtcctgctggccgtcatcgcccttctcggtgtcactggtatcatcggcactgcgttccaatgccgcttgccacatccatgggattactggtggcagaaatgctttgacttggtgagtaacgcccggcgccaattgagctcgtataacacccatcctgccgatgcactgcaactttcgctgaccgttgcgaatcttgtctacagtgcgcctgggcttatttcctgtccgcggcgaacatcgccaccgatgtcgcgattatcgtgcaggctctcctcctgatctttggcatccaggcggcatggaagaagaagctcatgttcgccagtatttcctctccagagtattgttag

SEQ ID NO: 1851 - DNA, 3136 bp, Emericella nidulans
atcatgcagaaatgagacctatgtgacgaaaagttagacttggtggttacgaccctgatcttcgatctattcccctttagcttcatgagctgtattttatgctttttttttttcttttctttttcttttttgaggctctagcttctgtacttcttagtttagcgtcttctctccttctttccggtcctttaagtgccgcatggacgccagaatccgtccttttgtctctattcctgcaattagacttatatattctatcatattccttccgttttatatctatatattccttttttgttttcccattacttccaagtctctctgatcttcatcctttacctcccgcttggcccaggcatgaaccgggatcacgtgcccatgagtctgggaagctacaaaagccagccaggcccaggccaaacctttgagcctttgcgttgctttctccagcaggataccggctttctttctcacctctgtacttttagtgtacgatcatctctcttattttattatataatcaatatctttctgtaccatactattttcgggttgattcgaaagctcctgcgtttgcagcaatccgcagctctgcaacttaccgatccctttactaattatcaaatcctgattattcaatgtgagtcctccatgccagttcatcagattagccttcattacagctgttaaacaatgtattctacttcaattctttgggcagccgagccgcccgaagagtgattgtatttcttcgttgcacttcctgaacttgcgtgtttggcgcactttgactgacgtacctagagcacagacggcggccgagttaacccggatagtgcccctccagcaacaatgttcgcccgaagcctcaagtcgacaataaccccacctttctcgtccttctcttctcgtcccctctcctccgtcttcaattgcagtcaatcctctttcatctctttccgtggcttccaccagtcttctgcagctatggctcctcaggttttcttcgacgtccagtacgctcctctcggcaccggcggtaagtcccgcgcatgcataccaccataatatttaccccttcttctcacatggatgtcggcccccgcatccgttgctcgcacgccggctctcaaacctactcttttcatgactaattcggcccttactggtcaattgcttgttgctaacggttgttttgccatgccatagcgcctaagaccggccgcatcatcttcaacctgtttgacgacgttgtccccaagaccgctgcaaacttccgggagctgtgcaagaggcctgagaaggagggctacaagggctccaccttccaccgtattatccctaacttcatgctccagggtggtgacttcactcgtggcaacgtgagtcctctttgttcctgcaattctcgcggatcttttgttctgaaggctaactatgagcactacagggtactggcggtcgctccatctacggcgacaagtttgccgatgagaacttcaagattactcacagcaggcctggtctcctttccatggctaacgctggccccaacacgtacgttttcctacactcactacggtaacaaaacaaactaataacaccctgctctagcaacggctcccagttcttcatcaccaccgttgtgacctcatggctcgatggcaagcacgttgtcttcggtgaggttgctgatgaggagtcctacagcgttgtcaaggagattgagtctctcggtagccagtccggtgctccccgctccaatgtcaagcctaccattgtcaactgcggtgagctgtaaacagcgtgaacgtgtttaatgaaatatctagcttaaatggaattcctgcggatatgagctgattgcagctgtcgcaacttggttacgctgtgaggccatggtacaatatagccctttcccaggccagtgtaatttagagcgtcgatataaccagtttttcactcgtgatggattcatgtctttgcttgtggtcattgcactgtagttgtcttttgtggttgaaggaatggagcagtcgttgaaccccgctttacggaattatatggtgttccgttactgtttctttcttagccctgacatccaggcctaagtttccagtacccatggatatcattcgacgtgtgttctagcttatcaaaactaccagtggttacgatacggactcctcgcttggagaacaatatggcggccttataagattaacctctatctacagtgataaccgtacagtcatggcgaattttcgtggctcattagcgacattgcagtatcggcaactgcctatttactttggtaaaaggtgtttagctattatatgactattatgagaactaaagtcctccttgttctagaggaaaggttgccatcggtatggcttattggatctgaattatatgcgtatgtgaaacatcaaccgcagcatttcgtaacagccgttgcgtcgttcctgtttgtttaacgctccgttagcgataattcttaaggctcaggtctcggctatctcgactgacatcgaatcgtttgatttgaagccaaagagatagcagagaaagacggggcagcgagggcaataaggtcaacgtactccttaattccacccccaatgtactcccacgagaagatgaacgagcccaggaaggctccgatgaagatacaaataataatgtacccgttgaagtacattgccagcaacatcacaaagtacgcgaccgcaaactgcaacatatgcagcagcgcacggataaactgttcaataaggcttggacggacgcggaagggtgctgctgaaccgggcccagaggctgctgctggtgccgtcgaggtgttggcaggagtcttatgggccccggctccgttattgccaatgccaattgcgctgtcagattccgaggctggtgatggggtggctgcaccaggttgggtttgcgcggagggtacaaggtattgagcacgcatctgggcgcggtggatgatgaaggcgtcgtattcgcgggcgatgcggcgcagaaactcgaggactatgacgaggcagatgacgccaatgcaagagcctgcgaacatgccgcgcgagcgaaagtgccagctgcgggcaaggaagcctgtttttcgtagacc

SEQ ID NO: 1852 - DNA, 1852 bp, Emericella nidulans
acaagaatgaggttgtacaccttgaaaatccacataatcgacttcagatcggcatatcaaagctacaatgttcactgtaagctaccgcaattcccgcgaacgaagcaccttcaatcgcgttgtctgcagcgccagcgcaagtcttgccggtgcattgccataatcgaacgaatgcataaaatggagaataatcacgaccgaaacacagctcatcctacatgagacggggttaaacatcactcgtcaccctcagaacagaagtctatacagccctacagacggctccgctccgggttgaaccccaggaagatcggcatggagtaccgcgacgcagggtaatgtagcatcacatacccggtgccccgtgctcctggcacattattcgacaagcgctgcctctcagccgattcaagttccgatgtcttgttatcgtttatttgccgtagtgtggatctggtgtctgggtaatacataatttgcaccagggtgttcatgacgccgtcaaagtagtcctcgtctaggccaggagtaagtgcaaataaccaatcacttctgtgccgtgacgagtgctttatagaactcgattgttgtttttcgaaccaggggaggtgggatcgtctcatccagaggtattcttgggacttgaaggcagcaatcatgtttttacttgaagaggcaaagagtgggtaattgctgggtcactgaaggattgtggcggacggagaagggttttttggcccactccacaattcttcagcttcatcctttccggctgtatatgctagactgaagcagaaaggctgatttgttgagagcggggactaggaatcaattaaatgcacctccactcactagcattgatctgcgagattttctctgcatgcgcacaattatactcaagacctggcatggcttattacctttgtctccagtgccgaatcgattcctccacatttgttgaaggagaactcagtttctctgctgcagccatactggacacagatgtttccgccgcaaggccacaattgacagtgtaaggttaattcatatctcaatgtgtgaggatgtagccacaatactgaaacgcaccggtatgaaaaggcaggagagggttgcagagggtagcggccctgtattgagaattggacatttgatattgcttctgcagcggttaccaagcatatatgaatgaatacgactatctacggattaccatgtacgagaacccggctgctgatatcgaaaatataacttgggttagtatctttagtatcgatagtgtgttggagacaacagaaacgccgagtttggccaagaagggcaccatgcccagtctgggtaataagcgagagagagataaagtgctctcgcagctttccaaccaagtatattcgctggagaagatacggggccctgccattatctcagtagtggcgaggcaaacatagtggattctcccaagagatacatactacctagaaaaacatggcttctatacaaacactcaggcttccctgaccagcatccatttctccgaatgctaggcattgattgggagtatcagctatgatctgctccaagtcttccactctggattgttcgtccaatcgtcgatagacatgtacctatccccaggcgacgaccccatccatccaagcctcgaggctcacagaaaacagacctagtacttggcatttgcaacgttgacttacagcaagcagcacgtgtcgctgcatttaaatttcaccagtcggactgggtatctgagaagcagtgacttgtagcgccgaagcccaatatctagccaatgcaaggtgtccggagcacagtgctggcgtccatatagcctgtc

SEQ ID NO: 1853 - DNA, 2465 bp, Emericella nidulans
tgtttcttccttcctccctgggttgcgtagaagcagtctgcttaattagtcttgtgataagaaaacaatatgacgtccattacttacgaagttggctcctctgtaatagtctaatcgttcagagtgttgatggacgatatcagtggcaacctcattcaaaaacgctctgtcgtgagaaacaactagaacagtgcttggatatccttggaggtaatttgataaaaaggtgatagacggcacatccaacatgttggaaggttctgcgacaatcagccgttgtcgtcgttaggtatcgttttgaccaaccgtctaaaaggagcaaatcgggctcgcaaaacagagctctagccagagccagacgcatgcgccaaccaccagagaatgtcctggtagcatactgttggcgttcaggggagaaacccagaccagccagaatgctggctgctcgggattcggccttgtccgactccatttctgcaagcttcgaatggatatcgttcagcgtgatatcgagtccctctcgctcatgatcgagcctagctgcgtctgtagacgtatctgccattgaagatcgctccgcttcaatggctgcgagttgttttgagattttctacaagagtcaactagctgtaacattgaggatccgtgaaaactgacctcttggtccgcaagtagccgcttgcgccacacatccgcatccaacaccgcttgaagggcaggagtgtcatcaccagtaatctagattgttagcactatcatgaataatacgaataaacaacatacctcctgttcaacatggagaatcgaaatatggcttggaatggctacttctctgcgactcaaagcgcggagcagagtactcttaccgataccgttctgaccaacaagaccatatcgacggccgtaagccagcgtaagggaggcttctgaaagaatgcggtggccaccaactgagatatcaatgccttcgagtttgatatccttgctctttgcctgggagtcggagcccagttgaaggggattgacagccatgaagaactcttcgtacgacatggttgcatcgggctcgttaagcagacgagatgcttcatattgcaccgttttcatctgcttcttttcctgtttggcacggatcttgcgttccgccttctccagcttcttgcggtcgacgcgagattccatcttgcgcgtaccaacagactcgaggtcaacatttcctccagcaagacccagagtagaggacaagtttcactgagacccaacattaatagcctggtcgagcttctggcggcaaagggcatgtgcctgcactccgaatcgacgccatcggaagcactaagggaagaaatgaacttctctacgagattgcgaatggcctcttcattttgagcggagaagtccccagaggcagaaactaacagctccgtgaccatgtcagcggcttctgccaccggagatggagcattcgcatcttcaacataggcccttgacgcgtgagtcaaataaccctgtggttgtgttagtctgaactcgggcgattattcgtgtaagcctgcacttacgacggagtactcagtgatcacatggtcgaggccaggaatctgagattgcagttccgcctccatgtcggttcaaaacttgcactcaaaaaccttagatcggcaatgacaagggtatgcgtatctttcagcacctctcaatgctcctatatcatgtgttgaggtaggcggttacagtcttctttgagtcgatttggtgttgcaagactttgaagtggcggaaatgtggagcaccggcaattctgcacaaatgctgggccaacaactacaactacacacgcggaagaatgtcactattagacaatactttaactaataatggctgtgccaatagccactacaaaactattttctatctctgcgagagttgactgctcgttttcccagcgaatattgtagatcccatttgggtcacatgatataaagatctcacgtgataatacatccttccgtcgcacatacgaggtagtactgttgggcctcgaactcagtaacacgtcatccggtcgccgatctaactcaaccgcactgtacgcacgtcaacgctagagaatatggtacctcaagaaaaattccgcagagctgcgctacatttgggtaccaaacggtcagtgccatacgaaagcagagactatccttcataggctactacattgatgcctccatcatcgcagagagtgcctagacaaccaaaaatgaccattcgtcaagaaagaccgtgccatcctagcttagtgctgccgaatatatgcacaggcgaatcggtggtgttcgttagcaaggtgatgaaaccgaggggtagcaagcgccatgcattgaccagccaggacggagaacgtctctgcatgtttcgtcgtttgatgtcaaacgccaaagcggccgcccgatcgcagagtgcgaaagtat

SEQ ID NO: 1854 - DNA, 3266 bp, Emericella nidulans
gcatacaattgaccctcaccgtcttcgacgatgccattgacttctaccccttgctccactgcgtcttcattttcgtctacaggcgaaacgatgatgattgatgggtttgtgtcgggagtgaagaagtgcaagttgtcggtgagtgcgacgtactcacgaagtatcaggtcgccgtcatcgtcgtacacttcgcccatcaggtcatctccggtatccaggaacctgattacaatgtcctcaaatcgctcacgggctgccgcgttgttggcgtagtcagagtcgaggaaggagatgttttcgctgcgtatgttagctgatcgtcggggttagggcaccgataataagaaggtccacgtacaagaaatgggcaaagtatacagcccttctcgacgcaaccagaagagccgtgcacccgcacagaccatccaggacaatctctacgggctcatcccccaacacctcgaattgcgctgagtttccggggttaaggccgtagtcatacacggtgagtgcattgttggttacatagttgtcgacgcggtcgatcaggtactcttccattgcctcattgtcagccgggtagacaaactgacgcttggataactttggcttgatttttgcagattcccgggtaggtatggggccttttggctttggttgacgctttgccaaccgtgggatgtcaggctgcttgggctgtttgcattttccacggcagtaacggtacggcgttgttgcccggcgggtaaaatggttgctgtgctgtatagttagcgagtatccagaattgattagaatattttaactaagtggcacctctcaagactagcaccgaaaccattgacgctgaccgtctgcacgctgtccacatacgtgaacctgccattcttgttaaagagaggctccctgcataagataaaaggcagggagctcaaaagaagaacgattgtaaaaaagggcaagatcatattgcgccgcttgctgagtacatcctgtaactccagagacagactgcaactctcatacttatactcatatctacactactctacgacaccgccagatcaacaggaacgtccaatgcactctgatccctgcatagaatgttggtctatactgaaggcaatgaagccagcgcgttgcatttagatccttcgggatgaccgatccttgtatccatatagaggatcaggccagacccattagctgttctggtgtcggtgagtgatatcccaggattttctttgaggtttattggctatagtgatatagtggcagctgaacttgggctaagacaattcttaaagtacagaaatcgctcatgatacctggacatcggtcagccgcgacgcgatatcccagtgtgcccgaagaaatgaagttttctagaacatcgtgccctgccaaaccctacatataagtttccagggtatgttctagcgagccgtggctcgctccaatgaaaacaccctgataatgcctcttttcttcacagccgttccacagccaatccttgtcgtgatacggctcggctattgtttcccaagaatgccaccgagcttcagccgcaccttggccgtatagaaaatagtcaggcattgtagggctgaaagacttggactcgctcggccgacggctgttctacgtgacggcttggcattatattcaggatgcattaagatttggagccggagtgtcacagatactaaggatgtcaccgtatgattcgattgcataaactgttcttcccctaggcttttaagagagatattttcttcagctagacagtcttatgcctttcggggtcgtgtttgggataagctagggtgtcgctataccgccacgcgcgaccatatcacgccaacaaacaccatgcaagaacctctgctgccatattttcacatgagacagattattagtctggcttgaaccgctgcttgcttcgtatggagcgaggattaacttgaaggtcggtgaggaagtgaacggattcggttataaccacagttgagatgctcgcgtccccgcttacaagggcgtctttctggaaacttcaatgtagagaagaggcttccgtcagaaagggaaaaaaaaaaggggagtctgtttgcgtggcaggacagtggggcaaccagcagcggctccttctgaaaactaaatacacaccctaacatgccatacgggttaggaaaggccaaacagtgctacgacgaggggaatgagcttcacggtcaacgagggttcttcttatttataacggcgatcgccccaagtgatgggggccattgaccgactagacgcgagatgtaacatcttaggtcttcgatctggttgaagctatgagagcatcttcgaatgaattgacgcagcagcagagctggccagcgattcaacggcaatggcgtggtccacgtttcaagagatcctcggtgaaggcgtggttgtgagttacgagggctttctcctggacatcaaatactcaggggaatgttcggcttggtagcgtgtggtttgctcctgctttagttggcaagttttgcacagaaacatagggcttgagcgccgcaggggacagggatagaggcacgttggcgaggtaaagcatttgaggggtgaaaagagtaaacgctggtaagcctcggtgacacatcgtcggagtcacaattgtgctagagagtatggcgaggcttatgaggaacatagttcatctgctgggctgagggaggtcatctacaacctctggaaacgggcagctcgcagaatatggtagttggagaaacaggtacgagggcactattttcagaagcaatgattgcaggggcagttattggagggagagtatgattgacgatgatcattcttgaagtgcccaagtgctgcgatcactgggcaaccgggccggcctctagagactccaaagataagtgtttgctaaggccaggcaaccagatcgggatcggtatcgcggggtacgcaatggctgcatggtaaggttgtttgtagtggcttagccaatgaacccctcatttggagatatttaagcaacgtgacatcgtcgtgttgtagcctgcgccaacccgcaaaatgcactccaagatcctctggctgaggagcccaacaatactcaataaccaggtcaagcgatcctctagcttcctaactacgcatcatggctttcaacagcgttccgctaccgtcaaaaagacgccggtggcggtcttgccgacgagagcctcctttattcgggattttactttcatatgtcg

SEQ ID NO: 1855 - DNA, 4357 bp, Emericella nidulans
agcttggctggttaacccaattccgttgcagtcgctatgcccccaatttgagccctatattcttaacagcatttatggcgccattttagccacatcttcttgccctttaagggggcttaggcgacctttaatgtcttcggcatcatttgacgggttgtgaacacttcatttgccagtatgtgctcactcgccctatctcagctcaagcacagagagtcgaccatttgatgcacatattgtttgtgcctgatgcagcacagaaacctcgtgttcattcagaggtctctgctttctgaaaatgctccacaattttagcaaaacgacgccacgcgatataggccataacctgttccacccagcgggtgtgcccacggcacacattgctctcccgcatccttctgctccattcctccaattaatgggttgctcattggagggtaattcttgaatctggggccacagccgggggccgcctcatacgaggtaacatcggtggagtatgcaagaatcctccctacgccggccgagacgggagatgatgccactagcaacccatacagaaagtgcgattggcgaacacacttctatacatagcacggccagaagctgtgtccttgatagaatctgattgcatgtcaaccttggctttccgccgaaaactctcgtactcgctttacgaaggactacatgagccttccctgatctgtggtacaggcagccaagagcaaggtgggctgaaggaactccgcatgacgcccttcgtcggcttttggcaagcccaattttgcccacagtccgtacccaaaagggaccagcaaatgatatgctcaagtcaagcaccatgggttaactttctggactctagctttacttagctgagctgcacctgccctaaatagcttcaccgtagcatgggagttcgtatctatcaatagaacaagcttggatgtacacgaaaatagacctatggcgagcaaagggtgttcgcccgcatcaagctatgtgaccgagcttgccgaagtttccttgtcatatatcttgactatagcccaagggagcatctgatgatctgcctacctcttcccttattagtccctgaatcatcttctatgctccctagcagaaatagacatgaacgaaacttctgacttctgcgccatcatcgatgattcttggagagtccacgcccgttcctgtcgaggcgggttcgacttcacacttctctttgaggaattggcgctatgtatcctgccaattgcctttgtcattaccttatcccccattcggatatacactctcttgcagaccgacagtaaagttggaccatcaaaacgaccaatattaaaaacagtacgtgctcaaacagctctcctttgtcttttcaacgccgactaacgtgccatgcagtcaggatggcttctctggggtgccctgcaattcctgcaggcaattatatgggccctaccaaacgcccgaaatactcgagcttcgattgctgccagcttgctcatgggatgtggatcgctcattctgtgtgttttgtcatacatggagcatttccgcaacgttcggccgtcactcttgctcgagctctatttgttggtcaccctactcttcgatgtcacaaggacgaggactctctggctacgcgatgataatgactacaacaagctcatggcagtcattgccagctttgccgtcgctgtcaaggttgtgcttgttgtgctcgaaggctggcagaagagagctatcctgaaagacaagtaccgagcctaccctccagaggcgctcgcgggactcgccaaccgtgtgcttttctggtggcttaacccccttttcttcaagggatatttcaagctccttcgagtggaggatctgtatcccctcgataaaagactcgagtcagcacgattgcgtgagttactcgacagacgatgggccaaaggtacttgaaatattgaattcatcttgtcgttgagtgctaacagactttgcagagaatcggacaggcaaagcttcccttctgaatgttgttttcaagactttcaaatggtcaatacttgcagtggtgcctccgaggctgtgtctgattggattgacgttctgtcagccactccttctccacagagcaatggagctctctgcagaaaaggtaacaatcgagtcaacacatgttggatacgggctcattggtgcttacgtcttggtatatgtcggaatggcggtatgtcgagaaggcagcttcctttgctctaatttgagggctaattgtgataaaatccagattatgatgagtcaacaacagcatctcacgtatcgcgcaattactatggtccgcggcgcagttgtatccttgatctataaaaaagccagcatgctcacaatcaaagatgctgatccggctgcgtctatgaccctcatgagcgcagacatcgagagaatcgtccaggggtggcaaacaatgcatgaaatctgggcgaatgccactgagattgcactcgcaattattttattggagaaacaacttagtatcgcctgtgcggtacctgtgggcgtgtctatctgtatgttcctgcgcacgtccagtggacggcctgaaccaagatctatactaatctgattgtcaatcgctagtcgcccttgtgtgttccttggttgcaatgtctggcgtcatggcaaggcaagccaagtggctagaggcaattgagcggcgcatctcttcgactgctgccatgcttgcatcaatcaagggtgctaaactgcttggcctcaagccgtccctcatggcctcaattcaggacctacgattgcaggaacttactatttctaaagccttccgaaagcttttagtatggaacatggcatttggtgagtaattcccaagcaatcagccgtccatcatcgcgcattcttgctaacatgtgccaccagcctggatgactcgcatcttcgcccccattgtgtcttttgctgcgtacgtcgccatctcagaaaacgcagggcgcgggtcctcgctcgacatcaatatggtttacacatcactttcgctcttcgctctcctggcagacccattcttgtccctggtcatggcgctcatggggttccttggctcaattggttctttcacacgaatccaggaattcctcaacaaagagacttatcatgggaaccccaatacctcccactggagctctgtcactagcctatccccgtacaaggagcgtcatctttcatccgatacgtccagtacgctgggagtccaagaagatgagacaacagttgagatgaaacttgccctcccatttcttgatactctcatggtggagagtgcaagctttggatgggatcccaaagcagacccaaatctgcaggatataacattgacgttccccggtcgaagtttctccatgattgtcggtccctccgggtctggtaagtcaacactattgaaggccctgcttggtgaggtcccgcggcttcagggtaaggtgcaggtttcgtccgatagcattgcatactgcgaccaaacgccttggcatatgaatggtacgattcgggagagcattattgctatgtcagagttcgacctgctatggtataccactatcataaaagcatgtgctttagagcaagacctagcccagtggccccaaggtgaccaggctattattggcagtcgtggtgttgcccttagtggcggacaaagccagagaattgtacgtttccactcctcgaatagccaccaaggacagatatgctgataatatatcccctataggcactggcaagggctatatacgcccggaaacgaattttgctcctcgatgatgttttcagcggtctcgatgcagccacggagaaccacattttctgcagcttgcttggagtgactggactcctgcgggaagctggcactactgttgtcctcgcttcatcttctgtcaagagagtcccatacgccgaccacatcgttgtgctagatgaagaaggaagactgacagagtctggctcgttcggtgacctcgctgagcaatcaggatacgtctctagtttctctcttccagctccgaactgggactccaccggcgagacggagtgctttcccaaaccaaaaccatctcgcacacgcggtcttgccagtaaagaaggctgattggagcgaggagaatgtgcacaagcatacccgcagtcttgcaacctacctgttctacatacgcgccgtgggctggattccaacgataatattcctcgcggccatcgccgcattcgtgttctgcatttccttcccaagtaggttgggctttatcctggtgctgggcggtattgcctacgcagtcttgcaagtatctggtttgaa

SEQ ID NO: 1856 - DNA, 2241 bp, Emericella nidulans
gacctaatcgtactagatgttgcgatcaacccatctgctccgaatgttttgtgcagattaaacgacccgatcctcatcctccagagcacgccgactcggactcgaacgctccaaatccagcaggcgaaacggaaaggcaggacgttcaagatattcagcttgtctctgaaccagcagcatgcccattttgtgtccagccagaattcggggtggcatatgtaccccctcctttccgtagaggactagcctacgcctccgattcgagtggccggccaaacataggaacaccagtgtcatctacatcgtcgctatcttcggcaactactcctaccactggtcgacggcgtgcaacatcattatctgcaacagatccgagtgttataactacagacaaggtgcggccagattgggcgcagaaactggccaatgctcgtgcacatgcggcccgaagatctgcggcggctaccgctttacataccgcggcttatctaatgaattctaatggctccggaggcgatactcgaggatttagtatgaggagaggtgttatgcggcgcaataacggtggacaagactccccgggtacaccaggtagaagcggatcgccagcgctacaagcgttcgctttcttgacagataggcgcgcaccatctggacaagaaacggactcggctgaagagggcacaagcaatcttgctccccctcggaacagttcaagaaggtcacgcatggatgacttggaggagatgatgatgatggaagctatccggctgagtctggcaagcgaagaagagaggcgtaagagagaggagaaggaattgagaaaagaggccaaaaggcgagaaaaagaagccaagaaagcggaaaaaatggctcgtaaagctggcttatatagcaacaatgcgagtagctcggctctggagtcaccatcagattccagactgcccaaggttacaagcagctcttcttctatcatcggcgaagaaagaactccgccgggtaagggcaaggcagtggaaagagtcactccgtcccagagtaacgtcgacctgaccgaaactgctagctctggtgatgtaccgagcagtttcttagagcctcaacaacctcagtcatcctcgtccctcggcccgccggtacccaaggagccttccaagccttcacacctgcgtcatgtgtccagcgcttcctcatcattctcgtctctcgtcgagtccatgtccgaggagcctgggctctcggcccagccacacgaaggtaccagctcatcagcggaaccattgttcaacttccgcagtctagccgccgttattggcgacgaggacaaatcagatgaagcggcggaacatgttgaagacactgcccctcacacgacatcagaagggtcaacttcgagcgcagcgaacctgacaaccgctccggctggtgagtcagctgtgtcaacttctagtacggccgtggaaaaaggccctacggttgaagaaagccaagaatgctcggtcaacaaggagattgagacacggtccatggaggtcactgatagcaggaattcggagaccacatcatgacattcagctatctttcagtcttatcttgaacgtgcttgacttggttcaccagcggtgcaagtcatttcagtgtcattccttggattttccttgacggaaaagcgagttttatttgtttctttgtgcgctcatttgacgactttgttgacattggcataacaggatcggaggtctctttccttatatacaacaacctatagatctgagttttcttatatttttgtgtgtgtaccatcggacgggcatccagactgcatatggctaaggttgtgggtgaaagggttggtcttttggaatagaggaatgcaatccatagcgttcattgagcacaaatttatagtgttcaactctggtcataaatctagctttgacccgtactgttaacccaagcgtgattctagaaggtcctcaagctaccaccatgtcccgcaaccttgggaaagaaacacaataactttacgttagtgaatcactcatcgcttacaagggcatgggtacctatctggcctagataggtaggctccccccactgctacttttgtacgtggctgctcttcctagtaccgcaagcagttccttctgaagctggtttggagtggaatactagagcagcttcgtctagctcccctctcttcttttctatttctatttttttttcttgccctttgattca

SEQ ID NO: 1857 - DNA, 3459 bp, Emericella nidulans
tgtctcgcagattccctggattgatcacctgctcgacaaaaaccccatcgtccgaattggaccaaagccaacattgaccggtgtgctctacgccttcaaggtagttgccgagtaccaagcccaacttaactcgaacaaggttaagcctggcaacgtcgaccacactctagacaagtacgtccagctcaagaagacacatccggacgtggtcaacgatgtccagatcgtcaactggttgatgctaagcatcctcgctggaggcgacacttcgtctgccacaatgcgcgcaaccgtatactacctcgccaaaaacgcggacgcatacaagaagcttgttgcagagctgaccactgcgaatctaaccatgcccgctcagtggaaggatatccgcgagctaccctatctcgacgccgttattcgagagagcatgcggatcaatcccggaattgcgatgaacttcgagcgtgtcgcgccggagggcgggtatacattgcctgacggacggtatatccccgctggaactaaggtgggcatcaacccagctgtcacgaacagggactatgcaatttttggagaagactcagattccttccggccggatcggtggctgaaacgagatggtgagagtgatgaggagtatcaagagcgtcataaacggatgcatgatacctgcgactttgtgtttggagctggcgcgcgggtctgcatgggtcgatatcttgccatgttggagataaagaagctgattgcgactttgtacagcacgtttgatgtaagccattttgctctctggggatggctgtcatatcgctaacactcggcagctgcatctggtcgacccaaaacatgagtggacataccgaaatgcctggtttgtgtatcaacagaacatgcccatgataatcactcgccgtaagctctcggcatgaaactctcggtaaggacggacgaaggttgaggatcgagagcctttatatactacgaacatccctttcatgtgactctccttataaattgtaactcagatagtagaccttaagcctggcctatttcactagtagagcactgcaaggaaccaatatcaaattcaaggcaccgggcaaggtggaaactgtaatctgtactttgctcatgcagctatatatgtgccatgtggtctaggaaaccgtccccgcgattctctaggataaataaataccaacgcttgactaattacgcatccatcccccgctgcaaggacgattccagatcgttgtggttgccgcctacggcgcctgcttcttgaggcctaggctcttcttgcctccacactccctgctgatgctcgggaatggggatgttgcctatttgctgttgttgggcgagagattgcgcctgcgggggcatgcgcaccgattggcgaaaacggacgacttcctcgtagatcatgcggcgcatctcctgcacatcgtcaaccacctcaaagtggaagtcaaaggtggtggggcagctaggctcatcggatgcgtcgtgccaaattgcaaggtaagggtgttccagagcctcttccaccgagatacgtgacgaagggtcgaaagcaagcatgcggtcgagtagatcgagagcatcgggattggcgttcgggaacaggcgctggaagggcaccttgggcataaagggcaagttacgcacatactcctgggcacgtggtgagccaatgcggctcagagtttcttcgttcggagtgcccaggtagtgcaagatctggttgagctggtcgacatagtcgcgacccttgaagaaggggcggccacctaacaactccgccagaatgcaacctacggaccacacatcgactgcatcacgtcagcttggtcaaagttcgaaacagcgcgaaggcacatactagcttttgtgtagctctggaaactcaacatgatttccggagcgcgataccatcttgtcgcaacatattcagtcatgtaaccggcgttctcctcagggtcaattgagaaaccacgagccagaccaaaatcacaaatcttgagctcacagtccgcattgaccagcaagtttccgggctttagatctctgtgaaggacattggcggagtgaatatacttgagtccacataggatttggtagatgaaggattggtagtgcgcatcggtcagtggctggccggatcgaataatagcagctaaatcacactccatgagttctggtcgaataagagtatcagtaaccagtgagcgacctataggcgaccaatgctctaaccttcgtatagatatgtctcattgaagttgtccggtcggggaatatccatatcatagagacaggtaatctgcacccaggtcagcctcatttgtcccgtatgcaaaaggcgctgatacgacatacattgcggtggcctctgaagtgttggagcagcttgatctccctaagggcgcgcttggccaaaatcttcttgctgaagacgttggttacctttttgatggcaacgccctcccccgtctggacattcgtagcggcgctagcgtaacaatatccgtcagtacttgtgttcaagttgctgttttattgctttgattatgatcgtagctgtatccaacgctaccccacactatcacgataacgacgaggttgaggacactcaagcataaagcagaatgccagagaggcacataccaaacaatgccataagcaccttgacccagctccttggtgacagtataacggtcatcaacaatgaagtcctgattgaagaccttaaagactttccgtccctgtacttgtaagtcagacatgccgggcgcgtgagactgagattcgaatcgaaacgatcgaccggcaacggcgaagggcagtgttgaaacagcgatcagattcgaaacacgtcaacgacaacggtaagtgagagtgggcgggctcaacggatgaatggttttcgcaggaaaaagggatggaacgacgaaaaggtgattttttagcgcctaaaggaagagctgaggcgtcgagtctaggattgcggctgcagcgcgattgcgactgttgagtccgctggtgtggacggctcgatgccccgcagtgtcacggagctgctagctagctatggtcagttcttgcggctgcggctgagactagacccgtgagggagcattacaatgaaaggttctaggaagaatgcgcaaagcagagattttgaacagcgagagtcattcaggggaaaagaggagagcccagggtcgactctcggtcgataattggagacagaagggaagcgctaaaggtgatggaactgcagcagcggacaaagggcctcaggcgggtggggtggttgctcctggatagtggcacagtgtcttaggtgtgggcaagatagttcccttactgaaggagttactcaacaacaatggccatcagctatactgcacagctatcgtcgtggtggtgaccattctgttagtcaaagcaaaa

SEQ ID NO: 1858 - DNA, 3231 bp, Emericella nidulans
  unsure (1)..(3231): unsure at all n locations
acctactgctctcagcatgcttcgccgcgtcgactgcggcgtctgcgaaaacttcctcttcggcgtcgctgagagacgtcggaatctgtctccatgagcttcaaccgtcaccgaccctccgatccacctttaagaagagctcgacttctccaaattgtctagctgtgagcgcctcacatgtatttgctgcgcaagctgaaaaagcaactgtgcacgtttacagcagggagaagggtaatcaggaagctactgttccattcccagagcgcattcgcagcattgcagtcgcaggatcgaaaaatggcgatatcgtggttctaggtacagagggtggtcgtctgattttgtgggaggtgagtaagtcccttggagtgcttggatacaactgacgatgcctctcaaggtttgcacgggacgccaagttgctaccactgcatcgcatttacggcccgttacctcggtcgtcgtcgatcccagctcaaacttcattctttccggctcatcggacgccagtgtccatgtttggtcgctagttgatcttctatcttttacaaagcctccatcagggcgcaaccagcagcctccaaattcacctattcgcacattctcgaatcaccgtgcagcagtcagtgctattgtggtgggacacagcaccggtagatacaacattgctatctctgcggcccaagacaacactgccattgtttgggactatcggaccggtcatgttttgcggaatttcctcctgccggccagcgcgatctcccttgcccttgacccggttgatagagcattctatgcgggttatgaagatggcagcgttcagtcgctagacttctacaaggaacaatccattcagcatcctcttcacaatccgtcactacaggctactccagcacaggcctcctctgaagaccgctggctcccaccttccgctgacagtggcgcagcacatgcgttgaccctttcttacgacggtatgactttgctatcaggccatgagaatggcaaagtgtactcctggaatgttggaagacgaaaatatgcatcaacagtagcggacttcacgcatccggtcacaaacattatcatgctacctcttgaaggcctatatcaacaggcgacaaatttaaagagagtagcgcatacaataatcaagccgaaatacgaccatacgcttttagagaacacgcaggctgcaggtactgttcctgcagactatgagtttaacacccatctacttcgctcatcctcgcctagtgaagcgcctgctgagtcagactggttcatggacgcctttactcactcttcttttcccgcatccttgatagagcaaggtctaagtgagctaactgctatgtccttacctggatcggatactgtctctgccccgtcaatgaacgtggcaatggacgttgatacccccggcaaggattcccaaattgcctccttggaaaacgaaatcgctacgctcaaacagaaagtctcagtcagcgatgcagctcggcaatccagcactgacgaaatcacgaaactccgttcaaaccttgccaacctccacgatcacatcaatgaactcaaagcgaagcaggagcaatcacagcgggataggatacggcgacaagcccgcagagaggagcgggcaactcgtcgacgggaagcctggttcgcggcggagaagaaaggcaagaatggagacgctgtgctgcgtcggatgaaagctgaagacgagtctgagacgagcggcagcgacgatcagagcagtgatgagcaatgaaacaagactcctttttttttcattctacgtatcgatgttcctcatgtctctattacaactattgttatattcaggatggtctggcatgtttcaagagggcatgggtcacattccacggcgcaacgggctaaaagtttgaatcgaggatagagcttcaaggagcacttggctagcatatgaacagtaacaattaatgttgcatacagtcaaattcggtaataaccgtggcactactctgtacacttttaccacggctgttctaccactctatccccgtccagctcgagtccagactctggataccgggctgtacattcctgagctgtttcagtggagctattcggggttcgcgaaatcatataatagcatcatctccatatgctcaattagttccaggaatgcttcgaaccctaaccaagaccctctcttcaagccataaatttgacggtgtttggaggttcggctgttccaggcttcagtagggattcattgaagagccgtcaagtcctatacacatagccggcgatacctcagtgtatctataggctattatatacagtagaaaaccatgatcgaagctgaagagacaacgttaacctctaatacccgctcgaaccctcatcttgtacctgctcgccctccaactcctgtacaatcttaacccccgaactagccccaatgcgctccgctccagccctcaacatcttgatacaatccgccgcagagcgtactccaccactcgccttaaccttcgtccccttcccaacagccttagcaacctcatacatcaacgccacattctcaacagtcgccccagccccattaaaacccgtactcgtcttgatgaaatccgcaccagccaagcacgaaataaccgagccagcaatgatttcgtcacgcgtcaattgcgaggtctctaggataactttcaggccaactggcgcaggggcagcattccgcacgcccaagatatcctcgtagacttcaacatactgctttgtcttgagcagagggtacttcaggaccatgtcgagctccgtggcacctaacgagatagctttacgggcctcgtcttccttctcagaggtttcgtacatgccttcatggaagccaacgacgcaggcgacacctacttctggcgcagaggcgaagttccgccacggcttgctcaacgtgggctaagcggacgcatactgttgcaaattggtatttgaggctttgtgtgcagagctcggttatttgatcntggagttgctgtcaatgctattnggatgtggtcgatgnnntgcgttgactttggttgggcgtggagcttgttcttggattanggattctgggtagtgaggcccagatggaggaaatcaaagccctccattctggttgggtttggggatagacatcgcgtgctgtagctgtccaggtctctaactcaggcgagagaaagtaacagcaga

SEQ ID NO: 1859 - DNA, 5196 bp, Emericella nidulans
ggagcttcctagcaatattggatgatagccaccctttttttatcgattcaaagattctgcaccaatgggacaggagtacatatgttgggccgttcgaggtaacgttgagaggaaagacgtggcgttcaaggtgatagccagagaaacagtactgagcgaggcagaatatcttttacgaccatcatctggtgttaggtctcaaatgcaataagtacacaaaaaaataaccacgggagttttattaagccgcgtgatatccgattacgtacttgcatattcttgacatattgcttgtgggggaagaaaaacctctagagaacatctagaggacacgcttctgcaccatttgtatatcgtgtggtgacgggcatcgcaaaattagtcggagattcattctatacacatcccctgggtacgtactacgcaccgttgagattattctgccttcaacaccagtagttattggaagtcttcctgtaaggctgggggctgagattatgggaattgaggaactgcttttataagcttaacaagagactacaagagctcactttttcctggagcccggtttacggtaaaaggagttggagaaacaaaagaatagagacccaacgagtactggcatcacgggaattgacctggcaagagacgaatcttcgcagaaaggttataaggattgttgacctccgctactatctcatcaaagaaccccagtcgcaccattcccacctaagcaaggaaaccctaattgcttctgtctacacctcctgaacatgggatcttggtcgatatcctcatcaccaacttcgagtttgcgaagccgtgctttgactacgatgctgggcttcagcccaggcgcatacagtgcccgacaggccctcgaagagagaaaatggattgtcaggcattcgataattattggatgcagtctccagagacgcgttgtacggtggggtctctcgtgcatagagcatcattgcaattgcccgagagagaaaaaagtctccggagagaagaccctcagttgcagccagatctgattttcgcgtggtgtagtttagtctggctctgtctaggacggcgctgctatcctcaaagacgtcatgtagaaggagcagaggccatgcatttcccgcaatgccatgacacaaacctccgcctttcgagagaagaccctgctcccacacgcgatccgtggcaagacatacggcgcggttccagttcggttcccagtgctctagaaccagctccgtgtgcttcaaggcgcaaccaagaaggcccaggatggccggcgccccatgacacatctggaccagcagtgactggcgagatgaagagcggagtgggatcttggttggtagatggccattgtgcgcgatacaaatcctgcatagcgcgctgatcgttcctccgatctccggcagacagtcatccagttcgtccaagttgcaagcaagaagaaccggtattatcccgcctgcttcagtcagtaactgaagtccgaaggtctcaaaagtacttacacaatccatgagccctgcagaattgcactgttagcgagggctaacccttccggcgtgctacttaccatccaactccatagtacccaggcttccatggccacattaatggaagggcgtcgactttgccatggctcctcttatactttgcagccccttctctgccagcatcaatgattgaacggacaatttcaggaatttggctaattattggttggaaaacttccatttgcgcatgtggaaggtcagtcgccgctgccctgatattcagaagcgcccacagcagcccagcacggccgaagagaatctcatccgcgcccaggtcgtggccatggtagaaggcagtggaaccatgacttagtgccaaatgtaccgcattatcaaggcactcaatatcgtgagcggagatagtttcaaccctcccagtggcgcatttatggaggatcctcagtacaacagcagcgattggcgatctagatgccagaggtgagagacctccaatccgcagaggaatatctggaccacgagttgggattcgcgctctggctagacttaagaagtctggcagggagctagcattatcttctaggacacgcttttgttgtgctagacgaaggtatgcatcagcaattcctataaaatgcgattaggacaccaaatatgaaaaggctgctatgctattgaaggccatgctccttaaaaatttaaatgaagggaaagatacctaggtctccggtatacaccccgcggccatcatactcgttactcgctggagcagtagattcaatgacattgacgccgttgcaaaccgcactgctgaggacctgaagtgtccggcgtagagttgccttctcgatatggggcaactgaagatcgttgctgtaatactgcgggtattctgacatgttgatatgaggaaatgtcacttgaaagcggcgcattgagccgagtccttgaacgtgctattgcgtattgaggaggctgcaggcatccaaccccgcctcagctgtacctatgacgtataaggcagcaacatgactaaatcgcagggatgaaggctcggcaagtaatctatactgatcaatctaacaaaactgtgtataatatttaaacgcgagttacatgtgaattcccttaatgcgtttaccttgattgatatcctgatcaaaagaggatggcttggtcttcccacagcccagaatctttggcccattcatcccaccaggcctacactatgtcagtacaaagctacttagaacagaaaagacgactcacccagtcgatgccagattcatcaaataggccatagtcatacccacaacttccgccgcggtaggaagagtgataagtctctggttttgtggctccctgttcaccgccagcttggtagctccggagcatgtcgtccaatatttggtatactcttgaagtttcatcaccagaatccgatgcgttcttccaaagagaaacggagacctccagtgcctggatcagagtgtcagattcgactgctgaaaactcacccgactctcttcgtcttatcgccaattcaagagcgatggtcatggccgcaggcgccagcatttgtcgtgttcgagagtaggcgtaccaggacggctgtagtagtctttggtactctagcaatgccagagacgatgtgaggcagcgagagcgggatatgtcgcccggctggtaggttgcacgttttcggatgaaccttcgatgcagggtacagatgctttggtggtacatgcatgccagctgtaactttgaatagtcggccggagtccggggtgagctgtattttgcgtcattcgcatccactctcatatgaatcggaacatccgaccacaccttggtcaacaactgatcgatctcaatcaccttggtatagtcgtccgggcaggggccgttaatgaagtcaataacctcgcccagagcgtgaaacacgcgtcccttgataatcagatacgaggctgccgttggttcggacagtggccttgggggcgggaggcttttaatatcttctcctagttcccagtcgtgaacattaagcggttcctttgcgtccgagttaattgctggagtcatccgcgggaacccagacagaaacgacgccacttcatccatgctcttgacagaaagccatatccgtcgtctatattcaccttcgatggtcgagaaagcaggagtatgttcagggtcgcggtggtaccccatatttactgccgcccttacaataactcctgtcataatccacaagccccggctattatcgtccttcctgttaagttcggcggtcgcattgaaacgcaatgtctcgaccgtatatggcaagcatttggcaatatcaccaagtaatagacactgtgatgttcgtagtcggtacagatggaatcgttcctcagcctctttttggtatccttgttccccaagctgcatggcgagagttataattccaaggatggagaaaagcaatccgatccagatgacattgctttgagacggattgttcaggtgggtgttatactacgacgtcagattcgtaccacaatagtggagggcagccatacctcccgaataaaggttggttcatgtatgatggctacgaaacaatgagctcgttctgtcaacaatatgcgaagaactcacgaggaacggatatgggaaagttctttctatcgaagaaccactggatgagtttactcatttcatttctcggcggcagggacgacaggatctctaggatatctacccgctgaacatggccgaaaagcagactggtcccatcaaccgagttcgtcaaggtatgcgagacaactgattcgttcgggggctcatcccatgccgccttcagtgcgctaatctgggctagttagtgtggcaaccaagaggcacgggttaacgaacttctcgcagcacatcttgccagtcgtccgctggtttatacacagaatgttctccgtccaagaaggtcctgcctacgctagttgaactacgagcatctacacctctcagtgctgaagagccactggagaagccattggaagatggagcaacggttgacgggtcactctggttgcagctgataagtcgcttgaccatctcctccaagcggtcaatccgttcgcgcatcgagtggccattctgttctatactagaagatgacagagctccatgtgtcgatctctgaaagatacatgctgactcctctccccgagcagtacaattttgacacggcttctctctattacatttcaatctggttttgtcagcacctgacgtgttctatggggtttaggggtatctagacttcctgacgcggcaggattcgcaggacagagggatccgccgccgacgtcgcttagcaacccgggtttctgtggtcagagtctgcatttaggtcgtcgttgagcttcagcggggtgtggacgaagcaagaatagtggcacgcccgacgctgcgctctctccgtatcgagaaatttcgggaatacatattttccggtgccgtcatatcatctgtctagtgaattgcagtaaatgaagcgtttttataagtagcatgatctaagcctggattcaacagtgactctgtgtcctttggtatgtcacgctttacttttgcttaataacaggccaatgagagacaatgtgtatatctgactgtttgttac

SEQ ID NO: 1860 - DNA, 2533 bp, Emericella nidulans
aatgtacgaaacatcttctctatatcaatacgtcaactgatggtacagcaactaaccccctgccaatctgtttccatcgggtcaggctctaaggaaacccggcaaaatgcgaccgctgctgaagatatcgaacaggaagcagttgaagcaatgttacaaacgcgttctcgatatctcagatcgaatcctgtcgttagtggaactgatctggatatacctcggcctggctctctatatgttcgcgaccggcatgagtctgatctaccagacgcagcacgagcattctacgaggctgcagctaagatcacagggatatctctttccactctcgtccgttgtgtctcccaagcagagcttgagattaccaaatggttggagaaccaaagacgcatcaagcatttcgccgaacgctcgatgcaggtagtcgagaattcggatgctggtgagatggaggagtttagcgagcaggaaatgccctaaaaacttgcatatttaatctttcttttggcagtgaagtccaaatataatctacaccaacaacagagtcataataattgatcatccatcctcttgtattccttgaatctgagtaggttaagcctcgatctgcggtgtatagtgcggaaacaatgtaaaatgtggggaacaaattaggcctgaggccgcaagcactaaactagtagttacgctagggcctagggtatgcccattcacgtgcactcatccaccgcttgctaagcgagacactccattttgacgggcattgcctcattcgaaccctccaagcgcccgattgtcagccagcaacaacgaaaaatcgcagccagtacgtttaccccgtgatattaagcagtgatgctactctcttggaactgccagctaacatatcttttttccgcgcctttctagtgcagatgtaggtcttccgaacatgccattaaccccgttgccatccacaactctcgtctatcgtcaaccgaatttacgcaataaaagaatgccggaaaatcgagggtgaaagaagagggctatgaatatgtgctgactgttcttctcgaatagtttcgtcaagaccctcacgggtaagaccattacccttgacgtcgagtccagcgacaccatcgacaacgtcaagaccaagatccaggacaaggagggtatccccccggatcagcagcgtctcatcttcgctggaaagcagcttgaggatggccgtaccctgagcgattacaacatccagaaggtatgaggcctggtctaccgattgagttttgcgcgtggtatagatttgcggttgcggaggcggaaggacggttatcttgtgtcatagttttgacgccagttagccgctcctagttagaaggagaaggggtgtgtcgcaaggagaatttgcggaagaattttgattgggatgatgacggttggctgactatgcctctctcaattttataggagtccactctccacctcgtcctccgtcttcgtggtggtatcatcgagccgtcgctcaaggccctcgcttccaagtacaactgcgagaagaacatctgccgcaagtgctacgtacgtctaccggattaccactcgactcagttccatcttcgacgaaggatttgagaactaatactagaataggctcgtctccctccccgtgctaccaactgccgtaagaggaagtgcggtcactccaaccagttgcgccccaagaagaagctcaaataaacgactcgttcatgcttacgtttttttctgcgttgctggtgcggaagggtgtgattgtgatgagccggattgtaacgctaaaaaggttcatttttttacaagcggcgttgaaatgctgaagaaacatcagaagagctggagtcgatacattttacatggctactctcggaaccagttgcagtcaatgaaacaattgtaaaatccagtgacccctcaaatcgctatacttgtcttgtagataaatgtaacagattacagtacaggtgaggtgtacatggtgaaaagacttgaaactgcacaaattggatacacgtgctgaaatgctgccggagcaattcagggttcggatatcttgaagccaccaaacaatctggacagatcttgcattcagaacatgcgcttgtcgtggtcatcatggtcgtccttatcatcatcgcgacccttctcactatcacccttcttggaaacagggcttccatggcttcattcacgtcagtcacacgagctcagaaacactagttgtggggaaggggaaaactcacgcgaagaacaagatcttaatcgcaatcgcaaacccagcatgcaacacaatgaccaatatcaacagcgcccgactagccttcgcatccgtcgcactaagcacaggatacagatttctaagtaggaaaaagaccgtccatgcaaagccaacccccacaagcgcccagttcaacgctgtcaacggactccaactaacaagcgcgaccgcaatccaaaccaaattcgagtacccgtagagcgcccagcactccaccagatcagctgttgagct

SEQ ID NO: 1861 - DNA, 1902 bp, Emericella nidulans
ggtggatgaaaggatatagtaatagaagggattaaagagggagatgaggagataaataatttactaaaaaagaatgaaagttatatataatataggatattgtgtgatttatttagttatagatatgtaatatgttattaattgtttatatatatagggaaaaggtggattgttataggaagggagagtaaaggttagatgggggtaaagtgtaatagagataagtagatgttaattaatagtaaagggggtgaaatgaagagagtaagtgaaaagatagtgagtaagtatagtatagtatgtagatgttgagaaaaggtagggaggtatatgaaattggaattatagtagaataaatattgtaaatattaaaaaggttaaatggggattgtgaatgaaagaagtgaaaaggtaagattatatttagataaaaggatcgggataaaatgtagtataaggtagtaataagatgataggtatagataatatagataaaattgagttgggatatataatagtggagggagaatttaatgtataaaggtgttgatgtgttaagttgtgaaagttttgtgtaaatattgagtagtgaattagtattagttatatgagtaatagaggaaatgattatattgtgagaaattgtatagaaaattgataagaaggtgaataaataattagtaaatatatgggaagctttatatgaaagtagaatatttaggaagaatgaactcaaacctttagcttatctaagagtaagtttattccataaagaacgacctcctcaatttgaataatggggctaggatcgatttttccatccttcaaaccagaatgcagccacccatggaagacctccttgatgtgcttactccgcgccaccttgtccatggagggaaagttgaaagtaatttgggtgttatcgagagtcggatggccttcggggagaacaggcgaatgcgctaccttagcaaaggcatcccccttagttccctttagaatgtctaacgtaggctgcagggcgccatccacgacacagtgcgccgtgtgcaagtatacaccatccttcttcacggcgtcgacaatcttggagacaacgtcgctgtctttataatcaaagaccgcatcagctccgagcttcttaactaggtcatggtgcttaggactggccgtagcgtagacagtaaaaccaagggtcttggctgattggacggcgaatgagccgacactgctagacgcgccccagattaggaccgcttgcttgtccgcaggagtataccgagtatcgagcggaataccgatcgtagtccaagccgttagagccgtcaagacagccagggggaagatggtgccttcttcaaacgagagattgtctggaagggggatgaccgcttcggactgggccagggcgtatttttggaaggctccgtggtcgggggagccgttctggtagaaggacgaggcaaaggcaatgactcggcttccgggaccaggcacagagcctgccgtgacactcgggccgagtttggcgaccacaccagctgcatcacctccgatgaccgcagggtagattggcaccggtggcatgccatagtcccgctggtaataatcacaggggttcaaggccacggccttcacttcgatgaggacgtcgttgggaccaggctcaggggtggcccgcttgccgacggccaagggaccgcccggcttggggagaatggcagcatcgtgctcggcagtcatggtggatgttggacgaacagactttgtgattgtttttgggagagtcttccacctgaatatgcgaagcattaacggagaaagggatgatagatggtggtgtgagatatatagataggaagtgtcccaccaccggtttatatcgtggcatttgcttgtgct

SEQ ID NO: 1862 - DNA, 2254 bp, Emericella nidulans
tgtcctcagcaggagcgaatccactgccagccccgagaatgacgttcgcgcagttcctgagacgggcgtaacagtcgagaatcggtaaatggaagtcctcacaagaatggtgtccccctgcacgacccccggtccattggatcccaacggggagtgtcggatattgccttgcgatggtaaggacgcggtcaattgcatcaacagaccccggtttgaaccaaatatgtgaaattgccaacatgtcaatccactccttcacgacctcgggcgatgggatcccagcgccgaccgttatcccatcaattggcaagccttcttccataatcaggcggcgcaacacctggatctgccaggaaagtgctttgggggaagcatagatgacattgcaggtgattgagcgatggggagggatggacctcgacagctgccggagtgctgtttctagcgttgctcggttgtaatagccaccacaggcaaattcaacatgatagtccgcctgaatgatagccgctacaagctcaggtgagcatgttgttggcgtcatccctgccaccataacatgtggtgttcctagcagccgcgtcattttggtttcaatggatgcatgagcacttccctcagctgctttccgtagccgcgggcgatatttgcgaccccagtctttaccaagtgggagagcaaaagcagacagattaagcaacgatagattcgaagccatagactggccggacagattaacgacgttcatacccgttccctccaaaacatcctgcaccaggctcccaacagcgccaggcccaaatgagagcacatgggtagcatcgttcattgcccaacacaaagcgggccagttaactcgctcaacagtaacggactgtatgagggtcaaaagaatatcgtgcgtgccataatcctgcaggttccggagagatccattcgcctggcagtaaactggtatagcgagatcgttaccccgcaagcgaaggccgccaatggcatcagtcactcttagctcgactgatgacagaagagaagagtgatagggagctgacactggaaggaactggacatcgacgacggaccgacgcaggggaaagggaacgcggctttggtcgagctcgggcgatgccttgacgctacgaagtgctatgcatactcctcgcagagcatgtggtgctccagccagaacgaacttgttgtggccatttataagggatatatagagcgaatctccaccttggtcgttgagctttcgcaccagccgctccaaatgattaatgtctaagcctgtcacactcagtaaatgtgacggagcgccttcaccattttccaggcagtcgataacttcatttgcacacagaatacttcttggagaagcatggtgtgactccagcccgacccaaaacgacagttgcagggcaaggtcagccgcgcggtagaaggatggccatccgtggtcagtgtgagatatggcgattgcggcggccacaaatacaccttgagagtgtccgatagctccctggagcttttggcggactgaccagggtccagctggaggctgtacgcagtaatagcatagtgtaggaggctcagcagagtgttgattggaaagctataaggagacagcgccaaatcttccggcagtggtgcggatgcagcagcgtcgttgagccaggcctgtaattggaacccgcgcccagcaaaaaatgacgatcggtgtgggatcgctgctagtgattctagacggcgggcagaagagtcgagcaagtcctgtataggggcgcagtccgcgtaggcgtgcgagagatggactaactcatcgagtcccgcccaattactgggcccttgcccaccaaagcacgcatataatcgtgataggccagcgtcgacagcatcgagaaacggtgatggagtcattctctttacaggtcgtcaaactgtaggctaacagatcagagccatggctgggaatgagcaagtatatcgtgtagccgggaccaccacctatacgagagggggagaaacaagtcagcgcagggtcggcttacgagcaatcggagatcgggcgtggcggttctcaagtttacatatcagctgttgttcttcagtctttcctgcagaactaggccataacatgaatacagccatggcgatacgaaacatggaacagacaattgcctacgagctactgattgagcttttatcgtacgtttccttataggtgttgagcaaaaaactgatcagcagcagccat

SEQ ID NO: 1863 - DNA, 2639 bp, Emericella nidulans
attggagttactacaatagttcccatttgaggaattagaatttctgcaaggtgtagattaattgtctggttaggtggcttgtccatccaacccgcgttattcctcaaatcaagccctccaggaactgattcagaatattaccatactgcaggaaaccccaatacaacgtcagagaatatgtgctttgatggcttcaatacgagaggcccaatactgagggtaggtatactggtgtagactcagtatacaatatacgaaactttttacactactccgtatatctatcccatctagccctgtggatgctgactatactgtgactcttgttattagctaagttttacttcatgagacaagatataactggattgtttcatgataacaatcccatgttaatagaaatgggtcactgtcaatcaccgattgctctttgctgtattaattttcctaaatttagtatacagtgtctcattcttagggtggcatgacgctgtttcgttctgtatcagacatatttcagctggatatattatctcctagtcccggagaaactctgcagcatttaatccagaaaagagccggtggctaagagacgggcttcagtggacttttaatcctcatctttcccgtctacgcagcacagtgtccagatcccgctggcaatactcgacatgcgcgttcaatcatacttgtcgctcttcagccttgttggcgcagctctctgcgcgcctcgtgagcacttcaagcgcactgccagaacgtctgctccggccggctgtctcaccgttggaggaagcgggacctactcgacgatcggcgctgcgtttgcagctttgggctcatcctcgtctgaggcctgcatctacatatcagccgggacctacaaggagcaattgaccttccaatacgctgggccgttgaccctctatggcgaaaccacggacacgagcagttacaagaagaacaccgtcacgataacccatacgatttcctcacctgaagcagggtcccttgttgcgagtgcgactgtcaatgcggccatggataactttaccatgtacaacatcaatgttgtgaatgggtacgggaagggggctcaggctgtcgcgtaaggattttttcatttgcacttcattttcatctccaacttccaatttcatacgattttacttattttatttttattctaacgaatgtatcacactgctgctgacgcctacttttgcagactggctgccagcggagaacgccagggttactatggctgccaattccttgggtatcaagatacgctgtacgcacgcgtgggcgtgcagtactactccaactgctatattgagggtaccggcctcttaattctttttctactctccgggaacagcactgaacatctacaggggccgtagactacatattcggcgacgcaagcgcctggttcggcgaatgcgacatcgtctccaacggtgcaggctacatcaccgccatgtcgcgcgagacagcctccgatccggcctggtattgcttcgaccactgcaatatctacggaaaatcggggctggacttgaccggcgatgtatacctcggacggccgtggcgcgtcctcgcgcgggtcatctatcagaactcggagctgagtgatatcatcaacgcggctggatggacgactatggcagaaggagccacgccactgtactacgagatcgggaatacgggtgacggggcagacacgtccaaaaggctgtatcttagcgagatcagtgcggctgtcaccaaggctacggtgctggggagcgactggacggactggcttgactggagctattgagatgagtctaagaatgattgcgtgtaagatgaatgcatcctgcaagaaagtgagataactaagccacgggaaactgtctggatgccgtaattaccccgttcaatggcgttgaggatcattcccgagactctgtcccactgttttgtaggagcgtcacgatatgtcgtcaaagccagaggctcttacatctaggtagcgtctgccagccctacgatggtccggtacaaagcatggtggtatacactatcggctctctgacattatggctttatcaacgcaaggttaccattcaaatgtgaatacaggtcgagtcagttcaaggggtaatgcagacataaatcagatattcgcttgatgaatttcctgtaagtgaaccgccgaagcttcaaaattgctttagttctgtaaggcaagaatgacaggacccctggtagtaccacagattagagagacaagggcgaagatcctgtttccacctggcgcaaagtccaggttgagggactgattccgctatacaacgagggcttgcaattggatggacgtgatcctgctctatattttaaccacggttagtggatgcttgcggttggaatagtgtagacagtagaatggcgggtaggtaacggaggacaccttcgcaatatccacgggtctgagtcctctgaatacttaaactgaatatctaaggcttctataaggtctgcaaaacagcaaacgcccttatatgtctaatccatggcgttcgccaggctcgggactggagtggaggaagatatgggttcctccgccgtgccgataacaaatattactggtc

SEQ ID NO: 1864 - DNA, 2585 bp, Emericella nidulans
aatatggtaacagctcaggctcttttctctatctcctcttcttttttccccctctcttctattgacaatagatttgctgcctaaactcttgaataggctgcgtttatattatccctgtcacacttaccggactcgcctgcgtcagagtgagtctgagttgcatttgcacacgcgtctcattatcgtgcatcgcgcctggttgcctttcttttcttttctttattttcctttcctccctctccgttgtctgtccatttccaaaaaaaaaatattagattctgagtatgtagttatttgagcggcgcaagactatagattggagctgaaggttagggtaaggggctagtggttgaggttggacagaattgaatttactcagaaaagctaattaataactagctgatgcgcaggtggtctgccgagcacttgcaatcagctattttgcttataatccgttgaaatacgcctgcactcatcatcgcagacgagtaaaacattcatcatttgaaattggtatcacccttgattaacgccagtccagaacccagctagaggtattcgagcaacgcagaaactcccaaaaaagagaagagaaaaggaccagagagctatgtcagatcttttccacaaactcaaccgcccgcccggctcgctcagctttgcctactgtagatgccagcgcattaccatccacaccatcagacctggacatagcatcgtcattccccggtacaggctcgccctgcagccgaaggagtgtccgcaatgtatcctcgtaaacctctgccatctccccattccgccaccgctccgcttcctgttctgttccaaggggaatatcaagattccactccttcctggagacttttccccgccgtctcctctccccttcattaatattagcaacgtcttcttccggttgcgtttgcagttggtcttgatttctatccgcgtctgcatcgttcattccaacatccgcatcgtcttcttcattgttgaattccttatcctcctcctcaataatcctccccagctctttcgcgtattccctcgccgcccgtcgcggcgcatccctcctcaactgcgcgaccgttgtagttaacgactcaagctgcgcatacatcgacgcaacccgcgccgctaactttccgtcaaatggctcgtactccaccgtttccagctctgttggcgcagtaaatgctgctgggaaaggaaactccggtgatgtcgagtccagcccgttgatcgaagcggaggcggatgcggatgtgaatgtgcgcgttatgacctagatcgaataagaaaacggatctgttagcacaactgcatatctcaatatataaaggtgcattaagaaatatgcagatacatcgtccacaagttcgcgcacgcgctcgcgcatagtttcgggctcattgtttggggctgcggaggggggtaggtgcaggtctagtttttggcgggagagagcaacggtgttgctgtgaaggtaggtaaagtctgcggcagattgaagttcgattttccggtaatgcgaggagtccattgtctgttttccagcgagggtgtggttctgaactggcgaagatatgaacttccgcgtgtattgtagataacgggcatgatataagacggacgcgtcggactcaggatgggccattagcggatgttaagtgccttgtagcctaaatatattactgcctgaaccatcaggctacaaactagaaaggggaagcatttctcaggcaccaaacagcagcagatcagccccacaaccgacgtcattctcgatcgatcgggcttctgctttgaaacgttcagacatgatatttgcatgtttcatcctaactagagagaagccgccgctacctacctatttgtcctaaaatccatcaaggattaaccaggctatgaatatgggcttccgaaatctcatataagcaccctagcgcgctatgcaatggcctccaacatcaagctcatcgacaatacagctcctgccgagcggccagccccagacgacgcatccttctccgagataacaaccaccaccagttcagtgtctaggttatggagtcgaccatcgatccgtgcggagcgggcgaagcgccgttacgcgaaatggcagcctgagcggctgggtgttgtcgctagtggaagcaatgacattgctgagcctgggtcggtacagccgtcgtcgtcatcggacgacgggtgaattattgcgtgcaagaaccgatacaaataccctcaccaatacaagcgcaattccggagaacaagagtcatgtaaacgatggcaacgacgagagtaaaaacccgcagcgtattgcgacggaacaaatacagcagtacgatttcggcactggtaacgaagcagaatcaggagctgaaaggtcaactactcaccaatcaaaaaatcaccctaaaatctgtggcctaaaaccaggtagcgaactggacatactttatgaaaatcagcgcggttggttcttcttcggcgtcccgctctactccagccagtccctccttaacacggacccggctccttgggtgaatgccacggggaagcggagttttgtcgat

SEQ ID NO: 1865 - DNA, 3446 bp, Emericella nidulans
accctcgcgattgctggcgacggtgatggtgctccatcgaaatgccagagcgccgaacatcctccaagcggataacgatctctgagcggcgccgaagaggattgaaggtgatatggtgcggaatgagcttctgctcgagtccgcggagatggaaatagcggcagtcacggagcagctccgcgcgttgcgcctcgctctcgacatgcagcggatagccttggaggaggtggacgagctgcgcgaagacgtcgccggagcggttgggaacgctgggcggcacaatggctggcggccgtaggaggccgcgtcgatctaggccagggaagacttccgccggggaagcaaagaaggcgccgaagccgagggtgaaaaaattagggctatcgccgggcccagagaagatgtcgcgcgaaatctggaaatgacggtcgccgatctggattataatctgggattcgaagagttgggacatcaaccggggaactgcggttaattagttggtgctttttaattgtaaaactggtattaggagagcgtacggctgtagaattgcgcgtcggcgaagagtttaacgaactcagctccatctttggggaggcaatggtatcctagaggtaatgttagcctatcttatcgaagccttggttgcgatagcttgggctgaataccttgcagatgtcgggcgatttcccggaaagtgacagggtcgcggtcgatatatagagtgcggatattgttcccatcagggttctggctcaattgatcttcgaagaatcgcgagaagtacgagggggctcaacaacaaccgtcatcataagaacgaccgtacggcgctgggaaccagatccaactaaccatcagacgcaatggaggccccagagagacggaagagctttgtgccgatctggatagagaagaccttctcgggcggaagtgtgcagactggtggcgatgtcttgtctgctgccatcttcgttcgctcgattaaaacgatgtggaacgattatggctttgccgcatggcagggtggtggattgaactcgaggaactcaggctggaggccggcgaatgccagcgtagtcagatgtcaatagatgtcgatggctttagctatatatcatgagagtgtctgatgccaagaagtggaaggcatagaagctggaatctaaagctggagctggagctcaagctgtgtccaagtcacgagcggccggagcgatcggcgcagatattccgggtcccctcacaaacaattcatcatgaattgtgatgattctccccatcagcattgaatgcttttgctctgagaaacgcttgaaatggtctccaaaatgacttgattgagccagcagtttctactacggagtatcgaccgttgtttccgcagctctcccgaatttcaataatcggtggagattaccccggtttcggcgaccatggggcaatcactccacattgagattctgaaaagaaactaggtttcgataatggcgtcggtttcgatttagtgtcgctgaggactggagatggcgatgcggagagtgggaagcttgcggtttcacatggccacgggctcggttgttcgactgtacacagtactaaaaagaagtatggacacaaatctcctttcccgcgtctcactccactaatgcactactactatatttgctatagtagcggtaggccgtctactctgttcgtgactcgactcttattcgtatgagatcctctccgcgaaaccagttgatttgagtggccgaggcagaatggcctgatcctcacccactgttctttcggcggacctgcctcggttgatcggccattgtggtccaagcccccgagtgcctctccatccctcctcgacgctgctgcgacgaacgattgattggttaagggtcggggaagctctagccagggttggtcgactcgaatggatgtagtcttcattgcttgctaggtacgggtacatgcttacagaggctatcattcgcaaggactaccccttccagctcgttcttgcctcgagtcctcgacctccactctttctagcccatcattctggggaaggtgctctccgcccgccctgttgatgatctacactgcctgcagccgtatatcaattttcccttcctcccacttcgctggctcctctcccacaggatttttctatttgcgaggggatcgcatttctattcttctgcccactctcgttggttgattatccttacaccgcttgcggagttgagcgtcgccattgtcgtccgcaatgacagaacaactcgtttcgttcacgcctctggtcgccccaatatcccctgtctctaacgaacaggtgtttaacgacttgcaatggaaaacactcttatctttggctgatactgtcatcccgtctgtgcgtggcccccgggcccgcaaatcgcgcgctaccaaggttgtaccacaggcgaagctagacgctgcgctcgagactttaagggcctccatccgcggccccgacgcagatacccttgtaacacagtacttggaggaaaatttaacctccatcccggaggttcgccaagcattgcagcggctcttcactcagcatgtgcacaaggaaggacgaaatggactgagtatgatcctcagtgctttgaagtatgttgctttcggtcaattgccttttgtgtatgctgatggtcgtatagtacgaaagccggctctttgctacttacgggctcgatgatccctattcaggaccaacccttctatgtccgagagcagattttccagggctggagtgactcgcgcttgccaccggtgcgcgccgtctatcgcgccctcactgcgatctttaagaaggtgtgggttacgttcagtcctagcctttatccgacgcttggagttccccatgttcccatctatggaaccccgcaaaatggcttccaattcgagtttttgcaattccccccagggcagaaaccagagatgatcgaaacagatgtgctcatcatcggaagcggctgtggtggcagcgtcgccgccaaaaaccttgcagaagccggcaagagggtcattgtagtggacaagggctattcattcacaaaccagcatttccccatgaagcccaatgaaggtttcaacaatctgttcgagtctgctggtgccgtcatgaacgatgagagttcgatggccgttctctttggctctacctggggtggtggtggtaccgtcaactggtccgcctcgcttcagactcaagcttatgttcgccgtgaatgggccaagcgaggcctcccgttctttacctccttggagtttcaaaatagcttggatcgcgtctgtgacaggatgggcgtcagcgccgaccatatcaaccacaacaagtccaaccgcatgatccttgagggatctcgaaagctaggttattcagccaagccggtgccgcagaacaccggtggcactac

SEQ ID NO: 1866 - DNA, 5628 bp, Emericella nidulans
gatcattttcccgtctttcgatagaataatggcgttaatgggctccgcgttgtgcttcaccatatgcatcatcttgccgctcacattttatctgaagatattcgggaagaagattgacccaagggaacggatcctggattatttccttctaatcatatcctcagtgctagcggtcattgggaccgtttgggcatttctaccacaggccaccattgttccgatatgagtttccatgcgagatagtttctgtttattggcttccactcttgataacaatagcaaaattattcctcgttttccctggatttagaagctccttcttgaactgcttgggctggcatattccgtcgtactcccaaagctggtatattaattttgtcgtttgcttgtcctctgccagagaaaaaccaatacttgtcagaatgtcgtgcagtctctgctgagtaaggtatcgcgagtttgtgacgcagggagcagggagcacaaggaacaaccttggcacaatagttatagaggagccctgcggtggttccttggtcaagaaagtaacacaacgcttcaacatttctcctcgatcgactggatcagggacgtaattcagcactagggagagtgatatgatgtgaaaccgttcgtcattacttaggggaagcggtcgttccatgaaatcctgcttcaagatcccgggttcctgagagtctaaatcaattctcgtgacatcgaggtgtttgtgctgagagcatgcattcttggtactgagcgcaccgatctcgaggacccggagcttcagagacgtgcttctcaatacgttcaaactagggctgatccagttgacaaggactctgcttgagtcgccgccgcggtctagagattgaccaagcttgcttgctatctgataactttttagtccaccgtttgctcgtatatccgcctcgagcttgcgcactaaatcctggtcgcctgattttagtcgttgcgctcgctgttttaaaagtgtgtgatgagagcgtatgagagttcgcgttgcctttgctgataaggctgcatttttcttctgaactgttggtgggcgagtgcgagaaagtagcgcgggacgtctgttctccgattttttcgtagccataatgcatgtttcaattgcaagatgtacattgtcatagtaaggtaatgtatggcttcggatagcagaccgctttttttttcttctcttttctgcctgtggtgaaaggcggtaaaaaacgaatcacgccaagattctaggagggctggtcaggtgacccacagaggaagccgcgagggtttttgctaagcgaagacattccgaacaattcgactttcgacactgcgacaatcacgacaacagcgccaaacgacagccatggcccccgttcagaagaagacaggtatgcaagcttgagcgatccagaccttttattctcgatatctgttgtcgattttgggatatgttcgagagcatggagtcgtgttatacaggaattcttcatattcgtcccgcgcaatctattccaggatgaaggaactgaaagaaccacgtatcgactcggttatgcttttgtttgattccaagattccctccgacaactatactgcataccgactcgaaaattcaattctaaaataaatcactcacattcctttttctgaacaggcaagtcgaagcccagcgacaaggctggtgctgccgccaaggcagtcttgaagggtgcaggcgtacgtctaaaacgtcctcaattatgaattatcacagaaccctatggctaaaatgttactcgacatattcaggcgcacaagactcgcaagatccgcacctccaccaccttccaccgccccaagaccctccagctgtcccggtctcccaagtacccgcgcgtgtccgtccctcaccttcctcgcctcgatgccgccaagatcattctctaccccttgaacaccgagagtgctatgaagaagattgaggagaacaacacccttgtgttcatcgtggacgtcaaggccaacaagcgacagattaaggccgccctcaagaagctatacgatgttgagactgtcaaggtcaacactctcgttaggtacgctccggaagatcttatacgaaagaaaaagcagcatctaactagaatacaggcccgatggactgaagaaggcctttgctcgtcttacccctgatgttgacgctctcgacattgctgctaccaagcttgctattgtctaagtgattgattttctaatgggtctgggaaatggttttcttttgcgcggtggcttatatatcggccctacagctccctgctgttgtgcgataacaaatggctgaatgaataaaacaaaagagctttgatgcacgagtataccctgtgtagttgtcagccaggtttattccatgaacctctggagagataacagtagtcacggttctatacacggcgctgggaacctaaagtagtttgagaatatgtaaatcgaagagaagacttaagactgagcttcattcaaaatgtattgcattgctatagtacatacaggtccgccacatcattcacaatacaccaagtctccgtgtctacagtgaccgcaaatcgttccgaccagatggtggcagttataagacatcaagccctgaacctctataacctccgtgaattactctagtcggaagtaatatggacagttattgtttctgcatagcttgcaaatgcttgagtacggcattgttggtgtccagccaacggtcgacacagttcattgcgcaagcttcttcgctcttctccaaccgactggatgtaaccttcgaggtaatgcacttcttccagcaagcatcggctaggtgatggacatctaagcaacacgcgtgtgttagcagaggctaaatgagcaatgaagcaagctcagcaacccaatggttgagaaagaaaaaaattgcggacggcgtactttgctggatagcggccttctgtgattctgtttgcaggatctggtgcagctctttttggtcggcttcgctgagcttgctgacatcgagggtttgttccattctgtcggtggtctgctggaaattgctctgctggaaattgtaaaatcgagtttgctggacagataagagtggcgggtacggagtagttgtcaactgagatgttgctgcgccgaaaaaatgacatcgatcttccagagctagggcggtgagagcatgcactatctgataaggtcttagcctggttcttacgcttcttagagctctaatttcctttctccgcgacgttgagtttgacttccaaacatatcttttaagcgattccggtactctctgtctctttgaagatcgatttttcatcaactgaatcacgaagcccataaagaagatgcctccgatccgcacatctcgcaatcgcaagccacccccagcgggcttcgacgatattgaagacactttgttagagttcagcaataaaatgaaagatgccgagaatgcgccgcatgagggaaagaagaagcacgaggtcctgtggcctatcttccagatcactcaccaacgtcagtatctttatcctagtcttcatacaccattcaaagttccaactccctgaacttacctgaaccttatcaatataggctcaagatacatttacgatctttactaccagaaagaggctatatcgaaacagctatatgaatggctcttgaagaacgggtatgcggatgcgaacttgatcgcgaagtggaagaagcaagggtacgagaaggtaagttcttcgctgttatcactcgtcgcaatatatatgaggccggactgacaaacttctcagctttgttgtctccgctgcatccaaaccaaggaaaccaactttaacgccacttgtatttgccgggtaccgaaggctcaactaaaggaggatcagatcatccagtgtgtcagctgcggatgccgtggttgcgcgagcagtgactaagacttccttacggtgctttgtgcctatatgttaatattgccacacatcgttgaagaatgacagcgggttcgagtggcatatcccttctgcggtctctcagctgtgcgcattatgcatgactcgatctggcctgggtgtttcgacctggggttcgtgaagacagacgttcgacactgcgtggacaaactggtaaaccatagtacctgtccctgcagcaactctgtcggcccaaaagcagctggtcagcagccttgttgttctcccggcctacgtaggagtcagtctcgcagacggtgcggcgtgccaattatccctatttttcacgtatgttctgtatccgaccttgcgttgggacgaaatggtacccctgtgctggcaccgaggaaaccgggcacggctatggtcgatagacgcaggagttttacagttaggatgtgtttacgggcttttccataatcagatgctcaggtagatactatctcttaaccaagttcgaataagacacagtcgtaatggcagtgacaaagatagcaatgaagacggcgaaaaagaaacatgctgatataaacgctgcatactcatgtatatcctaacagatatcgtcgtaaaggtcgtcataaaatcatctcaggtaatcaaagccaacaacgacgagccctacctccacccaaaactccagggagaatgattgtgaaagcaccaaaatgagcggatatagagaaaccccggtaaacgccagctctttaatcttaggaaccaatgggtaagtaggtattaggacatgtgcatggccaaatccaaagtgaacgcccgttgcgggaaaacaaagaataaacaaaactcaagacaccactgacatgaacaaagacattttcgtggacaactcagatctgttctggtaaggaggaagataaagcaacaaggcatgaagcgtcaaggccgcgtgttgctgccgcgctgaaaagttggctgtgagatatgggatcgagatttcgaggcatcgtccttgctcgaaccccctattttttggaatccttgtagaaggtcgacaccgtctacttcctgtgggctgtcatcaaaaagatgccatgagaaaaaatcatcgtgcgcagaatcaatgaagcgtccagagtcaggaagttttgacggcgagtcagaaaaaaaaagtctttttgacttattcggcgataagggcttaaggcccccaatccggttgttagcactcaaagcagtgatatctgcgagggcatttccagttggtccatgtgcttcagtacgagcacgtttagccgagcgtttttcaggggaaccgtaagccggattagatacaggctcagtagtcgggtcggcaaaaacgtcgaaggaaacatgaagaccatcgtgtggagtataagcctcgtcatgtatgttgaaggcaggactccatggaagatcttcatccaggcctagtcgctttattggggagttgaccatgtgctggattttcttgcggtggtttcgaagattagtgtttggtgacactgatggaggcggtttcgcaggctttttgaacttgataacgggggtcagggggcctgcaagcacgtttatatattcgttgcggaccggagaggaaccaacaacgatccctgtttctttcaagtacccagagtgacttggcgta

SEQ ID NO: 1867 - DNA, 5675 bp, Emericella nidulans
tgggtggtgtttacatgctttttacgtcgtccgctcggcttgaagctaccacatggcagtctcggatgactctttttattgcacacggtaacgatagccagaggggtcatattgtcgcggccgctaagtttggattcgccctcgtgaaccgcaatacaggcgagctgtcatacatcgctcgcccgtgggatgaaccagatctgctcagaaggtgagttgaattgtgctctgtgaatcgaacgagttcctgacccatataacagaatgcgcttcaacgatggggcggtcgacagcaagggccgtctctgggctggagccatgaacgatcccaaggtccaaagtctgatcaatgaaggggtgcttttccggctagatccagacctgaaactgagtcgtatggttgagcagttgacgataccaaacggtattggctggaactccgccaacgatacgatgtatctgacagattccccaacggggaagatcttcgctttcgactttgacgagagcactggagagatcagtaacaggagagtccatttcgacactggagagccaaaagaacctgacgggttcgccatcgacagtgaaggatgtatctggagtgcaatctacggcgggggtaaggtgatccgcatcgatacccaaggcaaagttattggcgagatctcacttcccacccgaaacatcacctgtccggcttttgtggggacagaactattcatcaccacggccaaggacgacaaaaatgacgacaagttcccggagtcgattcggtatggagggcatctctacaaagttgatgtgggagtccgaggacaaccaagacatgagtttcgcttcagtcaatgaccattactcatgtgaggataagccggagtgaatcatattgttgggggttaatgattggaaatcattattgctgaaaacggtgctttggatcccgaggtcgaaagcctcaaaatgccctaaagctcaggtcctgctgccctccagactggacgaaattggtccctttcggatcagtcacgcatatatttcttagcagccgaaaccgattcaatagttctccgatctaagcatcttacccaagacctgtgtaacaatccccaaaaaggggcagcgctgaatccggcctcgggggacgaggtacggttgtgctgagaccaagcattgtcagccctgcttcacgccgttaccatagtacaaatgttgagcatacctttaatgggtcctgaccctttgaggcttaagctgatatcctccgcggaggcttggaccgcaccaccgaggttgctcgtatcagttgccgagtatccactcgtggctagcccactgctttacccaagaaagagaagtactccgtacggacaaaagtacttcgtccttccagatcgtctgtgcgacccacgtttttgtttctctcgaaaggtaccacgtacggccgaaaggaggtactcgctaaagcagtatagtatattactggcggctcggtattggccaggtgaacggtacatctacggacagagattggggtcccaactccacggtaatacaatcccaatgcgacttgagaacaatgccattattccccgttggtattcctgcggtcgcgtttgccttgaaatctgtgtaatagcgaatgcatcggctaccgggatcgcttcctcaccaagagatgcagtgttcctgcctggtctgagctaatctaatctagactagaacttaattcgaacgatgaaagcgtgaaggaaactacatgcattgtcctgccgagttccagcatcaggtccttttcggaacgtgcaatattccaggttggacttgttatcaccgacctgtatattgatgctctgtactgtttatctgtctcgttcaccccaccctgcttgcttcgtacatggtttcaatgcaacctgacaactgcgtgtggagcgcttagctcggaataaaatcgataatgaccctacctcgaggcagcatgagaagaccccaattccataagagggcggttacagcggcacagacgatgggtcttgagaacaaaaaaaaaagatggaaaaagcaaccatgccacgcaggcgatcaatctgatcgagatcgaaagaaaaaaaaaaacgaccattaccaatggacatgaattaatgactaaatcatgctttcaagacacaccgactcgtcgcgagcggacagcgcatgaaaagccttgaactacaggcctggaaagtgttggagaaggtcttctatttgttcgtagaaatcccccgtcacaagggccaaccaatgcaaaagccatgcattctctctctctctgtctctgtgcacaccacacggaatcattctcctcacttactctttgtcttctctggtctcttcaagacaggcaggcaaacggagcggaacaataatccgtcgttgcagtttgtagcctaaccgttccccatggtcggagtggaggccgttcttaccgtctttcacgaggcccgataatcccgaatttatggatttgcacgctacggggaaactaattggagtctatcagtcaattaggttacgctatctctcccagcttggcccagtctaacgtgtcactgcctcgtctcaaaagctgcagtattatcctccagaattattgatgatgtgcgactaccctccacctgtcggcatggacgtgcagcaaccttctcgcgcggccttcgcggttgatcgacaacgataaaatttgaagatgtgtcttctaactttcgtatggaaattgccatattgatacactgactctgacaaggattacagcgttggcccatgcataaagaatatcttttggtggttgttgctctgacgacccagttggctggctattcgtgactgacacatcctgaaacgacagactcacaccactcaccaccacagagcatattgaaggatcgggccggccagtctctgcacgcgtacggtgtgcaggttccaccatgacttgaggagtaagaagaagaagccgacaacattaggacgttgctgagccatccattgctgaattgacctgggccactcaccgtcagattcgtcgatgcaccgtcgtgcgtcgcccatcggatctcgaacgagatgcggaccacaagtctacagtactgtggtagcttaagggctgaagcctcttcactttgagacacccatgtccggcgtagcccaaagtatattgacgcccacgtatacgtaccctgaagcattttgcgaagatagactctctctgtatggtaggtctccactgttgacagaactcagcctactatcgtcaggcattgttgcctccgtatagcgcggtaatcacgcctcgtgctatgcaacgatcagttttgggatatgtcatgagtaaggcagtggtcatcgagcctaatgtcggctcattgaaggggtcctgggtattcatcttttcggaacgaccctagtgcaaattcaggattcctgaactcctagttcctatgcgagatgatacatatggtcggcatcttcttggaatccttgttgcttcgttgttttgtgcccaatgttgcagcggaaacatactccggatcatagcctgattctccttgtcatttaggtgtctggacacctcggctgactgttgattgctcttcccgtcttgaggatttgtcccacattgagttacgactcgaaagtaggacgtaaatcatgtggagcacgccaggttgtgagttttgagattcgcttcccaggcgaaaggatggactggcaccaatgaaatcacgttatacccaataaagacatgaagggaccattgtgtggtatacagcctgaccgccgggacaatcggactgacccgataggacgagaattatgtgagtgacgatcaatcacagaaggagcgtggtctcgttggagctctggagctggacggcttcgacccggccgagcctgggagacggcgccaaccttcccagtcatggaggcaccacgatcctcaaagccacccacatttatgcagaacatcaagaaagccgagccatccgtacatacatacaaactcggatggtagccaccatagccctggccggactccaacagcaatgtctgcagatgcggagttgatcagataggccaagataaccacaccatcacaggaatccaagcggaccagttgcagatgcgtggaatgaagcctctatcagcacgtgcagcgttgctcgtcaatctagacgtggtcttcaagttcttttcctttttctaggggcccaaatgctcctcaccgggtcttctgatcttattttccacgtcacttctagcgggagtcgacgaaaccgctaggccgcgttttagtacttcgtgccacaaaaaactccttgaacgaagtgctaccgtcgtgccaatttgtgcactggtcagccaagtttttcgacaattgagctgctgagttgatcggttccaggggcggcttagattcttcaagcccgatcccaaatggggacactacataacttccacgttaccagccatgcgacgaggagtccaagatcaacctagttatgggccgtggggagaaagctcaccccgacggattgtcttggaagggacccgccatcctggagttttggggccaggccgtcggtggtatgaccgtactatgatgctatcgtgagttctcgaacaccgcttcgaaaggcacaacggtacttctgtcggagtccggatagtcaggagcggtaagtactgagtctgcggagtaagatcaaatcttcccgtctctggataaataagattctgaatagtaatgcggttcgctgggccttttaggcgcacaaggctagtcgtagtcgtagtgcccacggcccacagcgagggcttcctgccacctgggtacagctaactgccgccctgttctgtgacgtgcatggccaattgcctatccctgcctgcatggggcatagcatcgaatccttggattccttggaggtgccggcctccactaaatccgaccatgaccatggtgacggcgcgcctcttaggtgctccgggtcgctcacgatgtttccccagccccatcgggcccacgcccctgctagtagccccttagtgctggcgctagtttgcctctagaaacaaccctggctggcgaccaattaaaccgctcgtatgggtgctactttcgatgagcgtccgccgacatggcataaataatcataatacggcagtaataatgataataacacaccgaatccaatgcgaaaaggtccaaaggtcgaaagattgaaacaaacaacacacttgcgtcacatcctctgagcccttcctctttctgcccaattggagtctgatattcgatctccaacattttgctttgtcttgaggaaacacaatctgctccttcacacttccattcaaggcgaggcacagatggatgcagacctggctgttgcaaataacacaaagtacgtgtctgagcctgcttcgttgtcaagtcgatggcctggagcgaggaagccgttgagcgctgctgggcagtcttgcgagccccgtacaacacgtgtatgttggtaccgtattgtacggacaggtatatgacatgctttcccttttgctcgccttgaatattctattaatataaaaatcaaaatttcttttccattttatcttgattttattttattttgttttttgct

SEQ ID NO: 1868 - DNA, 1620 bp, Emericella nidulans
actgaggacagaccttttccctcccttccatacggcggcgaaacccatcgagtgtaatccggccgctgtgatttccctcccaccacccgcttcgtccgccgaggccatgtctatgcttgacgcgccctccaccagcatgcccgatctccaacgcacccagaccgtatcacagctgtcgaaatatgatcggaaatctagaacagcagctaattatggtcaactactagaaaagcctgaccaggagcatgatcatgaagaggatgaccaggaggaggaagttgatgaggttgtcttggaggatatgaaaaagctcgaagacaactttccagggatttcagatcgcttccgtttggtgaataggattggtgaaggtattgtctgcaatgcaccttcatttaccatacggcacgcccggaacacctggatcgcctgactaaacttataatctggtttataggcactttctctactgtatacaaggccgaagatctcctatacgaccactaccgaaatgattgggatgtatttcaagatactccgagagatgaatcgacaaattcgccgtcaaaacgtcgtcgagtagaagacgagaacgggaatacgatacccatcaggcgaacgaaaccacgatatgttgcgctgaaaaagatatacgtcacaagcagcccactgcgcatccagaatgaactggaactattacatgatctccggggatgccgatcagtttgccctctgataactgcattccgtcatcacgatcaagtggtcgccgttctgccctttttcccgcatacagactttcgacttcagtaccgaacgttcatggtggctgatatgcgccattactttcgatcgttgttcactgcattacactcggttcataagcacaatatactgcaccgcgatatcaagccaaccaactttttgtacaatccggacttacgggaaggcgttttggtggacttcggtttagcagagcgcgaaggctccgagtatacagggacatgtctctgcacaagcacgagccatatacgtcgcgcgcgttacacccagagttaccactatacccactgtgcctcttccggcctcgctataggctatccgaaaagtgactctcggccgtcaaggcgtgccaatcgtgccgggacgcgagggtttcgtgcacctgaggtcctgttcaagtgcacctcgcaaacaaccaaaatagatatgtggtctgccggcgtgattctactaacattgcttggtcgtcggtttccattcttcaactcagccgacgacgtcgacgcactgatagaaatggcgagcatattcggcacccgccgcatgaaaaatgccgctgccatgcacggccagatatttgaaaccaatattccgaccatcggagaaaaaggttatagctgggaaaagcttgtgaaatggtctagctgtgtagaagagctgacagagagtgagaaacaagctacccgactgttagcaggattgatggaactggatccatccaaacgtctaaatgctaaagaggctatgcagcacgaattttttactaaccctatcgatcatgatgttgaatggggggggcccgaagacagcgcagatagcggtagggaagatgaaggc

SEQ ID NO: 1869 - DNA, 2654 bp, Emericella nidulans
tggttttgttgtgcagataaatgatacgttaatcattactgaataccgttgtttatgatgatctaaatagctagctgcacatttcatcttgaatgtgaagtaacgaatgtactgcagtatattcccttccgttgaatcagctgcctcgtgaagtctatatatagtctgcacctggtcagccaatggccttgactctactatgaatattaaacattagtatagagagacatggatgcataacgagagactaacaatatcatacacgtatagctaagcatgagtggcaggaaaccctacactggaatacggagaactccaagctcggctgtgcggttactatgcttacaataatttttctcgtataaggattgccccagacgcttagtatcatttgctagctggtatgaaatgggaagggctggtctaagcaacatcaagtagtaggtatagaaagtgagtgaaaataaagaggcctggtcatggatggtgaagtacggatgaaggggctggatgaatagatgattaaacacttatggtataaagatgtcgttctttcacttcgttccttttcatcatttccgtacacgccgggcatgatttactagattctctatcacgccctcgaaagcctccttttcgcttaagagaccatcgcggcgttttagccaaaattcgagtacagcggaacgcgcagcgtgagctcgtcaagctctttgacatgggtttgtagctcagtgtcggtgaggccgtctagtgcggcgtcggtggtcgcgcaaagtcgccgtaccgccgcgaggtcgagctctggtggtggtgacggctcgcgccgtctggatgaccgctgccgagtcgcggtgctggatgcacgtgggctgttagcctgctttgtgagtctttcctagcaaggctttgcgagcgggacaatgggccgggcagtcgatttagatccgtcaatgtgaatggatgggagaatgagctttttttgttttgatgcaggtaggatttcgtctaggtccacggggaacccagggagacgaggaaaaggcgacgaatccgggacttgacccaattctgaggttgaagcgggggtggagcaacaagctgagaccataatgagagtgagcgttcagtgctgaagatggcagacgagttcgggataggttgtaagtccgactgcctggatagcgcagctttagatgcaggaaaaagtcggtcaagggtcccgtccagacgggtgagtaggtcaggcaaagatagtatagattcgaagtctattagaggaggctagacactgattagcatgagaacaacgagacagcttattgcggtagacttacgacaaaaggcggcgtcgttttctgggaggactgtaacgaggcgggatcaggttcgtcgaggtctgcatctggctcttggaaaccgtcgtcgaagtcgccaaagtcatcatcacccccctcctcgaagtcgtcgaagtcatcaccgcctacggtttcagcagaatcttcctcatttaatgttgtgttttgtccagtgtgattcggatgcgaggagctgtttgagtgaggcagaagatctgaattggtcaatcgtccctgagtttttttgccctcctagaggttaaagaaccggatgcttaccgggtgagtccgagactgtctctgttgcatccggcaaagtgtcgctcggccgtcttcgatgagcacgtggaccggagtgtattgacccatcatctggtacgtcaccaacttcagaaagtagcgtttccggtacaggagtcgtcgtggtgttggcctcgttgaacttcgtgggagctaccgacgggcttgtggcttcggaggtcttcgtgactatatctggaacagcgtccgctttccgtttttcatacgcctccgtcccaggaacatcaccgtaacttggttgacctgggtcaaccttttccaccacggtccggggaattggtgtaccccccggggttacagaccggcgatgctgccccgcagcggaagggcttctgctgcgtgagatcacctcaacctcatcaggaacagcatcttgctcccttttctcatatgcgcttgtccctgggacgtcaccgtgtgaagggacatcgtccactttctccacccgggtccggggtacaggagaagcacgagacgttgcgcgggagcgagaacgcgagttgccttcgctggcatctgagaaatgctcttcgtcgctatcggaggctataaaatataggtattagtcaatgagctgccggcgagtaactgtgcgtctgagcgcttgagcggcttaccatggtcaggggcccctgggtcctcgagctccacgctctgcctcgggggctccaagtacgagctggtcggaggagaggggcgttccgtcatggagaaagagtacgctctagtattcaagatcggtcatgtaggcatagattatggctttgaggctcaacagaagacggccagatgcacaaaaggaggcaaggttggagaaagcaggttacagcttggataattcagaccatctggtgacgaagtcagccccgatcatgtttgccttagcgcctaaggctgaaaattattctgcctgaggtgtttataatagacgcagataagcgcacctcaacgtgattggcttttataagcgcaaca

SEQ ID NO: 1870 - DNA, 1926 bp, Emericella nidulans
atcattctttgggccgggccgctcttggtggtcgtcgggttgattcttgggatgtattggagacggtactcgcctttatcgaccagagctttttcaacagagaagcataaccagtcggatgcctccgagggctctgcgcaccgacatgatagcctagatgagatcgtggaggcaatgaggacgttcaccacccggtgcaatatcctgctcgagccgcttgtggaactcacagatttcctgtcgactcaaagatccgctacctttgcgactacgcggccggcccttaccacgttgtttgttcggattctcttcgtaactccgatatggataactttgactctgcctccgctttacctcattactacccgtcgtgtcattatgatagtcggcacaattatacttacataccattcgcgaacagcaagagtttgccgcgtcattctttggaggtctcttactattcgccgtatatgcggaatgattaccggtctgtcatttgacctggatgctggcaagactcacattcagagtcacggtcacgccgcaaacattgcaactaggcgtcgcggagactcgtcgggcgttcgttttacttttatcatttatgagaaccagcgtcgttggctaggtatcggttggacgtactctttatttccgtcggaacgcgctgcgtggacggatgagcatctgaatcctgttccttcgaagaacgagttcgagcttcccgaggtgcaaagcgggaatgcaaagtggcggtgggttgagggcagcgaatggcacattgatggagctgatgacgatgtgtctgactccaaggcttctgatgggggcggttggatatactatgataataaggtatgtactcaacatcacacccattcatccggctcctaacatatctgcagtggaacgacggacgtcgcggtctatacggatgggaccgttacactcgccgcagaaagtggtgtcgggatgccgaactcgcggagatcacaccacacggcaagcccctagatgcaccatccgccttgacccaggccttggcgcaagacatccagcagagcaaaacgggaaaacccgatgccaatgccgatgcttcaacagtggacgctgattccgtgagtctcgccccgtccacaacctctagcaaagcccggcgccgacgttggttcggcagttcctcaaactcgaaaagtgtaagcgacagcaaaaacagcagcagcacatctactccaccagccacaaataacaatgactccgaaagccctggaaatgcgaaaataacctcttcttctgccactagtactagtcacaaccgcagcaactcctcgttaaggagcgtctcttcaagaccggtgagcatctccaggtctcggagactgtccggtctctctgggagcaattctggttataacaccggaagtccgcatgggagtagcacggtcgcaagcgatagccttagtattcgggagaaggagatttcggatgctcaggatcggttagataaatggggggctagggctacgggggggacggaacgggcggagagggagcttggactcggtgatgaggtgaatatgggactgagctgagttgagctacctaagtcttataccctgggtggagaatgtattcctaaaggacttagtcaatctgcctttacttggggcctgccgtgctgaggatcgcatggtatcggtatcattatctcttttcattactttggacgtagtgggtcttcatggtcaggtagatgttacagagatctagtgtagatacgtattgaaacctggtctggcgaggattgtcgcgaaccggaaaggagtgtatccaggtatatacccctttacgcgagaatcaagtcccagcctagcctgttgagcacgtcagcccagtgcttcttcacccctctcgcccgtttatcct

SEQ ID NO: 1871 - DNA, 1100 bp, Emericella nidulans
tggcgataatacgactcactattaggaaactcttcacataagcatatttctccgactgcgggacgtcatacgattgacgaaggtcggctgagaaacgcagtgcctcgcgcaccgtctgcataggttcatggacatccatttgctctgcataggaagtgcctcgttggaacgatgtaccatgcttggcaccatctaccaaaatgtcgccagaaattacgccaatgttctttcgcgcggcgagaacgtcaagcagggtcgtcttccccgctccggatgcgcccatcaaggccgtcagtttaccaggctgtacgtaaccgtagatgttgtgcagcagtcgtcgagtgccggacggcacaggaacgtcatagcatacatcttcccatgttaggactggcttcgatgtcagcaatatatcggctccagggccaccaaggtcgttcgactgtcgagcagcgcgcttttcgtccagtgctttgttcagtttcttccgcccagcattttccttctgatagaaggtgacggtcttgccgccagcgttaaacctaacaacttcaccgaagtacagattcatccctaagaaagcaatgatgagggccaccatgatgccaaagttcctccagagatcctctctgttatagttgaatgtggtcgataaatagctctgaccaggaattattggggaacctgcttcacctccagcaagcgtacacacttggtggttcatatcggtgtatccatcaccatttgggattagggactcgctggtacaggtcatattgaggcttttaaattcgttgaccatcaagctagcaaatccaagcccgaaggggttgatatagtaaaaccatcgtagccaaacctgcgcattaggccactgaacaaggtatccagacgttagtataaacaaagtgatcaagacagatacaaagttcattgcgtgatcgaaagcaggcgacaggcaaccgatggttctgaagatgacagacatgttgatatagcccgtataaatgagcagcacaaaagtgaagaatgcccctgcattcctgacatggccgcacatgaagttgactatgacgctgtaaacgaggatccctgccatc

SEQ ID NO: 1872 - DNA, 3165 bp, Emericella nidulans
tccccttctctgccaaatcacatcatcctcctgttcatcccatccttcaccccactctctttgtctcattccctgcaatgtctgttaacatacaggatggaagaactgtagaattgattggtaggacaaggaagatcccaactttgtcagaatatggctcgctgacgctgcagagtcatgcggatacccagacaacctgcgtatccggcccctcctccgctaaaagcagcgtcacaccaaaggaacagcaagaagccacaagactcagagacaaagcactagaacaagtgagagggatcagatttagctctcatagccagagacacctacctacacgactgaaaatggaggtcttatcattttggcattgttcatcagtgcaatacaaaaataggcgccccgagaccttgcgaatatatattcttactgctatcaatcgtgctatcaggctacgaaaggaacacaactaatttacagcaactttgacggcacaagagcaagctatggctactttataagcatatggattgcattcgaaattaccagcccaattggacgacaccgactcacctacgaggccactggctggagcaacacagcggaggaccacgtttttgctagcagattatctggaattggtgcccaagagccacggaagctccatgccagttccaaattaagccttcttatcagcatctccaccgaatgtcacctacgaggtagcagcttatttcgatgtaacgaagcctgcttacagccgtgggctgctgttccgggaactatgccagatcccgtggagtcataatgcagatatgagtaacctacagacctcgcgcctgacgtttgagtgcgccgtcgctaacatcatgtttgcatctgaaatttctcagaagcatggagtaaattcaccaagtccattcctgaatgcggctggcggtgtttagacgactctcagaggcgggttcgacgtctctcagcccagtttaaagacgaaagcaagtggaatgaccagaaaccttgtcttgacatccatgccaacggagctctagtcatggaggcgtataccaagagtgcataattatacgaatgtacaccatggcttctgatcattctgctctaccctgtttcgtcggcgctcaactaaacagagataattgtggcgatggctttccttgttgttctcaaacgactccacgatatgacactagcttgcgtgatgcgcaagttaatgttggtggctgctgaggctctgaacgaggttactggagctcataagggcgaggtggccatgaaatcaataatgaggatgtcttcgctacaggaagtgccactacgccgcgacagcgaaaacgtatcctactaacagttcgagtaaaaccccaagccaggacatagccaggcattggatagcataggttttaaacggtgctggtgtatcactacgtgttttggggcaatatgtacagtttcaggcgtgatgtcgagacactgacagaagggacttacttttcacttaacgaccaggataaaatgcagttctttcatattcttctcaattattgaattcaagcacgatataaaatggctgaaacttgtaattacttaagccctaatcgtacagtatactttcaggcctgcagccagctggcactgttcagtggcacgactttaaaaattcttacataagcggaccatgcaaacgcgtcaaactgctttgttccactcggctttcctgtgcttcgatacagacctcaaaccaagttactgtcattcatggtcattttttacgttctgtgctgagcatggtatgcactaaatagacatatattgcttgtcaatatctgatctttgccacgaactcgtaaccgatgccttgaacaaataccgcctgttcgaccgcgtcttgaagctttccttggtcgacagtctatgcaaatattggttactttcactcccttgctgggcgcccaatcgtcggcctcaaaggcatctcagtccattctagagctggacggaggggtcaaaatcctcgtaaacgttggttgggatgacacatttgacccgctcgatttggtggaattggagaagtacaaattgcccttcgcatatctatcaagcgcattgcctttaaccacggatgctaacgcatgatactggttagacacgtctctactctctcgctgatccttctgacccacgcaacgccttcgcatatcggcgcctatgtccattgttgcaagacattccctctttttacccaaattcccgtgtatgcgacaagtcctgttatcgcgctgggccgcacccttctgcaggatgtgtacgagtcggcgccgctagccgcgacctttctccccaaagcttctatatccgagcctggtgcctcgacatctgctgcgtccgccgcatctgtgaccgaggccgatgggagtgcggacgcaaccagcgctgggcggatattgcttcaacctccaacgacagaggagattgccagatactttgccctgattcagccactgaaatactctcagccgcatcaaccgattccgtcaccgttttctcctccgctcaacggtcttacacttactgcctataatgccggtcacaccgtgggtggaacaatatggcatatccagcatggcatggaatctattgtttacgctgtcgattggaaccaagctcgagaaagcgtcgttgcaggtgctgcctggttcggaggatctggtgcgagtgggacggaagtcattgagcaactgcgaagcctacagcattgatctgtagtactcgcggaggtgacaaattcgctcttcctggcggacggaagaagcgcgatgagatactattagatatgattcggagcactttggtcaaaggtggcaccgtgctgattccaacggacacaagtgcgcgggtgcttgagctggcatatgcgttagagcatgcctggcgcgacgctgctagggacacccaagatgatgttctgaaacggggtggactatacttagctggtagaaaggtcaacacaactatgaggcttgcgagaagtatgttggaatggatggatgagagtattgtgcgcgaatttgaggcagctgaagctgcagatactgctggccagaacaatgacggccagcgttccgaccaacgccagggcaagacagataa

SEQ ID NO: 1873 - DNA, 4248 bp, Emericella nidulans
tgaggtcctgcttgacgtagggtgttccaaagtggaagatgttcagatatcaacgcccctgtcgcgggcagagatgtgaagggcatgaggtgttgattctactgcaggaagctgataattgtgcttgcacggattgatctgccacagcccaagcggatttgatgtacatcagcctagagccaggagaagaacgcagttaaaactactgcagaccaactaggtcgaattcaatgagccgtgaatctatgtacttgtacagtgtcgtacgcatctatgcaacaaaatttagatcggactatctcccccaaccgctaaagaaaccgcctgatgtcgttggggcctcggtgtaggtctttgaaagacccggattcggcggtactccaagcagcgaattccggttttctgttgttgaggatcgtgtcaaaccacgcccctgtcctcccatcattttccgtaatgagtccagcttcgccttaacctcttccagttcctgtttagcgacggcctctgctgtctttgcatttactagctctaagagcagcgcctcgtcacctggcggtttgttgttttctgtggatagaacgttttgcaggccaaggctgctactccgtttattgaaagtggcgggttgaatgctcttttgtgaagcggaccgagcaagtttgagttcgcggagtccacccgagcagaagctttcaccgtgatcgcttgtcggcgagccgtatgactctgggggggtatcaggcgttttggttttgatggagcggagctcacgtacggtgcgctctagccgctgacgatcgcgatacccgtcttggatacggccgcgtgcttcgcggagttgttcgcggagcgaggccgcttcctgttcctgttcatcgatgcgccgggtgaggtcgagacatcggccagcttcaacggagtacatgttcttccatcgctcgaggtcgtcacgcagttgatgcttggtttggtcgatagatgtccgcctggttgaatctaccgttgcgagcttttcttctgctttgctgaggagttctgatggcgcagcgtctgcgttgttttctttgataaattcgagcattgatcgggcgagtgcttggtcttcctcgcgctcctcgcgctcacgttgtagttcgcgcgaaaggtctgcttgttgacgttgtaggtcgctgagtgccatcaagaggtcttcaatctggctgtgaagatcgcggtccttgttatgagacatagcggattttgctcgtggtttctgagcctcaactgatagttcagttggcgctgtgctggcgtccgacgtcgactcgaccgagttaagcgtggaggccatactttgcttggaggttgaccgccgaagattgttattggggttgagattgagtgatttgacggacgtgtgagggccagagccggcccagaaccggccaaggaatcgagaagctgcggcctgcatctggggaaaggagataccagtaggaaccccttgggactggttgtaactggcctccagtgcctgaaggctttctttggtgacaagagtggttagagagacaaagtcgttaacgaaatcgtcggcgtcaaaagcgtagctatactggtcagtgagagtcgtgtattttaggacaatacttacgtatcccagagacttctagaaagcagcagttgcatgacatcttcaaactctgaacagcccatgatctttttttcgttgcgcttcattagcgaaagcgcgacgcgcatcaaagtctcgcaggcgccttccaagaagatgacatcgtagatccgaaggagcatcggcatagggcaggagacagcaaagaacgacaggaaccactgcgagacatagacaggctcaacacccagtgtctctaggtgttcgaagagggcgggtcgaaggcgggagaggagattctggaattggtacacgcggaggtgcagacctgacaggtcagggagatagcaggtccgcaaatcataatggtccataagcctgcaactattagcgtgattcgttcgacgatgcaggtcaacttaccgcacaagcacgcagaatgcttctgcatccgtcatgtgcatcaacaatggcccaaccacaaagcccaagccttggcagtaacctatcttcgtgtcataaagactgaagcatttgagcacacggccaagcattcgttgtccttcgccgtttggatcgcgaaacatctcaacattggggaagctacggccaatatccttcccaatcaatccctcatacgggctagtctcgccgcatagcttctggtactcggttaatagcgaaggatcccttgcgcccgacaagctcggccagacgacaccacgcaaaggagggggaactccgcctctaatcttattcgacgtcaacgtcggaagtcgctgcactgtttgcggatagtctgcaacgagcgcggcccagaattcaagttccgtcatgggcggaggtgggagttgtgaaatccggagagaggatcgagggtcctcgtcgatcaagcgcttgatctgatgcagggattgcgatcgagacggacgctgttgtgcctgctgtgcggcaaccctggcaagaccagatttcgggttcgtaaccagggcattgttctcttgctccaggcgagctaacaacagggcagttgtctatgaatgtcaattctatccctccccatgccattttctccagacatacctcatcagatgcctccatccgaggctcctgctcctctgttttctccagctcttcccagtccactgcatcaccttcgagcccatccggccggtcagtttcttcgctgatacgcgcccgagcgagttccgatcctaaatccggtttcgcagaggtgggtgtggtttttgggctgatctcatcgtcggaatgtgtcgtagcgtgcacaggggtctgaggaatctcaagggtccgccagtcgggttgagtgtcttctgaattcgacgacagaggcacggttaccatcgaatctgtttggtgagccgtacggaccgattctgaactagggcgtgacggggtctgctcggaacgttccattgtcgctagtcttctctcaaccaagggttcaatgagcctcgtcgatcaaatcgaggggtgaaacacgagggttggaggggtcaaattcggaagtcgcgatcaggtcgagaagctgccggtgggaattggacgacaaacagcggcatcgctcgtgggcgtagaggcgagtggtgactcaattcgaagttgaagaaggagaaacgaggaagagacggcgcgagttgaaagcagtatggtaaggttagttaacttaagtggtggttagtctggtgctctaagtgggcttcacactcagggggcgttgtcctgattgggactccaccaggtctcgccctggcgatcgtcaaattattatcagagcgacaatactagcgtgtgctgagactcagtctattattctatgtctaaggagagtatattaagggatgttccgtagtgttgcttcctatttggtgttggccatgtagaagagggcagaatcgtgagctccaatagactctcctgatctccgcacagaacacaacagtacaaccatggaacctgaaactgggtgtctgggacactggagcccctcaggaaccgccttcgaactcacgatacacgaggaaaccatgtcttcttgaaagtgcatatgtcatgacgtaaaaaggatactgacagacctcgctccaggggcgaggtaccgagtctacttaggagaagggttctagcggcctccaatccgcccttcgaaatcagcggtaatgtaatataacgtcgcatgatcgtttgagccttaatggagggttcacagcacgtctaatgagtggacatgtaatttatcgggactcgttgattggctctcatgaaatagattacactccgacataccgctgcataccgacattttgaaacaaagcccccccagatgtttaactaatcaaaactggcagcagtagtaggtcacgataattttctatcaagtggtgtactcagagtagttatgcagtataacgctagacactagcatcttccgcagctgcggaaaagtagtaccatatacatgttaccgtatatatagggcagattgtagtcagtctgtatttgaaggagctgggagtaactaataaatacttcaagcacaattatatatatttcccacaacaactccgcccattactgataggaactcaccgatatttgaacttacttgagag

SEQ ID NO: 1874 - DNA, 2260 bp, Emericella nidulans
aactgtcatagaaattgtatcaccggtgtgaggagacgtgtcaacaacgagagcgttgtaacaactccctctacacccagcctgagacatcctcgccatccacaacgccctctccaagatcagcccttacttctccattgccgctggtttcggtaatgtgcacggtgtctacaagcccggcaacgtccgcctccaccctgaactcctcagcaagcaccaggcctacgttaaggagcagactggctccaagaaggacaagcccgtcttcttcgtcttccacggcggttctggctcttccaaggaggagtacaaggaggctatcagctacggtgtcgtcaaggtcaacctcgacactgacatgcagtacgcctacctcagtggtgtccgtgactacgtcctcaacaagaaggactaccttatgtcaactgttggcaaccctgacggcgaggacaagcccaacaagaagttctttgacccccgcgtgtggattcgtgagggtgagaagaccatgagcaagcgtgtccaggttgctcttgaggacttcaacactgctggcaagctctaaagcagttatatgactttgcaaaatattttggacattcatgattatacagatatgaggcgacgagataccaatgaaagtgtatagtcttaaaaagcaaaaggttgttagtagatttggagatggcgttggcatggtgtaggtatagtttaaaacgatatcaaaattatcgttcaaagcgaatgaacagtaggcctaataagttgatgagcgaatatgtgttttgtgttacaaccactacgcaaggcgataagaggtagattgttgatagctattccagctagacccataggagcatagcactagggagcagcatctataatagaacttatggctacaatgctgagtgtaatcaaatgttcattttgttcaatgacaagcaaaatggtagaaaaatggaagatataaagatgtcaatattattgcttcatcgcctgctcaattctgcccataatccttccttctcgttcagaaattaagacggatcatccaagtcgccgcatgaccatccttgctgggtttactcaagcggggtttgtgcattggaatgctacggtatcacttcctcacccggccatcacaattattcccatcatcactatcatatctcccctgtggccattgctgtctcacattgtgcaacagcagaccagctttgaatacaacgagatggcctctgttacggagcaccctccaacgctggagcaaattgaagcagatcaagacgaatatgatcgcctattcacagcaaaagtggactctttcgatgttccaacgacaactcggcgggaactgtggtcctattacctttattataatggtagacatggacggtgttaatggtgcccttacagtactgctactgatcgactctctaacatctaggagacaacggagtaggccctctttcgtatacccaagcattgtaaggccttgtcccattcttgtacaagcattcttgaccgtctaggtttcaatggtcccttaacggcgccggctggcaaccagggaccacgccccggcaaccctgcaccgattcgtctccttgcgtagtcccttgggccggagggacacgaaccgtctcctcgattgtgttgatagcaaatggcctcagcttcaccttcatgacaataatctttgtctggctcgggagtgccgcagactacggctctttcgggcgctggttgctcctcgctcttacagtcgtttgctgggctttgcagtatgggacgcttgctatcagagagccgactcagtggcccgccgctatggggctgtatatcgtgacgtatgttgcgtatggcgcaacgctggtgttttatgccgcaatgttcccgaagcttgcgaggtatatgccgcatgtcaggaaggcgagggaggaggatttgagagaggggaggatcgatcaaagggattatgatgctgttgagtccttggagaggaatcatatttcgtgagcgtggttctggttcttgatattgatgatactgatgagaaaatgcaggaatatatccacagcacatagtaatattggctatttggccgtgttgcttctcaacctaagtgttctattgcctatgcagggcaataactatgcgaataatttagccatctgtctgacgaactcgtgtgcgcaatcttcctgcttgggtacttaacctgcaactaatatagcgtcagattgggttgtcttggggg

SEQ ID NO: 1875 - DNA, 1721 bp, Emericella nidulans
cataacctattattctgtacaatacatttcagagaggatagcactaaaaaccataaggcaaagccattttccttgctctgttcagtgtccagttgtattgaggccggaaactagcgctttacttcttcacccggccatcacgattattcccatcatcactatcatcatctcccccgtggccattgctgtctcacattgtgcaacagcagaccagctttgggatacaacgagatgacctttgttaccgaggacccctcaacgctggagcttgattgaatcattctagcgcaggatttcacccagatggtcagtttatgtaataaaatcttacattgtagcaaatgaatatacagatgaagacagcaaatcctgattacggcgataatttcctttagcgtagtccgctgtgcatgactgctcaatcagaaagggaggcggagtctctaagcaaagtatgtaggtaggccaggtggaaagctccctaagaaacaaatccaaccggtttccttaacgatcccgttaacaatatgttaaacttaacagagagattcctctcatcataattgcatcacgtagacatgatcagaaaagtgataagtccaggaacacaggcacggagccatcttgacaccttggtagccaacactctagctatcttagatgcactaaacatatctgtaaagcagtatgactgcacagcgggaaacccttgtattccttcaagctgttgataatgctgtggtccgtgggagattcgtaatcccagtgttctaggcgctctcgacaactgttattttgaatggtagctctttatgtatataaattatattttatctattgataaccctgcgcagtgttttaaaaaaagacttctgttctatttgcaggaagttataagctaaggatctctattcaccaaccccagctccaataacatattgcctaacaacaaaaagtagcaatcggcatagacaaggccatggtctgcccagcgccgcgacgcgaactcgtaattgcaaacagtcgctgcgtcgaggatcgtttcggggaatttgagtgcagacctcgatctatacccattcataccagtctcaggccctgagagaccctcctttgccgaaatggtcagacgccccggctgtcggcaggatacgtagggaggcctggcgccgactgagcgacattgaactccctggtgacgaggtcatgaacttggacactgtgccctcgagtatgcgcagtgcaaagtcaagatactactccacgggctctacgtccggcctgtccttactgtctttcagtgccttgcacaacagaactagcccgcaacaagctaccatcccgcggacgtacccgggacaggactcattaccgggcattgaagcccagtccggactggttcggaggtagtgctcatgaattatcgcgagtcttagccgctgagaaccagttttccggtcaacctccattctgaaccagaaacccagtttgccggactcaaaattcgccttaccctgtgcgaatttgccggagccccggttaatagccccgtgggccttgtgcggtgggagcccctcccatgtatgcaccccagagggccctttgcctccaaaatacgtgtccttttctagacctgttccttatcctcctcttcctcttattacacttatccctctcccccttctctacttcctcttacttcttacttttcctattccccc

SEQ ID NO: 1876 - DNA, 3049 bp, Emericella nidulans
catttcaaggttacaagactgcggaagttctggcaggcgtagacggcgtcttcgccgagctcctcctcaatacgaaggatctggttcagtttggctaaacgctccgaccgggcaggagcaccagtcttgatctgtccggagcggagaccgacagagatgtcggcaatggtgacatcctcagtctcaccggaacggtgagagaccatgacaccccagccatcggcgtaggagtccttggcggcctgaatagactcagtcagggtaccaatctggttgaccttgagaaggagagcgttgcaggacttgagctcaatggccttcttgatacggagagggttggtgacagtcaggtcatcactattaactagttagatcagttactaggaaaaagcggattgcaatacatacccgacaatctggaagtcagaggtcttgtagaagtagctccaggcctcccagtcgtcctcagcgaaagggtcctcaatactgacaatggggtacttggcagcaagggacttgtagaggtcggcaagctgttcgtatgtgagccacttggaggggtcgctgtcggggttcttgaagtcgaggtcgtatttcttctcctcgggcttgtagaactcgctggaggcaacgtccatggcaatgtgaatcttgccggtgtagccggcctgctcaatggcttcggtgatgaggtcgagagcttcttcagcggtctggatatcgggagcaacaccgccctcgtcaccgacgttgccagcagactggccgtacttcttcttagcaagagccttgagcttgtggtaaacctcagcaccctggcggagaccctcggagaaagaggaagcagtgctttccatatgtcagtatacttgaacgaatgcaaacggccggcaagaaactcactcaggaacaatcatgaactcctggaaagccaggcgaccaccggcgtgggaaccaccgttgaggacgttctggaaggggacggggaggacgtagggcttctttgttccagccaagtcggagatgtgagcgtaaagagggacacccttctcagcggcaccagccttggcgatagccagactgacaccgaggatggcgttggcaccaaggttgctcttgttgggagttccgtcaagcttgttgaggaactcgtcaatcttggactgctccttgacgtcgaggttctccttaatgacggcggggccaatggtctcattaacgttcttgacggcagttagaacacctatttgagaaccattgttagaggtccccatctcgtatcaaacttgtgggagtggttgcaaacgtaccctttccgagccacttggacttgtcgccatcacggagctcgtgagcctcgtgctgacctgcaattgaagttaggaacgtttgtttttcatcaatcgacgcatgctcaataggttacacaccggtagaagctccagaaggaacaatagcacggtgaagaccggtctcggtgacaacgtccacctcaacggtggggttaccacgagagtcgtagactgagcgggcgtggatcttggagataggcattttgatgaactagaaggatagagtcagaaaggagaaaaaggggaaaattttggaggacggagaagttaacaaatataacagaaaggggaggcgaagagttgctgggagtgatttagcaggcggggatgtcgttcaccgatggcccaaaaagaatgatgccagcaggtgagcgatggagtcatccggtcaatcgctgatggatcgagaccgcctggactcatccttaggaagaccgcaatgtgaaggaggcataccgacaggtcaatgctggtgtagctgtgatgatgatggtatgttgcctgatgatggggagaggtcaagcttaagctggtgggatggtggggttgaagaagagtatacctaggaggcggatgtaaagagacggcacttaccaaactttggacggacggggagagtagtaaaacaacaacagcaatttggactatagggagcaagaattcgatggaaagcagctggttcttgtattcctacgcaagttgtctggctccgagtctttccaaggtgatggtggggcagccactgcctgtttgttggctcaggaggcttactgacgctctacagcgagatctcccgtacaccctcggcgcaaggcgggtgacaggatgctcgcgagaaccaatccaccttgtttgaggtaatcactcagagtagacgccggcgtgatcgtgactttattctatagttcgctgatgcctctcaaaagcgctacgatgccgtaggatcttcgtttcgtaacgcagctggctaaaagacgtgctgtgctgtaacctggtagttcatatgcgaatcgaggtcaatctacaaagaatgctatctagccatgcaagagcatgccatagtatcacgcagcccgcaattcggcaacttcgttgcgtaatgacggcgaaatagagtcgggtcaaatgttgataccttaatgcctgacagctaccggataatagttactacgtaacgctcggcttgaacatggcctatattggcctgaatttaatggcatgaatatagtcatgtgaccgagtccgtggtggtagctcaggcgagctctcaagctaagtccagatacccttttatcagcatctccgtcatcgctccattcctctcgcaccggcaagcagtctcttataacgaataaactgtggtcacttgaaatcagtttgatccagcatcgctgttaaccatcgattcacgatgaacggtgctgttgatcccgaaagggagcaggcactggaggagtacaagcggagcctactggatctccgggaatgggaggctaagctcaaagcgcttcgtatgggaataaaggacttgcaaagagagtttgatatttcagaagaaaacatcaaagctctgcaaagtgttggtcagattattggaaaggtgctgaagcagctcgatgaggagcgatgtacgttcttctgcgacgaaagattcttttattatattccacacgagagcagctaatcttagaagtcat

SEQ ID NO: 1877 - DNA, 1104 bp, Emericella nidulans
agagtctggttaaaggatagggggcggacttcggctggtcccagggggtcgacctctggcgggacattgaggagtttgtacgcaatgctcagaaggggaatggacaggccatgaacgaagatcgagaataacacgagccaatatattgctagggtataggttagattggtttgagagtaagtgattccaactcacttggtttgagggcgcccattaagcgagcctccatggcactaccctcgcctaccggagggaatagatgggaggtgtgttcggcgtagaagacagcaccaattcctggcaccgcgttaataccagttccgtacagaccaagtattgacttacctatcggtccaaagtagcccataaacaaagcctccttccagttcttgcagaccttgggcataaacctgtacaaagcgagcgtgctgggaatgcgtcgaaagaggaggacgatgaagccaagaagaatcagccggggatatgtgattcctgtggtgtctggctggtggaagtcatcccatggaatgacggctccaatatacatgaatccaccaaagttgaggagaacgtcgatacatgaattgacttcgtcatggcgggcttcggtttctgccagatagccaccgtcccaattcagcgcaccaccagcaaaataacaggcgaggagatcgttcgttccgacacaaccacacgttccaaggaggaatagctggtaatggtttaggtatgaacacgggttgcatgaaaaggacttactcctaacgcagccgggaacagcacgtagctctcgccgtctatccactttctgaaacgggttagcatcctcaaataatggtatcaggtataggcccgctttactttcggagggtataccgcagtaggcgcatactggcatagcccagggtggcgccataaaccacgccaaggatgatgtagtaggcccaggtctcgacaaaccacatctccatcgctttcgcaagcccgccatgcatatggcctacatcttccgagcgcgcgacatgagcatgggccgtgtggtcctgaaccggatttccttgggtatacgcagcagataggtcgctagcacagaaagggaaacca

SEQ ID NO: 1878 - DNA, 3122 bp, Emericella nidulans
tttagctttcgttgtagcttctccatcatttatactatctataagcacctggttcacgatgggtgaagacaaagaaacaaatatcctcgccggcctcggaaacaccatttcccaagtagaaaacgttgttgcggcatcgttacgacctttgccaacggcaacgggtgatggaacctacgttgccgaatccactcagacgggcttagccaaagatctgagccatgtcgacctcaaggatgtccgcacactcgccgaagtcgtcaagagtgcggctacgggagagccggttgatgacaagcagtatatcatggaaagagtgattcaggtcagctcagattccaacaacaagtatgcgcaggctctgaggctaatcaacatctagttagctgctggcttaccatcgacatctcgcaacgctgcagagctaaccaagtcatttttgaacatgctgtggaatgacttggaacatccaccagtttcgtaaggaaccaggagtctgtaggctacctcggctgtctgacaaatatatagttatctaggagctgattctatgcaccgcaaagccgacggctcgggtaatgtagattatcccagttccagtcttctacctactgtgctgacttttcgatgatagaatcgtttctggcctcaacttggcgctgctggtagcgcgtacgcaagatctgttcggcccaagacgatgcagtctccatccctgcccgatcctgagactattttcgattgcctgctccgccggaaagagtacagggagcatcctaataagatatcaagcgttctattctacctcgcttcaatcattattcatggttagccagtccagtgattgaaggtaatgatgggtttgctaattatcttcgaagacctattccagacagaccctaaagataattccgtgtccaagacatcgtcatatttggacctctcacctttgtatggcaataatcaagacgagcagaaccttgttcgtacgttcaaggatggaaagcttaagccagattgtttcgctaccaagcgagtgttgggctttcctcccggcgtcggcgttctactgatcatgttcaaccgcttccacaactatgtggttgatcaattggcggcgatcaacgaatgcggccgattcaccaaacctgacgagtccaacgttgatgagtatgctaaatacgataacaatctcttccaaaccgggcgactggtgacttgtgggttgtacgcaaatattatcctaaaagattatgtccgaacgattttgaatataaaccggacagatagcacctggagtttggaccccagaatggaaatgaaggatggtttattaggtgaagcagcagcaatggcaaccgggaaccaggtgtcagccgaatttaatgtcgtgtaccggtggcacgcttgcatttccaagcgcgatgaaaaatggacagaggattttcaccgtgaaatcatgccgggagtggatccaagcacactatcgatgcaagattttgtcgcgggtcttggacggtggcaggcaggactcccacaagagccacttgagcgcccattctctggcttacagcgtaagccggacggtgcattcaacgacgatgacctggttaatctgtttgagaagagtgttgaagactgcgcaggtgcatttggtgcgtctcacgttccagccatcttcaagagcgttgaagctctcggtataatgcaggctcggagatggaacttgggaacgctcaatgagttccgccaatatttcaatctggctcctcataagacctttgaggatatcaactccgatccgtacattgcggatcagctcaagcgactgtatgatcatccagatcttgtggagatttaccctggtgttgttgtggaagaagccaaagactccatggtccctggaagcggcctttgcacgaacttcactatatccagggcaatcctttcggatgcggtggcattggttcgcggtgatagattttacactgtcgactacactccgaagcaccttacgaattgggcctacaacgagattcagcctaacaacgccgtcgatcaaggtcaggtattctacaagctggttcttcgcgcattcccaaaccattttgatggaaattctatctatgctcatttcccccttgtcgttccctcggaaaatgagaaaatattgaagagccttggggttgccgagaagtatagctgggaaaagcccagtcgtatctctcatccgattttcatcagctctcatgccgcgtgcatgtccatcctcgaaaatcaagaaacgttcaaggtgacttggggtaggaagattgagttccttatgcaacgcgataagcaccaatacgggaaggacttcatgctgtctggagaccggccacccaacgctgcatcgcgcaagatgatgggttccgccttgtatcgcgatgaatgggaggctgaggtcaaaaacttctacgagcaaacaactctaaaactcttgcataagaactcctacaaacttgcgggcgttaaccaagtcgatatcgttcgtgatgtggccaatctcgcccaagtccacttctgctctagcgtcttctcattgccactgaaaacagactctaatcctaggggtatcttcgcagagtcggaactgtacaagataatggctgcagttttcactgccatcttctacgacgcagatattgggaaatcgttcgagctaaaccaggccgcccgtactgtaacgcagcagctgggccagctaactatggccaacgtcgagatcatagccaaaaccggcttgatcgctaacctcgtgaaccgccttcaccggcgcgacgtgcttagcgaatatggcatccatatgatccagcgtctactggatagtggtctcccagcgacagagattgtatggactcatatccttcctacggccggtggaatggtggcaaaccaagcacaactgttttcgcaatgtctggactattatctctcggaagagggctctgggcatcttcctgagatcaaccgactggccaaggaaaataccccggaagctgatgagctacttacacgctagtacgtaacctctttgttgtctttcccgaacgcgcacatacttaccggagcagtttcatgga

SEQ ID NO: 1879 - DNA, 3275 bp, Emericella nidulans
tcaggaaaaccatgatgatcgagtctctcgaaaggtgtctggcaataatttggcctaataataccaatatcacacagatctgcaggagtacctcggatcttatgtgtccgatgacgacggaacccttcgatatcaggagggtatcctggtagaggcgctacggaacggctactggattgtccttgatgaactcaacttggcaccctctgacgttctggaggcactcaatcgacttctcgacgataaccgcgaactgtttatccccgaaacacaagaagtggtccatccacacccgaatttcatgctgttcgcaactcagaaccccgcgggactctacggaggcagaaaagtactttcccgcgcgttccggaatcgtttccttgaattacacttcgacgatataccagagagcgaactggagtatattctcaaagaacgatcacaaatagcgccatcattctgtaccaggatagtcgctgtgtatcgaaaactttctctactgcgccaggcaaatcggttattcgagcagaagaatagcttcgccactctgcgtgatctttttcgatgggccctccggcaagcggatgacaaagagcagctggctataaatggtttcatgctacttgcagagagagtgaggaaccctcaggagagggctgctgtgaaaggcgttattgaagaggtcatgaaggtcaagatcgacgaagaagtcctttacagcacttccgagttagataagcgtgcaccattgctaaggcaactgacccctggaatcgtttggacccgggctatgaggagacttttcatcctggtttctacagctcttcagaataacgagcccattctccttgtgggtgaaacaggctgcggaaagactcagctgtgtcaagcggttgcagatgcttaccagaaacaactgcacattattaatgcgcatgtaaatctggaaacaggcgatcttattggagctcagcggccagtacggaatagatcggctatcgaagacgccatgctcaacgatttgcgaatactgttgcaagacgagtcgaagccgttcgaggagctgaagcagattttcggcacactcagtgccgaacagcgactagagtgcgatccacagctactaaagaagatcgaaaagaatcttgctcgattaaatgcactttttgaatggactgatggaagtttgattaccgccatgaagacaggccagttcttcctcctggacgaaatatctctcgccgatgactcggtgctggaacggcttaatagtgtgctagagcctcatagatcgatacttttggctgaaaagggccccattgactctatggttgtcgctgacagcggcttccagtttctttcaaccatgaatcccggaggcgactacggaaagagagaactctctgctgccctccggaaccggatgacagagatttgggctccgcaattgtctgaagatgaggacattcttcccattcttcaaatgaaactagagacgcaattggagcaaatccctcgggcgatgttacaatttgcaaaatggttcaaacgcacgtttcaaggctcctcaaccaattcactttccattcgcgatcttttagcttgggttgattttgtcaataaatgccagggctcggatcccttgttcgctattattcaaggtgctgcaatggtattcatagacacactgggtgcaaacccggctgcgatgctcgcaaccacgttgcataaccttgaaggaaatcgcaaactgtgtctggacaaacttgaggaactattcaacgtggatgcgtcgaatatctatatgcaaaaatccgatattggtgttcaagaccaggcattgcgtattgggcccttttacctcacaattcagggtgatgctcaacctgacccggatttcatcatggatgcgcctacaactattgccaactcagtacgcattgcccgtgggctgcaattagcgaaaccaattcttcttgaaggtagccctggcgtgggtaaaactacgctagtgactgctcttgctcgagccctcgggaaaccgcttacccggattaacctgtctgagcaaacggaccttaccgatctatttggatctgatgtccctgtggaaggtggcgacgtaggtcagtttgcgtggcgggacgcccccttcctacaagctatgcagcgtggcgattgggtactcctagatgagatgaacttggcctctcagtctgtgcttgaaggtctcaatgcttgtcttgaccaccgtcagatggtctatattgccgaacttgaccaaactttcaaacgtcacccaaatttcgtccttttcgcggcacaaaatccgcatcaccaaggaggcggtcgaaaagggttgcctgcttctttcgtcaaccgatttactgtggtgtatgctgacagtttcaccgacactgacctgaaacgcatctgtgccagactgtatcctggcagtcctattacgcagaccgagcggctagttgactttgtctccatcttgaacgttgctatagtccaagaaaggagactgggagttctgggaggtccctgggaggtcaatctacgtgacattcagagatggcttcaattggctgatcgcgggactttgcaaatacacacgaagaacttcctcgatataatcatctcccagcgatttagatgtcaggaagatcgagagcgggtccgccacctatacgaacgtgtctttgatggtgtctccacggcagccaaaagttattatcataacatgacaacagaatgcatgcaggttggccttggagtgatgcgaagggatatgttgctgcaagaaactcccaatccgcatctcaaggtactgccgagggatctgtctatcctcgaatctctcatgctttgcattgaacagtcatggcctagcattctggtgggagcttcaggatgcggtaaaacaacattgataagaaagcttgctgccattaacggagccaacttggttgaactagctttgagcgcggataccgatacaatggacctcgttggaggcttcgaacagatcgaccacaacagagagacgtcggctcttttagaggatattttgctgttcgtgagacgacatatactctccagctgcccgtccgaaacctctcaagaagagacgtatactttgattgaactgtatgaacggctacagagccctgacttgtcgctggagctagtgtgcacgttattagaaactgctcgccagcgttacgaggaccaagcattagagcgactactcgatcgatcgccaaccc

SEQ ID NO: 1880 - DNA, 3190 bp, Emericella nidulans
atgctcgcctgatgcccctcggatcgttcttctggggcgctcgtttgcgcaaatgtgggaacgatgccgccaccaatccttgaccagaacatcctttctctcaagcgaactgtttcctcccacgcctcttgcaactcgtcaggttcctcggcgtggatatgaccgtcaaggatgagacggaggtagcccgcaaactcacagcacgagcgtaccttttctaaacagagaacgcacaatgggtatcgctgtgctgtttcactgtcagatgtccggaaacggtgagtgcgctcattatcggtgccactccgccgttcgccacagagagaacatgggaattcgtattttcgaacatttggtggtaccggctctacgaccaggcttccttcacaaatactagatagcacgtttcgcctggtcagccaggatatccctggggccgcatcgagtctcaacgtaggttcgatatcttccacaagtgcacgcttgtagaatcgtgcatccttcaaagggacgctagagttagggggttgaggcgaagaaacactcccactcggggaatgaggttgagattttgacggtgagggggagcccgagccgaaccccgcaccaccaaagccagccagactcatgacgtttaagcccgaatatgatccgctggtcgccctactggggggtttcgaactcttcgatatagtaaacagctcacgaaaatcctcgtaagccaatatgtcggttcggcatacagttttgatgagatcaggaaaacttgtagcaggaccgggtgctatctcggcgcagacaacatcgccagggatatctgtagcttccatactcttcctagtgaaggcgggaggttgtgagggaccagccggagaaggtggtgctgtggagattgctgtgcgaccatcgagatcgtccttggaaatgttcattacctgaaggactgatttcaattcggctaattgttcttggtgcgaagcgagaagcgactctgtgtctttgatctgagaacgtaactgttcattcttcttctccacagcctcgcgctcgagcttggcagcagcaaccatctgtggaatgatttagaaaaacagctttaaggaaccatggccgagtatatgctcaccttgtttgcttcctcaaagagagccgcagtgagtgtttctagctcttgctcgattccctttttctccttctccgccaataaacgctgagccttttcttctgccaaagaagccttcaattggtcaacctcagctttcttcaccagcgctccgtcttcaatgtctcgccagtattgctcgttttccgactctaacgcgcgggccttttcctggacttgctctaactcctggcgagtaacggccaaagtgtcatcgagttttgtctgattgttaatcgcttgaacaagttttagactaagtgttgcaacttcgtcattaaggtccgggtgatgtgaggacgatagagtcgactctgttgattcagaactgggcagaagtcttgggtccctcaaagtgctgaagccgtccccaccttcacttgaggaacgaacagtggccggagggtctgcggcaacacggagaagatcatttgtggacttggccttcgtaacatgcctatcaggcgaagccgacctattcccggatgacagagaccgtttgtggctggatgggcgcggtaacatgtttgacggcgagaggaaaccttgatgcgaataataagagtggaaggcgatcagactacatgcgaattagtagagcttcatggaagaatacgatcgacttagggttgaagactcactcggccatggtggcgagaatgatctgatcgtgaatcggcaagataaggtagtgcgtgaccagatcgagacgtcacgtatgcgcaggtatttagtccgcccgtttgatgaaacgatcgagtcgacaaaggagtgaggctgtagattaggttgtatcagtatatcgagctgaaggcgattgcgtatccgcgcgtaactggaggaggcgcaaattggattcagataggacgcattgacgcgggacaaggaatgaagtcagggccgggaaggagcggatgcgcaggagagcgaaggtacactcatggagatcccagggacgagattaattgaaggaaggaatgcaaacgacgaaaggaagaggagttggagatgtaacagacccctcttccacggcggctagcaggagatgcctggtggtggaggaaagcccgcactcgcacttcgtactcggagcttcgtcaccccgtctggtgcattactagtggcgggtattttacctgatcatgtgacggggcctctaagagggttctgccaacctcgtcatgggtagacgtgagaaatacggagtactagctggtactgtatttaatttgtagtctgagtaatcctacgtcacccaatgattaccgagactaaatgaccaacttgtactgtatgttatgcgtatgctaatcatgcaaaacatggtgaagcggcgattctgctaagcccccagccttagcttggaagctcagcaaccgcgcaagggatcactggccttccgggagtttgcctcggatggagaccgactcagtccctagccttgaaaaacgctcatttattgtcccttgttggtgcgtgcttgaatctcttcaatgaggttagtataaataggtcgttgccgttgacgtaagacactcacaggctgttcgcataatatcccttcgaccatctagtcatacaagtcatacttgttgaatatcgttagagcaaaataggagcacagaagacggggttttggagtaccgattactgcatcaggatatcttcatgcggggcttgactgcttcgagctcaaaccaaccgtttcctgactacagaggcgggattaagcagactcatacatcagccaatggaaacgtcactgtcccttatcattgaagctttactgcagagtggaacatgcgttcgatggcgcaatcccacctcgtattcccgggatttccccgtacacggcatactctgagtaaagacgatcagtaaccatctccctggaatcttggatggccccgccaatcttttggccttgcagcctcaggccgcaaattaaagtggggttttggggtttgatcgtccatccaacacgccaaatcttcaggaccatattatacgatacttaccccgtgtcct

SEQ ID NO: 1881 - DNA, 2983 bp, Emericella nidulans
ggaatgcacctgacgggttcgcgaagaatatgtcgtcttctgggtgggagttttttgacttcgtcaagaggtctagcagcgacgactgcgagtgacgcacttggtccggaaagcatcatccgctagagataatgcaaccgcaggccacactaaccaagcttttcgaatattcccaagctatgttactacttgctctgtttgtcgagtagctcctgaaggctagtcctcggcgagcaaacgtcattcctataatgtacacctgcgtacattagttggtaccgaagttcgagaggagacgggatgtcaccttttcataaacgcaaacgcatttatcgtcactcatatcaggatcagatctaagattgctacagctcctctaagtggagcaacagcgtcttctcgcagaagttcatagtgggctttcagatacgtatctctcgatgcccaaggccttcaatcttgttcggctcgaggtcgacgaattccccggcgaagttaaacacctcatcggacgatgggagttctggcttcaatagccatggctccgaatataaagtgtcaggatcatgggtgtgaagctgattgaagtaattgcgtatgtcttcggtaacggttgcaacagtgcatgcgttcaaagatgcttgcctgaacacctttggtagatgggaattgatctcctcttctgagtccatagtgggactggattaaggaggtatgtgagaagatgcacctctgcgttaggagagaaggaagaagaagataggtaaccgattattatgtgttagaaactgaacaaaacagagcagcaaacaagacttggactaaggcccagcagtcactactaccagattcacttgctattgttcctctgctgaatatcctattaatgatactctctcatcgtcaaaaccggtgttattgcgactgtcacctcttttgctgatttcgctgcagcaagacgacgcatctatatgccatcttctttcaggcatcccagtcacccacatatttcttaggaagcaagacagtctagccagcaatccgcgaacggtgtcgcacccttatgaatgataattggtgacgacggtatactgcggaattcggtgttgggttctgagactaacctgatatggtgtacgttacacctcaggcattcaaatacaggttggaaacgtgattgacgtcggaaacaataatgtgatcgatacctcgcactggagttgcggttgagctgccgggatatcagtcattcctttgaactcttatgtcaaccgtctctttatttttcttctcctgacagcagatctattcttattcataggcgcggcgacgatagctccggaggccatgaggctctgatctccgcactctcccaggtcgcagagggagcaaaggctgcctgcagcagaggagaaacaggacgagtcgaataccctcgcatacgagctgtcacgttacttgtttgtcgatttgtttgctaatttccgcaatctgcggtaatacttcttccaaaacacgatggcttcaattgtggaggacgaagacgatcgagacattgcaggtgagtccgccttgcaattcgtcttaaggttcgagcggtgactaactcgtcggcaacactctaggctcacaagatggaagctcggataacgacatggatgatacactcagagatgcggacgagggcgggggcgacaatgaacctgatatggacgcggatggcgatgcagacgaccaggatgcggacagcgcgtccaatgcgagccatgcttctgaaagcgccgaagtagcaacgcaacagaaccaggagactacaatgactccggttcccgacaatgcgacgaccgacctaacctccgttttccatccgagcgtgcgtcccgaatgcctgacagcttccagctacgatatagtccccacgaccgctgcgccgcacagtacctcgattaacgccataacagcgaccgcagatatgcggtgggtgtttagtggtggctccgatggatatgtgcggaaattcaactgggtggactctatcaacagtaagcttatgttgactgttgcgcaaaggcatccgttcgtcgacagcgtgataaaggcgggcgttctgatgacatactgggagaacatggatggaaatgctttatcgccagtctattcgctggcctgtcaaagcgaagggctctggctgttatctggcttggaatccgggagcattcgactacagtctatacggcacgacgaaggcaaagagattgccctgttacagcagcatacctcagcagtctcggtgctttctctaacgtctgatgagaaatcattactttccggtagctgggataagcgaatatatgattgggacctcaatacaggacaaaccagacgcgttttcggatccagcgccggtcagatctcggcaattgagctacgccctgagtccagcttgccagtccccagagacacaactgagattcagcaacctaatggaactttctcatccaacaatcaggcgagcggaggtaatagcttcagctatatggacacaacgaatgatcagggcgacaacgacgcggtgaacccgcaggccggatcaccagcagactcgctctttggaggagctgattctttgttcggcgatgcagacggcacagctggcgatggactgggcacagcaaccaattcgtttggcatagatgacgacgatgagttcggcaaagctcttaccaacggtgtcgctcctgacgctgatgccgctggcgaaccagacacagtgcagcaaaaaaatctctttgactccaaagatccttccaatgatgcccccggcgtcgattcaaacacacttgtacccaaccaaccgctagattctcactcaacggacgcagtaaataaccaatcccaaccattagttaacggccttccccacgctgaagaactagaaccgccttcacagagccaagaacacactcaatcaacgccgacagag

SEQ ID NO: 1882 - DNA, 474 bp, Emericella nidulans
accagtaggattctcacctcaaagcccagggaatatgcgcgcgacgccgcgccaggatggctggcacctagtgtatcctgatagcgcctcacatcgccgtctatgccatgatgcatgagtgcgcgcagggttgcgacgagcccaggaactgcaagccacaggtatcctcacgccagagcgcgccacccgccgaagggaagacacgggagtgcaacgagctatggcatctttttgagaagcgaatcagctagacatacccgcaagcgccgcaggtcgtggaccaggttacaaaagacaggaccgatcaaggggccggcggcgaagcggtcatcccaggagcgcaagccgtagagggagctatagcggacgtccgagacccagaacggatgattggacacgagctagcggacgagaggacaagattgggttaggcagggggcgatggcgcacgaagcgcaggccgttcggggaaag

SEQ ID NO: 1883 - DNA, 3448 bp, Emericella nidulans
tcagcatcagttggatgtgacgatgaccacgcaagggcacaacggaccaataggactagtttagatcttttcctgcatagtggtgcgaactccatttccccttttacccctccttgacctaaacttctttgctctctgcaaagaagtcctctcgggagaaagaaacaggaaagacgaaggtctaggagtatcgtcggacataactagtgaatacgacggaaggcttcatcctgtttatttcccatcgctgtcagtactagtatttccgatcgccgtgtgcctgcggaaggctccgatcgatgctgtcaacaattgcaatattgatggttgaatttgtctctgcaaaggtctgccatgattgcagataccatgccgcggcttgcgatcatgacttgcacagagtaggctgattgcgatggagagtgtcctgagtgccgagtctgaattatacgtggagcgatgattcgagatttcagcaaggcgcaagaaaaaaacgaaaggagaagacggcgaagatctcagagaagcatttgttaatggacagctttcagcgtggctcataaggagaacacagcgcagcccactcctgtcaggatcaagctaatttgggccagtccgacagctgtgtgggttcttcagtagaatcaagtcctcacggcgcccgcaacagctgtcggccggtgcaacaccagggctgaaagacgtcattcgggaaaatacaacccgagtaaacataccatcgcaagtaatcgctggcacacatatttttgaaaccctttacacctaaaattgaccaaagcccaaccgtttagaacatacaggaagactcttcggctgcaggtggaagagtgtgcgggtcaaagaaatgcacgatgaattgtttgcgggactagcggttgcctcacctctccattatcagcaggactgacaggcatgcccgaactcggagccctgaagcccctgacaaacaaagccgactcctgggatcagatttatgacaggccacgaccagttgtagcgatctgcgagcatccccagccgaaccaaagttgaaaaggcgcttatttacgctcccgttatgcttattctggcgctcgggtcgttccaaactctagttaccagggtattaagcacggagcaagcctatgtttccccgcccggtgaataattttcaagtcggcaaaggcacaaaacaaagaaaattctggacatatcaaatacacgaacagatggtctttagcatactctgaggggcaccgtaggcggaggtggtcgcgaatcaatgtcgtcgctagagtcaccgaggatcctctaatgggggaaaaagttacctatgtacaatagatattcatattcgactacccgcgaaacgcgacgaagtcttgaatgagggatgctgagatgtcggttagaacaacttgacacctgccgagacccttttccacacttagccatcaatgaccagccgcccaggataactatcctacagcgtggactaattcaaacaattcccctcagcggaaggcccattttattcatatgggcagagagcgttattgccttatgcaatcaatcactgctctgcagcgctgtaacgtacgtactttttacgaagtatgtgtatgcaaggcctcgatgagcaaataaatataggccctaataggtagcccctttgacaggtggctactcctgtacggggtgtgggttcctggattgagtcagtcaaaggttgcgttttgcgttttggctttcttacactgtaaggtacttttgcatgcagctgggccgcagctggaggctactcttgggaagtacggattgcaatagcgtagtcgaaggatgacagaaggtggcctcataggaactagggccgatgggtataaggacggttatcctgcaacggtacctaatgctgccgttatcagactgtcggtctaggatcagggctttgttgcgcaggagtagcgacagaatgcaagacatggagccatcctgataaaaaggccccgccctattgacgatgacgtctataaatatacgctcataaatagtaatagtacatgatgttactggacatacataatccaatgctagtcgtccctcttttactctcagtcgctacgtaccgggctcactcctagcgggacgcgcaggaaggtttccataagaagcgccgcggcaacgcttacattgagactatcaactcgagccgggtcagaggcagctcctacgccgggaaggagtctggcaccagggatgctgacaatggaatcggcacggcccttgatgtggttgctaagaccagatccttcgtagcccatcataattacgctgggcgactgtccgatgagggcgtcggggtgtccttcattcgctaccgccgagccaggaggttgtagcgcgccaggttcaaggtaagtagcacctgtcttaggaacatctgcagcgtaaaatcgccagccgttggcttgggaccgcttgatgaagtctacttcgttctggacgtcaagaagagtcatgttctcggcggcgccggcggaggccttgatcgtgacgggcgacagtggcgccgagtgtcggccggcaaagacaatggcgtcaaccccgaggtaataggcggagcggataatggaccctaggtttcccgtatcaacgacaccttcgagtagcacgacgactgggtatcttatctgctgttgggtgtatgaattgttgatttttatgcagtcattcgtcccgttcaccttcgcttcctctcgcgtttgcggtgcgagttccactttgaattcgccgtcacccaattggacaggcctgagtgcttggatgggcgttcggggaaggggcgatacttcgaggacacacccgttatggggtcttcctgcgctcattttatcaagcagtcggttccattcaccgaaggccaacttgactttgacgttcttggacagagcaagtttccgcaacaccctcttgtcagcgctcaactcttcttctccggctgtctggtaaagatagagtttgtatagctggcgcttgcaacaacgcaacgcagcttcgacggctgtcgtaccatagataaattcggatgccgaagtggtgtagggaattgtgggtgggacccagacatgctgcttcactcgttcagggttttcttctgtaggcttatggtgttctatccgacgtgagcgtcgcttttcttcatcttcaggcgttggaacatattgtgaagagcggccgctctttgccgatcgagattcatgactgtcacgcatgttttgcggtaagcgacgtctgctcgcagcattagattccttattaccgcgtaagtcgtgcgcgtttttgaatcgttgatgttcaggaggcaatgcacgaaagtttccggacctaatgaattcatcttcatcgaaccccatttcgggaagcgcttgccggtgcacttttctattgc

SEQ ID NO: 1884 - DNA, 1169 bp, Emericella nidulans
cagattgagagcgtttttagcaccaagaggtaagcagcagtacgggtggtgtggaggtgatgtagctttatgcggcaggagagcgtttgcccccagtctcctggagatgatgacgactccccaactccgtttacctctggcgagggcgcggcgtttcaaaccaacaatcgcctagatagggctggagtcgcgacaacgtcagtggcaatctattaatctggaggccgacgctttgaatgctgcagaacatttataattatctcttgatgcagcctcattgagcctcgagcgacgttgtcaccagagggagatgtctcccgctcattacagcctcaccttttagcgtcgaaattctctgaattgcctgcgctataaggatttccccagatgatttatctgtgattgcgagaggtacattgaacagcaataccaaggaagctttctgacgccgcaacaactatattctatagctttcattacgcacgatcgccattgtggtataagccagttgtcctaaatgcagtatatactcttggcgataaatgaaccatactcactctgaaaatgttctccaatacagggtatattcctataaaaacgaaagaaaaaataagaagagaaaagaggaaaaagaaagcacagcggatgcttcgaattcccaacgcagacctgatgatcttattccatcagctgtacagttcagtgcctgcaactttggggatgatcttcttcaattcgacttcgctgctcaatgccctattagcgaccttgaaagcttcatccagcaggcgaacaaacgtacaagacaagtccagaatccgggggaatcaacccaggaaaccctctcttgccataaccgttatcgctgcattcacatcagtctgtggcctttcgacaatgccagttcaacaccgagtcttcaattagaagatacggtgacctgatgagaagggggtatagacggacatacctcgatattgtgaggatagccttctcaccaagggtcatctgctgcacgcctttgtcccagcctgtattgcatccgttagtaaagcaatcttgtcaggcaccatgctctgtcccacaactacagagcttatgagcataccgagtataaccttcccaactccaatctccgttttcagtgggccccgaccttgcgaggtatc

SEQ ID NO: 1885 - DNA, 825 bp, Emericella nidulans
ctggaacaccaggaatccgactcggccgctgccgcgcatcaagtttgctaatgatctcctgcaactccttctcaaacccaagctccatcaaccgatcaccttcatcgagcaccagccaccgtacattgctcacgtccaatgcctgcgtgttttctaggtgatccgctaaccgaccaggtgtcgcaacaagaatattcagccccttccgcaaccgcgctttttcgctcttcttcttctcaccaccaataactgttccagcgactatccaatgcgcacagcgcaacagtccctccaagacaaccgagatctgcttacacagttctcttgtgggtgctaagataatcgcaaacaacccgctgtctctatggacgctcgtgtcacccttcgcatcaccttcgttctttgcgcgcgaaagagccataatccgctgcacgagtgggagtaaataagccagtgtctttccggaaccagtctccgcctggatgaacgcatccgtctcttccttcaggagctgcgttattgacgctttttggatagcagtaggagctttaagttcgagtttcgtgagcaggtgtgcagcgagggtaggcgacaacccaagattcgtgaatgtgtccagtccgtcaatgagcggggcgttagtcggcttcgcatcttccatcggctcgtcgttcttgtcttcctccacagcgttgcggggtcgcggatttttcgagaaaagcgacgaaacgacagatcctccctgtcctttcttcggtccctttgattgtccagaaccttgtccgtgtgcttgccttcaccaagtttttggaacccccgtctgtt

SEQ ID NO: 1886 - DNA, 3501 bp, Emericella nidulans
gatggcagagagctgactgaagatttggttacatttgtgtagaaattggctacacccgagtgaacaacattatatgttcctagtatcgagaggctggattgctgcctgaatctttggcgaagcctgtcctaggccccagcaggtgggggtggggcccggaaacattggtttcctatacggggttcagggacgaaaatgcaacgttttgtatccatgtagatatgtgtggttccttacatatttgattaccgtattctctataagctctgccgggcctcaacacctggtaatatcaagatccgcctcgaaagaacaccaaacacctcttaaaatgcgctcatggatgtaatcatcaaaataactaacgagaggagacaacgatttataatgttatcccgggctctccctcggcatctgggctaccgcccactctaggatgctttcgtagcaaagtacaaactgacttaagttctgaaccacgctcggtctttgcgtgcgaaagtcggacagtgttttcgcaacaagatccaactgtcccccgccgagcaactggtcgaatggccgtccgtcatgctgcccacctggctgggcacgttgacgtttaagcacatccaaaacactatccacggtacaaaaagtcccagtgcgaccacatcctgcgctacagtgcaccaaaaccggtctgtttggattacccggcgcagctttagctcgcacgtttcggactttatcacattgttcgattagactcagaagatgccttggctgagaggtggtaccaaagtcgggccaatctgcgtactggatttgtgtaacttcgcgcagaggctcgaacggaaaacccgagtgcgacaaaccaaagtgcctgacaataagcgtggggttatcacttgagtctgtcgacgacctctcgactacagagtcgactgtttgtgaatctgttggcaccataggaacgtatttctttgagaaattgttcacatggaattgcccatatgttccagttttccagtaaggatggcatttgacctgtcctctttcaacctcggcagtcagggacactacaagacgaatgtcttgctcccagataacgcgccagaaatcctatagagaatgtcagtcgatacacttatcatatggatgacgaacacgtcaacgcgaaaagcaaaaggtagaactgacattaaaagtatcaggcataggggcttgggtcgctatgtaatgctggttgctatactcggcttttaaataacttgcgttcacgtagtcacagccgccattgggtatatcatggagtttcactcttgaatgatcgtaaggatagatgtcgttatatcggttcttggcgcccttttcaatcccagcgacacgatatctcggagacgaaggcctatctgaacctgcattattgtcctgatcgtatgaaaaagcttgtttcatccgttctagttccgtcttctcaatgtcgaaaaatcttgaagcggccagccgaccctgatctgcagggtcggatacctcacgcaaccagggcgggagagattgcctttgcggggcaggtagatgttctgaatgtttcagcgggatttgtccgacgccaccaagaagatccatgtgctgacgtatgttcccaaaaaagggaatcgcagcattggacgattcgggtatattgcaaccaccagcaacaggtgcggattgtggaagatcgatatgcattgaggaggttttctttgaccgtgcatcaagcgccggttgatgctgctgttgtggctgttgcgtgagttcaggaaacctagcagagaaagccttgaagcctcccatcaagatcatgccgtcaccattccatccttcagctgtaaacttcttcaccacattgacgagaggggcagcatctttcatgttagaagttgcggcatcgtaaacgataatgtaacggcactgcctccaacggccaaagttcttccgatcagcttcgttggcgaaggtgttcgctaatttcttagtatcgaacgaggggcgcttgaggagggttgtggggatgcataggttcagagcacctttgatatttcctctggaaaaatgggcgtacggtcgtacatccaagagcataagatcatccgcgtgtgatccaacaaactctgcacaagcttcacttgaaactaacctcacgcttgatcccaggactggtggagagacaaacttcgttgttccgctggaagtcgaatcccccgcctggcggtttaaggagagtctgtagaccgctggatcggggatgcaagcagtttttcctgatcctgtacctatggagggaggttgttggtcggttaggtctttctcggagatatacctcccttccggactatgattcggaagggcatgtgaaaaatgtcctttgcctttgaaattattcgaactttctgtattgaaggagaaataattgtctggcagttccgctgccgttccccggggaatggtcccgcgcgggctgaatctattaaaggatggacgagagtcggacaacggaaagagggccgcaggactggaaggaccggggagcgcaaggctttggggttcctggggccacggtgatgttggcgatcttgggcctgtcatcgcagacataacttttgcaccgacagcaaaaaacttttatcttgctctcgaagacgatgtcgatatgaatcagtcctccaaccagcttgccatgtcgatatcgattgcgattcccaagaaggtgacgtgagaatgtaagtaggatcgtcaaggaaatcgcaggtgtatggacgggctcaagtagagtgctgtagagcagaaatgctcgtggggaaaacccggataacaggagatttggcaaaagaaagacgttaaagacgtggaggtcaaatagggttcgggtaatgagggtcaaagagttatataatgtggatgtgtatggataggtaacgttgctgaaaagcgcgatgtggcggcaggtgaatgtagaagccgctcagtgagtgcgaaaaaatggggatggaatgtctcgttcccaggcggcagtccgggtctcctacacaacaaatcgtcgttcccaccaagtatcacataaggtcaaatccagttgagttcctgggccaatcgagtccgcagcaaagcagtggggttgaagctcgactagtgagaactgcgaaggagtatcattgtcgacccactggtgtcattgttcagaaatcagcaggtcagaaggctggagtcaagcagaaaaaacggggggcgtgctatgacgttatgggcggagggccgcgggcggcaaacttctgtgctagccagtagccacaaccagttcggtcgcggtctggcccaaccgcccagagtgagattcattacgggttggctggcactgccttttcctttcgccatttattttttgttctttttggttgaagtacttgtcgccactcaggcgaacacctggttgaccatgggatatcgatgaggaattttgattagagtacgggtgcaggg

SEQ ID NO: 1887 - DNA, 2465 bp, Emericella nidulans
tttccggcacagttggtcttttcgacccgtatgcccaccaaaatatagtcatcctgttcagccttgtctgcactacaacgtcggttccatgctctggaccggatcttcttgcgttggagttctataatgagcatggggatgatgacgtattcgagcctgattgtacacttggccaatacgttgaagacatctgtctcaacgcaaatgctatatgtaccgccaatggttgtgaaaaacggatgtatgaacatcatcgccaatatgtgcatggtgaagctcagattagtatctttacccagcattatccttcaaagcttcggggtttccaggacacaatcttgatgtggagctgctgcaaaatatgcggcaacgagacacaggtgtttcctatgtccgacaacacctggaaatattccttcggaaagtacctcgagctctcgttctggagcaagaacctccgtgctcgtgcgggggtttgccctcacgacctgcaacgagatcatatgcgctacttcggcttcaaagatattgcgattcggattcaatatgatcccatcaatctgcttgaaatcatcgttcccagaacaagagtgacctggaaagttgataatgacttgacgctcaagaaagacgtctacttgaaatgtgaacaacgtataaccaaatttatgcagtccgtcaaggcacggcttaaggcaataaatgttgaaagtgttcttcccgacctcatggaagattgcaaggcggaaattgaaaatatgaccaagaaggccaacgaagatcacaatttgatgatcaagcagttgcaggaaagatatatgaattctcggtattgggaggtcatcccgttgaacaaagcaatgagatctgtccaagaaaaggtcgtcgaatgggataccgcgtttgctgaatttgaaaagaatttcttcccatcagagaaggatatcagacgattggccactctgcaattgaagaagattttcttggacagagatgcctcggtgacgtctttgacttcgaatgatgaacagccgacaaccccaaccgatacagagaatgagcgaagtcagaccccagatggtgcccgaatagttcgccgtatgacgctgtctcctgagaaaactcaggattttctaacatcggttgtcgaagagcactctggggagaagaatagagagatacagcccgaagatcaagttaaccttgacgagatgcgttcagctgccgcatctcctattccagaagagacgccggtatctccgtcacaagaatctttccatggaggagctgaagcagagaacaaaacccaggatcccgactcaacccctgaaaagcaacgagatgatatagctccgtccttaagaaccgaagacattgcaaagcctacattggaccaagacaacttggaagcaacccctgaagcctcggaagccacccaggaaaagggtagtgatgcgagtagcaggaagagcgatgaactcgaacagccgaccactggattaccttcaacaccacaacatggattctcttcaatcccacggccatcagagggctattctcgtcgtaatgggaagtccacttctccgccgcttttgcgtgcgcggacacagcctgccctgtctctcaaggacattgggccagaatcgattaaaggaactcgacttagtccaggaaagcttcaacggcccagtggcactgtgagcccacctctggagttcaaatcgaagaactcagataaaagactgtccgagcgttttaatctcaacgcgttccgaagtgcacggcttacagcaggtcaatctttgatacctcgctcaatacctactaagaaaaaccgcgtttcgtctctggccaaacactttgagcaactgagccgtgagtttgagaaagaacgacagcgtgacgatgcccagagagctgccaaaggtagccactcccgtgcgtaccctcttgcttcgtcaaagcctattgtggaagtgtacaagaatgttcgcgaggccgttgaggaacgggaaccctctgctgagggtgatgatattctctcatccgctccgcggcattcgacggacgactcagctcgagggagtcaggattctgcgagagcaccttcaaccgaggagcagagtacggccccgcatttccagacatcacctcctgagccgacggcagaccagccccaggaggttgatcagaacatatctgaaggtgaggttgaggaggggcacagtgacgaagaacgtacctcagtagacgagcatcatcttgcggatcccagcgatgagttgactaaggactcccctgaagatgagtctctggacctcaaggagctaccgaagcacgaaagaagtacgctcctgaaactgctaacgaacttctggtcagagcggtcagccagcggttgggcacctctagattatccgctcactatgtctgatcacgtctttgcggactgcgatatcctcgtg

SEQ ID NO: 1888 - DNA, 3053 bp, Emericella nidulans
tcgaagaatgccgagggcgaggtcgcaagatataaccctgacctctcaactccgggttctgcgtcatccgtactgccaccccaaagtcacctcacttcaggcaaaccagcatcggggacgttgactggcgatccgtcgactcagcagctgaacgcgggcgtcctgacaataatgggcgcctaccaggtgggcacgaagatgtgtatatggatctcaacatgagtcattccccacggcatcgccccggtgatggctgagcagtggccactaagcacagtcactggacggcactctgagtctgatataaataatcctttcgagtcagaaggcttttttttgtgctctgagttgtggctgcctattggtgtggcaaacaatgtggcggagccgggtttggtaaccgctgagaacgtagaggcaggattgctgcatgtgcagataggagcatgggcatcaggtacggtcggggagagcgactgtctgacatctgatagaccgtggaagagacgggctgcatccgctgcattccatgggtcagaataagctcgtcaggtaacctaaccagtgaaccagctcctgttgggctgcacgatgggcttaccgctgggcagccaccacaccatcaacaaggttttgacaccgcaactctatgtactttgtaaggacagcatcctccaggatagaatccagcgcgccaaaaatgagcgctcaacctatcagccgactattccagatccagagcggcgtcctcggtgtgcgaagagttaaagccagtgcgacccctggcatatcacacaaaagcaacgagattaacgagattatcaacttcgaccttggcagagtggtctggatgctcgaccgcaaccaatagcgccaaatccccgatggaaaagatttagagtctcgctagaagtcgcggatcgcagggttatgggtccgtcaggacacgataagtcaatgatcagtccggctcgccaacggcctgcatccattgcatttccaacataaaagctgaccagtggctacatctttgctatctaactgaccagtgactggtgagctggactctgatattgattgtcgccgtcatcgcgcattatcaggttcccactaagttctcctttctgctgactcctttcctcctctgcctttttatattacccagagacaaagcccaagtttgagccgtctgagacctggtctgactctcacaccgtctctcacaatagtgccccactgcagagttttcacccccagaccccttgcactggatctcttcatttgattctttctgtgcaatcacagccttggatttacaatttaatattgttttatttatattccgtccaatcttgtgtgccatgcccctttatccgtaccgtacggtattttcgcattaccagcatatctgagagccaccaataccacataccttgatttggcgtccgtccatcccggtccttttatcctcgagtcgactaccaagtccaagaccaaggcatgaatggcgagtccaccaattgccatagccggtcgcgtgattcgcgcattcccagaatcagaaataccgtccccctttctcaatgtacccgtcttttagtctagtgtcttcctctcagtcccaactcagctcgactggtcgggttggttacactgtctaaaaagaataatttctcgatgacgcctatggtaacaggatccaagcctcatgccgatcagcggcaggcgaaatgaaaataaaatgagaataagaaaaagcaaggaaacgtcgcttgctgtttcatttcgaacagaaggattgtgcggtgcgtcaatgctgcagcccttgccctgagccctagatcgctgcctggttgttcggactgcgaaggattggcgctgcagcggtctgcaagctgcagcctgcataggcaggggactttcgttgcacgttcaggccaggccagacccatacttttatcgagtcggctcgtccgtttacctggttgggactggaatcatgtccaagtgagaactgggcaatctcaaacccttacgcatgaacatgttcttactaaagatgtctctcatgtcattctgttaagtcacaatgtatatgcaggactggatgctgcggccaaactgcggccaaactacggccactcatctttcctacaaaataatacgggtgccttaccgactccttttatttagccttgcatatcatccttgaatacgagagcgcctacggaggacatgtactttccaggttacgttggagtaaaaaaagtactactttctcaccaccagccaagcaaactagccgcgacaacgcacaatcttaatcaatccttctgatggattgttctcggtcgcgtcatcaatattcgcccatgagcttggtacttggtactccatcatccgtacgcccacgcctactgcttataaaccacatgaacagtcccagcacggtaatgaccaagtaatttgttacctgcaccactgcaaggctgcaaggctggaccgaactcctctaaccaaactaacttttctccgacatcatgtattacacgacataacatgtgctgctgtccaacgcagtggagtgggggatatccccgcaaatgagggcttgacacgctggctcagactcagaataacggtaggatcgttcgtaactttgtggtggattggcgctacggggaatttctggtgatcggttttgaggttgtggaggtcccgttagataggtagtcaaaaaaccccacttgcaaaatggaaaccattgcatacctcacgctgatgtgactgatgatttatcctgacgagactggtcatgccctggccggctagttattttcctggtggccggaggcccaaaacgggtctaaactagcggtggtcttcaaaaggtattcggtaccaataccttaataaagaaaaatcatttccttaacatccaattgttggtggtagatacgtgcctcttttctttttttctccacctaaccgtttgtttcaattcccatgtttctacttgttcattttctcatattctatcttaatacactctt

SEQ ID NO: 1889 - DNA, 2956 bp, Emericella nidulans
tactctccaggtccgtacatccgttctcggcgtccggttatccaagtcacgttttgttgttgcgctactcaatagcattcatacgtttgtcttctcttctccgccgaagaagctagcggttttcgagaccacggataatcctttggggctggcatgtctgggacagaaggtattggcatttcctggtcggtctccagggcaagttcaacttgttgaactggaaacggggaatgttagcatcatacctgctcacagtacaccactacgtgccatggctttgagtcccgatggagaggtgcttgcgacagccagcgaagcggtaatccctccttgaatccggccagcactcaattccgctaactactggtcgcagggcactttggtgcgaatatttgctacgagcaactgtgcaaaaatggccgaactttggcgcggagtggatcatgctattatattctcacttgccatctggccatcaaacaacctatttagccgtgacatctgacaaggctaccctccatgtgggtaacctcccacatccccgcaacgccccgtacagcaaccagcaagcatcttcatctgacgacggagtgaacaagaaatggggtatacttggaaagataccgctgctcccgagagtgttctctgacgtctattcattcgcaagtgcacattttgaactgggagaagaagagccaggacccacatatgcacccccgttgggcacagtactaggacgacctccgaaaggtgtaataggttggtcgaacgataataccatactagtcgttggctctggtagtgatggcaggtgggaaaaattcgttctccgtgacgacgaagaagggaagaaacactgcataagagaaggctggaagaaatatctgggaagcgggagctgacggagacgtcggtggcatacatgctcaacgtgcgacaagatagcaacgcaatccgacaatgtcaactaaataattccggcgacaaccgctaccgattgaattctttagcaatggcgacatcacccaagtgagcagtcattctcaacaacgtgcgagactgagaatacgggcggccgtactggttctactatcagtctagctccagccctaaagtccggcagtagatatcgggtctgaacgccaatgagttcggcaacatattccgcacgcagcagtcctattattcgcttggcttgtcatgttcactcttaccgacgacgatcatgtctatctcggtcatggcggggcgcaggggatcgagagcgttccggagatttgtccctgtaagacctatctcgtcggcttcgctctctgtagtcgcggctgcttctttctctggaacgcgatctatcatcgttatgtcggcggtggcggtgatggtgtcgggaatgacgacttggtctctctcggctagactcgcgccgtcgcgaagatctctcttttcttgcttctttctccagagctcgggccacttcttctttcttctcctcaatgagatattccttcatagggtcctcatcgtcatgattccttatcagctcctctaattcaatctcctcttttagaagttggcgcctgggttggtccctctctccgctatgtcctctctttcgtcttcttccctcatcgtccgtatcgccgtcagcctctttaccagccgtctcgcccaataacttggcaacattatttgtatcctcatcttcgtcgcgctttttgtatctcgtatggtccacacgtagtaccctgccgagaaccgtcgctccacccaagttgtcaactgcgaggtcggtactccgctggtcttcatatttgagaaaagcaaaccctcggctcttccccgtttctttgtcgcgtactaggtttatgtgtaccggctcaccatactgcgagaatatggtaacgatgtcaccttctgagagatcgaagggaaggccgccgatgtagatgtaggctgtgtctcgataatccgcgtgccaggaagcttccgggggactggaaacggccatattaggagctgcacatcaagcaaaaggaggtatatacatacacggcatgctctagctcgcgcttgttcagcgcttggacttggcgaatattgttcatgttatctgtggtctgtagtagaaagaaacgttgatctctgatgttggccaatcgatagcttccgcgggtatctctcatcacgtgactttaccttcccaaaagagatgggatatttgggtaggtggatcctcaggagagaggacatagaataacacccgctggcgcgatgctgaacttgttgattttaatactatttactacatgacgccccgaacatctgactacaccagaatctacgctcatagtacgctaacttacaatctccgctagcataatctcagaacacgttctttgaaccgctctgtttccactctgtttgccgacacccccgttcctccgccttgaacaacgcgtgagattcgctggagctgtgaaatcttacctagaaggtttggatggtctgcgctagctaagactggtcagtctcggacagacgatgtctacgtcaaaaagatccagcacggtgtccagtaaagatgggctgaagaagaacatctggtcttccatgctggatagcgctgcgactggaaagcgcttaccggaaaagaatctgttgatactaggtgcgacagctcttctgagtttcgggtcgtcgctaactccgccttgtttaggaggcacaccggagagccagcgagagttcctagaagcctactctgcagacaccttggattccagtctatcgaacgagaagcgaaaaggaaaagggaaagtgccacctgttgcgaatcaattcgccctaggctacacgtacctagatgtgttggatgcggaccaggaaggtatgtcggcagcacagaattgcctacccgcaatgggagtgataacggatgctaagactgtgacaagat

SEQ ID NO: 1890 - DNA, 1534 bp, Emericella nidulans
gaaggcggcatctgcaaagggcaagtgacaccggtttggttcacacggctccctcctgtctcagtcttcttggacagctcgcgttccacaaccacggtagggaattaaataccaggccacataggcacactccaatccacagcgccagttcggtgccgtagataaccatccccaagatatcgaggcacggttcgaacactgcgcgtaaagcatgagcaaggttctatctactcaaatcactgtgtacggtgatatcaagtacataccaacagaaacgagtgagaacagatctccggccgcgtcgatcgccacgaagataaaactgatacctcggacggtccgatgcacgtagatgtcccagtagtggcgcagcacgcctgcggctagaaagcaggagctgaggacggccataatggttagcggccatttcaggttcctgtctttggcgctgcgcagagcgaataccaggccggtttcaatggccccaagcaagagaagcagggagaggacggcaccgatgcactttcggattgagtgtttctggtaaaagcgtgacatcccgttgcgtttcaacttaatggtatgaaattcgcatactttcccatagtacaaacactgcgcccatgtgaccaggctcaagaacgtgagaatctgggcttgcacgcgaagggcgatgttcagctctgagacgatgttgtacacaccgagcgggacaccggcgattgcccagagcatcatcatggatgcttgcaggccttcggtgtcatggcggcgataattgataataatctgagggaggagcttggagttcagttagcgctgatatcggccagcgacttgttaaaaggccatgtatacctggatggaccagcagacctgatttggttcgttagagaagctagtggtgaggacgaggtattttactgtgccagatgtgccaagtatgtttgcggcgacggggatgttcttattactatgtatttttagtttaagttttattataatattataccgtaatgtctatttatttctaattattttttatgtatttattctttacttgttttttttttttatatttattttccttcttatttttttttttttttctcgtttccttacgatgaattattttgttttcgtcttttatttattattttattcattttacttatacatttttttttataatattttcgattttttatttttttactgtttatatttttctgtatttattgtaatcattattctttatatgtctattgttctttatcctcattattttaatttatctttcctattttcgttttttatcattttactttactatatcttcgatttactttttataatcctcttcttctatttttatatatattaccgtttcttgtttttttctattttctttatgatttaaatgtgtatcttatttttatttatcactttttaatattcggtgtctttcttatttattatgatttctatttacagttttctatatttatatttttttacataaattatgtttatc

SEQ ID NO: 1891 - DNA, 1211 bp, Emericella nidulans
actatgcttgtgctactacttttcttcggcacggtggttggaattgccacagttggcattcgattcttgtggattagtatttttaggattcgactgggtcatacttccccacaagccttactggtaatgacggccatattaatgttgtcgattctggctctcaactactcgatttccatgattgttgcaccccagtatgcgacatttggaccacagacattctgtgaccgactgtccggttcctctgtgttacctgaactacaatgcgtcgtcaagcgttgctcggaagcctttggtagcgatgccgccaagaaggtctgtacacccagtgttgccagcacggttttaaatagggtgaccgtaagctttcctttttttggtgcaatcttcttctggagccagtttgctttcatcggttagtaacccctaggttatttgctgagtctatactgatcacttcaggggtttacttgcttgctcttatcacttcgcttttgcgttctccaaagttagacgaacaacaactggatgaggatgcggaagaggctgaggaggaggctttgctatcaggttctaggagaaacatggatgatcgatggcaaagtattgttggcagagctagcagaagtgaggacacctgaaaagtagtaggaagtcaggcttcttatgatacaaactgtctcagtaggtattggatttggcaatctcaatttcattgatctcccatgactatgggctcttctcttctgatctgcctctgagagcatacagtacacagcaaaaacatggaccagtcacggagcactcaagccagagtttaagcaagacttcgcctaaggtttcgcacgatcattcaaaagtgcaagtgcacgctcaaatgcattgacaacatccatatctgtattgagccattagaggtgaatgtaagccagtaccattgtgacttacagggtcttctcttcttctccagactctcttgagaattctggacatggtgcatctgcgttctgaacctatggatagggtcaatataatgcaacctacctattgaaagagacaaccaaccttttcacggctctgctttcgtcgtgtacaacggtagtctgagaccaggatgtaagtatctaaaggtcaaatgttagaaatcccattgcgcatgttgatatcggacataatacgctgagcagtctcagtatatggttgcggagctc

SEQ ID NO: 1892 - DNA, 4498 bp, Emericella nidulans
cggcgcgtcgagctcgaggtgcgcgtgattcattctggatctgagggaaactgcctctggagtgctctgctgcagtggggtcttaatgaagcggaccgcttgggcttgataacataccttgaggcaacgtaggaggggaggccactgtatgagcggttcgggtttgaggctatcaaggtagtggagtttgatgccggtgcatttggaggtgtagggaagcaccagtataccgtaagtgaagtggtacgatccactcatggaatcgctaatatggatagtttatgcttcgccagccaaaggggtttcgctagtagtacatactttatccggtataacgagcaagcatggtgggagggcgggatcgcctgctattgtgattttgaccggccctatgcattatgatccttgttcgtttctttgggctctcctgcgctcgggattctgcatcctacaaggaaagtaagactgaattctttgttctcaagtcagcgtttgcggaaacattcaagtacagttccactagttgtcccaggtttaaacatagattgaggaaccatgaatggggtttgcagtaccctcgcgagcactagggcttgatgttcttggtatttcactgctcatgactccacaaaaccgcgtagatgacattgactctagccaataaatgatcttcaaaggccttttggcatggcttggccattgccggcaggctaaatattttgtcttccccagacacagtgtaactaggcacattatacgtcggacgccccgttgggccacgccactgcagccccagcctctgatcggcgctgcaactgttcaccccgcttcaagaggcaaagtctgcatgattccgacgatcactaggtctggggcactggggcttgacatctgaatcgattggtttcgggacaatagccgccgcatgggtttgacatgcatgtcatccaggtctctgaagttaccgaaaggcgattctgcatttcctctccaccggattccccgcgtcctgcaagatgcggtgatcttctgaatggctatggagcaccaaaataggatgatctttgccatattgtcttgggttgggtaaaatcttatccacggtactttaagtggcgcgtcactgaaatagcaagatttcagatatatataattactcgtcctccatctgctctgcagatgaaaagtcattacatcccagaaatgcagctataacacttatgacatagatcatcttcgttgccaaaggttgaactacttatgaaaagactttatcatctgagtaaaactcgagtgacacaaggataggtccgtgtcgtgaacatggcaagcagcaagactgtaatctacttgagcgagtaatcagtctatgtctgggactgtttcgtgtacgacggcaccgtctagaatgcctgctagggtttagcgatagacaagggaccatctgcactaagtgcctttcgcggccgtcgttgaatggccagaatacgattctcgaacagttcgggcaacgactattatctactggggtctatgtacaaccctcagatcgacccgattttgtaccagcaccaagtggacaaagatcaagcgcacgtactctgtcctacaatcttgtttcctcagcagattcttcgcatacgcaaacaagcacaattataataatattatcgtcgatctcgatcttctgtttcctcaacgcctcgataccttaccgcctcgattgtgatatggaccaatctctgacgtcgtgagcacccagtgagcacacagtgggcggaacgggctaagccttaacaagtcactgagctctgaaacaacccaaccacaacatcttactaagtcctctcaagaatgaggtttcacctcatcgattctcagtctcggtcgttgagattcccgttccgagaatttcgatcggcggctaaagaatgggtcgccggtcggtcccaattccggggcccaattcccaatacaatcgctgggtcggagatgaaaattgtgggaatgggataatgatgtggattgtggaattggtgccaggtgtccgcgatgatcttacctgacctgattctgaatgccttgcacatgcttcaccttactcggtcgacaagtgcgcgtacatatcccctgtcgatctcagtgttggatcatcattcagcactaggcagtgagcactcgaggagaactcctctcttgacttcgatacgaagatagtcaagtgatgagtcttcaatacatatgaaggatctactccgtagggtgtgtggtttacctaatatttcaaggacgtcagtgctcttgccctataggaaatgaggattaggatatatctcgggccctcttcgggatctgggcggccggaatggaatatgctttgggttagaatcgtgtatcttatattgaggcctccatctgcatctccattttcacctaactctctatctattctgcattctttccgagccgtgcatatctagcgcttaaacgggctcaatgtcggatgcgatgtagagtaccatattccgacctcagtgataagtggcggagatgcggtcaggcggccgtcatcttcttcagattctccatgtaaatttctgactttcggtgatatccatctgtgaaatccttcagataataagttcggagtactacagtggaagaaaacttcaaacccgttcagtaatgaggttcactggccatttgatatatcggctgctccgtacgctggtccactttgatgcagcggcagccgtccgtacatatccaccatccatctacggagtacccaccgtccatcttacagagaatgtcttacagagaatggtcctgagtcgagctctcgggcacggattctgcctaaattccagctcttgtatatccctatatctaatgcgtgtgctgcatcgatcagcaatcgggcggatcacgtgccacgtgattgacaggtcacaagtcgagcttgaagatgatcccacgcctgacaggaacaggttccaagttgccttaagtttgcctcgacaaggaacatcgcatcgagtcattgactgcgccgttcgcgtagcaattccggaacccgttaggtactacgaatgtagcattattaagatgaaagaaaaaactacgactgtgtgatgtcatggccactcgcttagttaaatgagccccaccagacccgagttgggattggccgctcttggcgccagtgccgggacacctgcccgtttccggagagtgcattgcgacggtttcaagattggggacaaagactggcgtgaaagtgaaggatccgtgggtaggattatgagggactactactaagagttggccaagattcttgttcggacgtcgaaccaacctaggacgcggactgagcgcggtcattggatgcggggtgaaccccaggaaacccagagaccagggcgctcagcagcaggggcagccaggacaggactcgaccgtcgaggctttgtccacggtcatgtgcagcgccatgtgcgccacagtgccgctgagggtacatgcgaaagggtaggttaaatagacggtacagcgattagtaatcggcgccccaccggaagcactcatcgagtcagcctcaggcccccagcacgctccgccgaaagcggtaaccctcggctaacctacttgatggcctgatctggtgcacacttggcccccgaaccgggctcaacatccgacaaacagccggggacgtagacgggtcacggcgggggataagatttcaggcgccgcgccatcgcggattaggcggttcgttttttccccattaaaatcactgattgggacagagaatacgtagaaaagcgaaataaatgcgaaataaatgcaactaaaagcaatccaaccacacgtaagtgcctgacaggttatggggctctcgggggctctccattgttgtactgctaagtctccgtcgggaagagccggcgttgtaacactgccatacggggtattctgtacagaggcgtcgtcggactgcgagcgcgaacccgatccttctcgggggcaacactgtccagcgtgacggcattgatcggcggcgcaaagacgcctctctggccgtagtggttgccgcgaagcagcacgaaggattgtagcgacaagtaagtggtggacgttgacgcaggtcaagagacttggctgttgagacgcaaccgctgaggaaaaagtgtgcgatgcttatgtggagagcacggggggatgatacgggggaacggatctgattcgcttggccgtcgtcagcggcgccggcaacggaaatgtcgtcgacggtgcgtgtgtgtgcgtgtgagccagaggacgacggagcagtgtcggggtacggagtagagtagcaatggtggcttcgggggagttgccactagcgacgcctcttggcgctagaccatggtgggttagccaagtcgccagagttgcccttgcgggctgtggggcccgacactgtctttactcgcgggggcagctaagattggct

SEQ ID NO: 1893 - DNA, 1489 bp, Emericella nidulans
ccgtgacactctctctcatgatccgcgtaccagagctctggatttgggatctttgcatggctgccttacaagtatattctcagaagcggtgcccaaagttttaatccaacagttaatatggatatcttcctacctccatatcagcagagcagcagagcttcaaagtttgaagataattttagacctgctcgtccaataaaccattaataccattaataataaccaaccattcggcagcttcagactcggaggctgtgacagtgacactagctgtcgctttatgctttaacttccctcaatgcggaaatccttgctagtggtccgcccctcttttttcgctgctttttgcttgattccgtcgccttccctctgacatctcttcttctccatattttcagactccattccttttgagtctgtgtttctattgttccttcagaccaactctatctgagttacatctgtagcgcgacccctttttttttgtgttgtgggttgtggctttaaagagctttgtccgtcaactcctaattacggagtagctgaatccgaatcagattcggattcgcaagcttttcttccagcttgacgacttacccctgtatctgtttccagagcggatacatctatcagaacttgaattctgtgactcgaactgattgacgttcgctttgtttctgctaagtcaccaactggttacgtcaaacaattctgcggcgagctgatcgcagaatttgcgtcgaggagtcttcttgaagaaatctccccgctgcaatcacggagcgcaagcgctcctatttgccctactcagtcaagttggcgggccttcgctactcccagtcatccttcttgcaccctctcctgggccccaagttcagggtcttctgcgggggagacaccaggcccccctaactaggctgtcataaacacatcgaatctggcacacggtcgcccatcggtaatgccaggcccttgcgaggggtctggctaatggatggaggagcaacgtttctcgggactagttaacccatcctcgttattgtgattggacacgacacgccgatactcgagacatctcggtgacattgaccgtttgaaatcatactgtgcaggctcagaagcggccttcccgactacataccagtttactccactagcgaattgcacgaaaatgtccgagtccgcaaagtcggagaagttcatggatctcaccaggttcagcacaccggtgcctgaactggatgaccatcggttccaattagataatcaacatcgcatggaagcgacactggatgtgactttgagccgtcaaaatactgcgcagcaagggatagcagaagtaccccagcgccccgacctacttcaagtccaggatgcctacagagattctggaccgtttttgcgggacttcgaacacgctattctggacgatgatcggtcggcgaaagacgtgaatgctgtgggacgccgagtatctgtcgatcccact

SEQ ID NO: 1894 - DNA, 2028 bp, Emericella nidulans
aaagatttctaatagaagctcgagttcaaactcgccagtcccaagcctgagccggccattttggaagaaaagaaatagaaactctgtacccgtaactctctgttttgctagtcctgtatgtacataccaccgtgtctacgttagatggaactatcggtgtttcaatgcttgctattactgccataaactgtacagaagccgtaagcaatgccctgaattgatataattttgcgtaggccgtagaacaattgatttcatggtattaaaattaatcaagaagtccagtgtcaaaatctcttggcatgcgcaaaaccgaaaaagcctcccaattccgcaaactttcaaccaccgtcacgaattgctaacaccaccaacgttcctgaagacccggacaatatccctggacaagacaggaaagcaatatttggcaaaatgcccaaacgcaaactctccgacctgaccgacacgaacgacacggcgcaaccgcagaaaccaaagttatctgaaaaggaataccaacacctgaaacttcaaacggcccggctaaagcagaagtttgagttcggggttacgtcgctatcgcgcgcactcaagaccgctcggggctttgaaaggcagaagctcgggaggaggcagaaagtcgcaaagggaggaccaggaacggagatcgcagttgcgcatgcgaaaaaggcgaagtcgaaaccaaagtcgaatgttagtcctgaggagactctcaggaggatcgaaggggagattcaggtcttgaaggttggttcaaccttttccttccccgtgtatttcgttgatttcggaatgagctcgtttgactgacttcggtgcagagcctcgacccaactacgactgcggaaaaatatctcttcaagcagctagccaaaacgaaacggattgccgagtcacctgttttctaccgtttcaaacaatctaaagaaaagaagatcaagcttgagggaccaaagagtacggaggaagcgaatgttacagcgagactttttaagtcgaatcccgtgcagaatgtcttgccgggtattatggagggattaaggggattgtttggattggaaggagccggggcgaaggggaaaaaggacgagagggacggtgggaagaggaaggctggagaacaggctgggggtagaaaggatgtttccggggatgagtccgtgtctgggtctgaagatgaggatgaggccgatgcgcgagacgcggaggtctggagcgggatatagacatgaaggatgcagagagtggtgacgacgaagaggactactcgcacttcgacgcacgactagcctcagactcggaagactccaacgacgacctcttaagtgaagacaacgataataccggatcaagacatgctcgccgctcctccatgtccatctcgctctccccatcacgctcgccctccccatcgcaatcgccaccaccaaagaaacccaagtctacatccgcttccaagacccccgcgacaagcacaaccttcctcccgtccctcatgatgggtgggtactggtctggttctgagtccgagcctgaggagctcgaagaagccccgaagcggaaaaaccggatgggccagcaggcgcgtcgggcactctgggagaagaagtacggtgctgcggcgaaccatataaaggcggagcagcagaaggggcagaaaggtaaaggaaaagggggcagagatgccgggtgggatttgagaaagggtgctacgggcgatggggatagggatcgagatcgtggaaggaagaagttcgggactgggtcgaatgctatggctatgagtgggaaggataggtttgggagtggtactagcaccgctaaagagagaacgactcagggtgcgaagagcaagaagacaaagccgcaggatgataagccattgcatccttcttgggaggcggcgaggaaggcgaaggagcagaaggcgacggcatcgtttcagggcaagaaggttgttttcgattgataggcatgtatatatatctataatgagattctacgtga

SEQ ID NO: 1895 - DNA, 2408 bp, Emericella nidulans
cattaacttgtggggcacggcatgcgaactggagattcgtctccacttacaagaaggacagactggttacggcacagaacccgccaaagctctggccgatgatgctccattttcgcttctcttctgggtagtccgttgtcagacagcgacggatagcttcgcagtctttcacaatgctatcagcccggaactgtttgagatactcggcctgtttaatggcattgccctgcagagccagggtccttgctgggacggttgaacttaacccagttccacgctggtcgaggaacaatacctgttcaaggtcttcaatcaggagaccagtctcttatacataattctcgggtgaataaaggacaataacagcatacctggtatcctttgtccagtgctgtcccgacccagccgtactcctgcgggggacgacaacccattcctggaccaccctgcaggtagacaagccaggggagaggtgactgcttgtcatctttaccagagtcaagtggttttgccgaacgacggacgctgcgagcgaagagtcgaagagtcccatctcccggtcggctgtagttgaggggaacctcgaagaacagctctgcgacaagcagctttcctgggcgaacgttagcaaatgcgggcgatagagcaactggattatccagtgcgtctttgaagcgaacctgagatgttgtgtaattttcggtcgattagtttggcagccatgatgttgttgtctctggaagtctgcagttggtgtgttgttaccccaactttagccagttcgacagtttcaggcacccgccaaacggatcgtttctcagacttccaccatacaacttcctgcacccacagccatgtcaacaatgaacgtggacatcgaggccaccgcaaaggagcatggtcaactccaccaagatctctgggagtttttgaacacagagcagtcaacagtactgcctgatgcttcaagcctggctcgagcaagatcgtctctcaggcaatcgcttgatgacaaggggatcggatacgattctacaaggcgacacatcctggacgaccttgtccccgcattcaatctgagcagcattagcccgctttactatgggttcgttactggcggtgtcacgcctgctgcgctatttgcggacgggatcgtctctgcatacgatcagaacgttcaagtccatcttacagagcacaccatagcgacagacgttgagtacgcgacgttggggcttctcgtcgatcttcttcgcctagaccatgattggcacaatggcacttttacgactggcgcgacagcaagcaatatcttagggttggcttgcggacgggaatatgttgtacgccaggcactgcggaaacggggaccagcaaatacacagggcgtaggagaaattggactctttgaagctatgcacgcggctgggctctcggggatacaagtgctttccacaatgccgcactcgtcgctagtaaaggcggcaggtgtcctgggtatcggccgtgccaacgtccagaacgtttctgatgataaccatcctcttcgattcgatctggataaggtaaaagctaagctaggcgacatgtcaaaggccactattatcgctgtatcctgcggcgaggtcaacaccgggtatttcgccacgggtgggctggatgagatgcaaaagctgcgcaagctatgcgatgagtacggtgcctggctacatgtggatggagcgttcgggatctttggtcgtgttcttccagaaaccccggaattcactgccattaaacaaggatgtgaagggatggagttggcagactccatagcaggagacggccacaaaatgctcaacgtaccctacgactgcggattcttccttactcggcaccgagatgaagccgtgaatgtgttccaaaatgccaacgcagcttatctaaccggaggcactagcgatgctccatcgataccatcacctttgaacatcggacttgaaaactcacgacgattccgcgccctacctgtttacgcttccctgcttgcatacggaagcaggggataccaaactattatcgaggagcaaatccggctagctaggaagatcgccgcatggctgtacgaccacccgaagtacaatgtgctaccggaagtaaatagcaagcacgaattgctggataagacatatatggttgttctgtttagtgccaaagacgataatctgaactgccagcttgcggcaaagattgatgagactcggaagatatatgtctctggcacctcctggcagcagagaccggcttgccggattgccatttcgaactggagggttcaggctgatagagacttctctattgttaaaggggtattggatgaggtggataaaaatggggcttgatatctgctatatccagtcgcagtacag

SEQ ID NO: 1896 - DNA, 4088 bp, Emericella nidulans
aaagtagaaatctctctaaaggttctctatgtataacattcatgcagagaagcacgattcgccagaaacaagttaaccgtcttcacgagcgctatgcactgggggaccaggagtcacaagaccgccgcgacctggctggacgcccctatcaggacgaaccggatgaatcaacatatcaaggacgtctggtggtaggaccaattcatacccttctcgccattgtagcatattcacgtcgcgcatatattgtacctccatgtgtcagctcgtattcatttcttgatcccgataacagccaaattcctagggctctggccataatcaaaaacaggctcaacccagcattctttgacgcaatcctgttcacggaggaattgccatcggtcgacagcaataatagcttcggcaactgcagcgcagaacgacattaatgtccaagtcacgctgagccgtttcttcgtaggccaatattcggtggcgtagcggtccagctcttcatcggtaattgtgaccatattttctttgatcttctggccgtagaccggatcacggctcagcttcacaacggccgcacggacatatgcttgaaacgaggtgaaggctgccttgcgcaaggatccaacaataagagggttccccacgtcctccagcttctcgggttcggtactataaagatctttgggtacggatggttttggcactactccccggtccactagtactcgctggagcagtgtacggtagtaatgacgggtgaagaaatcttctgcgtcggcggtgccccagttgtacggagcttggacggccattgatctggcggtgatgttcagcttcacaccggtcccaccatcgtgcttaaattcttccaagcgtcttgacattgggaagccgtgagggtcgtatgcggtagcgtctttcgacaaacgaggatgcatggtccgcaaaacagggagcttgtacgtagcagggccgagccgctcggtcatcaggttatagcaacacccaatcatggcaattgccttgaccgacggattcagaaccaacgcgcgaacaccatggtgaacaagatttccacatgaatgcagcgacaccaccatgacgttcacatctgaggcctgctcagtattctctacgtcgtcggtgggttccgctgatttctggctgctcggggcgacaacatctttgatgatcggctccaggtaaccgtccttgatttcatgctcaatatagttcatcgcgcctcgtggagcgtctgtatttgtattcgttactggcttctgaacagtcccgccggctttaggaaaggtgccgagctcgtcggaggtcacgctgatgtcgcggaatatgctaatctccgcaacgccctcatcgtcgttcccagtgtcttgttcgtccacgtcgtcgctcgtccgctccggttgcgagtctagcttttccactggcatgtctggatcttcgcaggtcttgcatttatccagcttcttattgtataagcgcaccttcttcttctcagctagcttcgcatagacgtccatcctgttggccccattgataaactggtgcctccgttcaatcgcaacgatgttcctgttatacggaggactggccaatgtccgcccaagataattctgcccagatccaaaatccacaatgtgcgtaatctcctcgccccgctcccgatgcacggtatcacatagtgagttgacatatttcgagaaatgagcaacctcgtgatatttcttgactttcattccgaccgcaatccgcggcggtatggtcgccttcccagagccgtgcggcgtgaactccctgcgcaacgtaagtcgacggatttgctgaatgaactctatcagagacagcggagggagaaccgcaactcctctccactcctgccctgcaagatccccctgcttgtaggccgctagcatcggttggatatcgtcccgcaggagcaggtcgatgatgtccgcaatattgtggtgctcaaagaactgtctccaatcttcgggtagaagtgtagtatagaggtcaggctcgcgcgtaagaaaatccagcatatgtacgcccccgcagaggtgcctaaataggtcggatgaggtagcaaatgacagcaaagcttcgacgtaggcgtctggatccgtccagccctcagggaggggaagactcctcgtggctgacattagtcctttctttttttttcctttttcgtttttgtagcggacaggactgcagaggggtaacggttcggagggcgaagcgcgacttgatgcgaacgggacgacggtggggaacggggttttctagaaaagcacgaccaataacatttggagcatagagcggcctgaagtgtccaaaaattcgagagacagtgttgttagtgtaaagtgacagtaagtcttagactctccaaagatttttggcggacaaacttttgcgctggcgggtggttagaaatgcagtggaatgcggtggggtggatctgacgagagtctggggagactgcggagtctttaccctctccctcccttcctagattcccaagcagctcgaatgaccgcgttcgccacgacaatccgagaaggttatgtcaattatgcataattacagaaccgcccgggcatgaactgatcgtcgagagatcgacgctaccttcaggagcttctattcagtccaccggttcctggcggtgtgcccgtcgccatgacaccatcacaacagccactagtaagctagcactattggcgcagcggagaactagtggtccaggacagttgctgatcttatctatagtccgctcacaggtttcatatccttttccctgatggctatcgcggcagtggcttcgtttctgtgtgacctgggcgcctgggcggcagcctgacatccttgatcaaggatatgtcagggcacgtcccccggtgttgcagggaggagaagagacggtagggataagaccactccacgtatgaaatttaatccggcggcaatctcccctcgttggcccttgggcctggcgtcctgcaaactccgctccttggtgcaccggtctgcgtcgcagggggcaggcgattcgtcataccgttgcacatgatacctcctcctatcctacgctagctcttgcgggaatttctatatattgagacattgcttttaaggacaggagacaggaaggcttcgagggatcattcaatggaccttcttactctttacccccagaacgccatgcaagtcggatgaggtcggaaacatggtaagaccaagaccgcgaagaaaatagcacgcgacactaatccagtctacttcctagagttcaactcgccctcaaacagctccaccattcggatttatcgccgatatactcttccaaatcatcgtcaatggtgaagtcaacactgtgttgaccctctgccttctcaacagggccacgtatgataccatcaaggtcttggaaccgtacatctgcaagtgctttatgcgcctccatggcattgatgccttcagtccaatattccccctcgactcagggatgggtcagcaaagcgcgctgaccgtgcatgcccttgtgagatccttgtatcgccatgagctcgcacgccgcttgtcccgtcacatcgtccccgccgtatgggggccgttctacgacgatgacaaggtggatatgaatttcgaggccgaacgcaagctctctagacgtttagaacggggcctccacgtgctctttcacatggccgacatcgcacgcgacatcaaacgagaaccccaggaacttcagaaaccctcgtcctcttcatcgtttgtctcaaaacgcttcactgtcctcacaaagctcctcgaagattacgatgactttgaccctgactttaacttcgcctttccgcttaacaaggccaggaccaataacaaacacaaaaagaaacaaaacctcctgatccccccatcctcatccactccatcatcgtcactggacatcaaccacatccacacaaaacatcacctcacagctatccttaaatggggccacgccgagttcgaaatcggcaagcgccgcctagagttccgctccaattaccttaccgacaccctcgagg

SEQ ID NO: 1897 - DNA, 3439 bp, Emericella nidulans
gtcccagttgtcaaaattcgtcttcttgatcacccggcgcatgcccaatgcgtacgacgcggagaagaccacgttcgtccccatccaggcgtaaccagcgttgagagccgacagggtcgccactgccgagtcagagctggcttttcgcgttgcggcggttgcgatctggatgtcggcccaggctgccaccacggagctgagcaccatcaagccgaaagacagcagggcaagaggcttcacgctgcctccgaccatgaagacttcgccgtacgcgatgacgatgattgtcaggttcttgaagatcgtataaacgggaacagacaggaattgcagcgctttgttgcccgtataaatcattccgaccagcagtaaggagatcggcaaccctgcgattgaaaaggtcagcgtttgcataccgctgggccttgggtggaagtctcctacacgtctgagccttcttcaagtcaaagaggccgaggttctggataaggccagccttcttgcaaaccattatcgctacagtgccaatgaaggactcgtcaagttaacgtccatcttgcttttatggcgtaaagaaatagtagaagtcatagaaataataaatttttaaatttattattgttgtttttaccaaaacaagacaagcaacacacctggatagcgagataaagaaagctcaggttccagctggcgccggaaacgacgtacttgttcaccagggtcatgctgatggaggagaggcagtacgcgagcactgcagcggcggcattattgcttatttttgacgcgaagctcgtcacggatccagaattctcgacatcacgctgtgactgaagctcgtaggtaggaagcaactcgtccttgctaatgccgtttcgcgtgctcgccattacgctcagggggagaaacaagatggggagagttgccagccggtgcgaggcacgtcactgtaaaaagaggaaaacgaggtagcgagggaagagtgcgatagatgcgttgcttagggtaagaaaaggcagaaagagatgcaaaaagtgcaaaaaaaatcaattgaatctgacaggataatttcacaattcacccccagtgatggatggaggtcagctgacctgcagcccttgcagagtcgactaaaccagattagggatttagatacattcgttcgaagtagaattcttatactaatttcatgcatcagcaaatgggcgattcaggcaccacaaccaggtagaaagaaagaaggcgatgctgccgttgcgcccccaatgctgtggcagaggcggagacttcgatcggtgccggcatggggaaaacagcacaggcccgacagctctgaaaatgatttgaagggtaatgtctcgttgccagagaccacagcctggccgcttttcttgggaaacagctaaggaatgaccagcttccgagtttgtgtacaaccattagacgctgacctcaaccaacggaaccgcagggcagcataactggttggggttcgtgctcgctgctactctagttatattgccctagacgagtacccagaggatagcttcttgctctgataggggcctgtttcgggcgatgattagggatgtctaatgatccgaattgcaatacgggaccaataaacctctgtccatccagcgaggggttcctggcccctcactactgcaagggcagtggtaaatgtacaaagaaaaaaatgagtgaagggcaagaatagagattcccacaaaagcacagggctggcgtttgccgaatcccctctaacaggagcaacatacggcttttacccacctgcaaaactcgatgctggtcaactgcgctacccgacgctcttcctctagatagggcatttcggtttcctataacataagattgctaactggtgtgtccaagtatgagaccatatgccacacaccagactacctggctcatatttaagaattcagctatcaatgaatatcgcaaaggtccctgcttacagaccatttactcaggccaggctacggtataacatatcttgcaatcagattgatatacctttccactctcttcgtcgtcaattttcaggcatatgttgtttgcagtgtaggaattagtcctacttctgcagaggtgaatggccataaacggaggtgagcattccgccctgagacgagtacatggctcacagcggccggatatgctggggaattggcacactcagtatgctctacctaggctaagaaacatgggctctcgaataaaatttgaagataggcaatgcattgctagacgattctacacaactgcgatcataaggaaatccaaatatacgcactttgtgaatcctcatccagcaatagcggatgactagtgctagttaaaccaagaaagcatgcggaaagaagagctgaacgagctaacactacgagttacggaccggaaagagaaaagggatatagatagagccgggccaaaaaagcaacagaaaaagtcccaacactcgacttggatcatcctcatatcaagacattcaaaaccttcattagtaaactcttgagcggcttcgctggtgcaagcggcagacccatcaactcagcaacagcaatctgtgcactatgcacgctgtactcgatatccaatgtggaatctgcgggaatctcgacaaactgacccacgcagccaatgttcgtcgtccacctcggaatgacagggggacggtcattgcagctgcgggtaagaagaggagctgtgcccagcggcaggccgcatgggatggttctggcttcagcgaggatggtggtagcttcggtggaatcctcactgcaacagccaagatggaagagaacctcctttaaaatctcttgccccgtgcattgccacatttctcttttgacaaaattgccctcgacgccgggattcagtgcatatcccagcattatggtcacattttcggactgagtcgagaagacgggttgatgcggaacgctgatcgtcacaccccagttgcttccgcttagggagaggaaggcccctgttcctggcttctcctgagtaagcctctcgtagatgttggcaaaaccagggcctgtgaatgttgttgtgaaggtttcgacggtcgactctggaatacgaggcaaaaagttcatagggttgccgaatttggaggacttctgggccagtttctcccagagcttccagtcgccatccagcacctcttcccagttggaagtgagcccttcaggcggcgtggtatctgaccccatggcagcccctgaagtagttgaaccaagagttacaataaggatatcttgcggatcaagcgtgatgagttcctgatttccggcttctgtcataacctcaatttcagaaatcgtggtgggtccgccttcaggataggccttaagatctgatacttgctggtgaaagcgaaagtcaacaccttgttgcttgagaa

SEQ ID NO: 1898 - DNA, 2848 bp, Emericella nidulans
gacaaaggcaactttgttttgagcagagactcgctgaactgttagatcctgaggctttcccagttgttcgagccattccgtctcagtgccggccacaacatagcttcggaagtcaaagtgacttcttcgtgtcgccagaatgtgacacaacgagtcagtcaccgtactctcacttttatgtgacagggagtttctcatgaagtacgatgcataagagtctgcgacacggcgaatgccggcccggtcatgtgctgagagcacaaggaggcgtagcctttcgtttccatcagcatcctcggaccggatgtccgccagagactgacgaggatctgtaatatcgaggccaggcatgtggtgcatttgcaagaagctcttagcatcctcgagtatagcatgagcgttggcaccaccaaagccaaacgaattcacactggcgcggcggactctgtcctgcggccatgccatattctcttgcgggagtgcaatattccattccgtcaatcgaagctcgggattgaccgtcgtcagaccagtgacggcggggatagtccccgcttcaagacataggactaccttgataacccctgccagcccggcagcgccctctgtgtggccgacattaggcttaacactacctacataaagtggtccgacatcgctatctctgcgggcagaggctacggtctgcgcgattgctcgcatctcgattgggtcctgaagatgtgtgggttagactaaagttttcggaaaagggacaggggcatcatggacgtactccttgtggtgtccctgttccatgcgcctcaaaataagcggtctcggacaacggcaacccagccttctggtatgtctcgcgaatcaggaatgcatgagcatcttggcttggttttgtaatgctgggcgttctgccatcatggttggcggcagtgccgcggattacggctcgaatgcaatctctgtctctcatggcatctgccaaacgttttatcactacacaggcaatcccttcgcctcggccgtatccattcgccgatgcatcaaacgagcgactgatgccgtcggggccaatcatgcccattgctgagtactgcgccatgaagttagggtgcaagatgaggttcgtgccagtgatcaacgcctgcatatccatgttagatttaacgaatcctgcaaatcttgatggtgaaggaggagacctgagtgcattcgccagactttatggcctggcaggctagatgaagaccgtatagtccggatgaacaggcagtgtccagagttaagctggggccggtgagatcgaagaaccaagagatacggttcgaaatgatggctttgtttgtgccggttgcagcatgggcgcctagttggtagatatcatgctcggcgatctcttggtagtcggccgtcatgacgccgctgtacactgccgtcctgcttctcgctagcttttccattggaatgccagctaaatggtctcagcggtgccttggcatacatcagattctggtaaaaggggtgggccgaagtaccattttcaaagctttcatacgctacttccaaaacgagacgctgcattgggtccattacttccgcctcgcgcgcagtgatggagaagaaaggcgcgtcaaaatgggggacatcgtcgaggaagaagcctgaggtcgtgcaggtctgggataccgacattcagcattggctaatctgtattagaggtgctcttgcttactgcgcccagtcgttgccttgatggatggaaccaggcgtctgcatcccaactccgcttagggatgcgcgagtgaccagtgcgcccctgctggatcatctgccagaactcgtctgtggatgaggcgccggcaaagcggcaggccatgcctactattgcaataggctcgttgtcggtcatgttgcttggtgaaaaggtcgtgcggtcaggaaatgacggagatactagaaaaaacacaaaacatgcaacttatgtataagctcaacaccgagttattcgcagagtcattgatctagagtgtccacgtgcatttggatctccatccggggagcgaagtggagccatacattctgagatgtaacgttctgcaggctttatctatgttcgctgcccggtctcaatctataggagttctagctaatttacttgctccgctgccatctcatcgttgtccggaaggggactatcaacgcgttttccatgtcccagacaccttcctttatatatacgtcagacgacagcgtttgcttcagggattccatgtcttcttcgtttactaccatagctgaccccttgaacggacgttgaatcccctcactaacatgcttctcaaatagtgggcctgaaatttccctttatttagcatttcctgtgtggcaaggaacaatagcaatcatatacacttaccggcccatgaaacgtagccttgttgatgaagccgcacgaagttgggggaatgcctagggcgaatggccaggcggcgctcgagctgttgcagctctgttaaagcatgcctcggatgcacacagatggggaatagttaccacgttgggtaggtctggaataaccaccagaagttcctttgtactgttctttgggcgaacgaggggctctgttgtaggccgtgtagccagcccatgcatccactttttgccaataaaggggcgaagcatagagcaggccatgattgttttgttcatgatgccccattgaagttgcaatcgcctttagcgacattttataggtaacttcaaagtatcatatctggcccttatcacgggtccggcgttacgctgaccgaaggaccagtcggaatgtacaagctttgggcgacaatttccggcg

SEQ ID NO: 1899 - DNA, 3776 bp, Emericella nidulans
gcattgtgtttttactcccaacggattagtccggattttaagatcgcggtacatgcatttttcaaacacattaaggataaggggacccagcatattttatcaacggtttcgctcaagtcagacatataagttggcgggttcattggcgatcatgtctttatactggcgtcctatgatttgaagaagtctgattgatcggcaaaccgcaaatttcagatagtccgaagtgagagaattcaatgggcctttttttaggaaaagaggtcactgaaccccttgttcgaaatgtatgtgaggaaccaggcaacggctctacttgaagagacggagcagcgacgagacgtgctgtcggcgagctagtctttataaaggttttccactatgaagtgactggcatctggctggagctctttgtatcttcactttgggggtcctttccaatactggcctgcgatgtccagtcgtccggttgtccgtatgtatgggtagagtggctggctgtaaggtaaaaggtaagacaagtgtgaaagcaagcataaaaacctactgcctaggctgtggcctaacgcagcattcaggcgccttcaggcgtggtggcgattcagggactggcaatgatgctccatagtcaccattagagctcttcggactgaatccgtgtcgcgctctctccaagtgcaaacaagggaccttaacgtttcgttgcttgatttggattggccacgttgagttgagctagatggaatggatgtcggaaatagcacacgtatatatctgtgtgtatgatggatggtgtatgtacatgcgcagcggtattatatggatgtgtatatgaaatgaacttaggtacggtagatgaaatacatgtacagtttttgggaatgctcgaggtaagttgcaaggcaaacagaaaaaaagagggaaataggaaaaacggatagacccggctttggtaaccatgcctaacgccaatttccgaaagtacggggtaacaagcagagagaagacaagttgaagaactgtgatgagcaacaataggaaattgtgcaaaggagaatgaaagaacagtccggtttcagagcatgacatggataaagatcagggcgaggacggaaggtgaccacaagtactccaggcaatgcgttcgtaaggatgctattcagaggcaggaaatggggcgtgaagatttggaggagagaagtaggcgacacgctttccgacgaaccaagcgagagaaaatccaaactcgctaaataagataacaacacaacggtaggaacattgctttgcttcgcttctttcggatatgaataatgatgaattcagatcaagatcggtaggagagagtcgtgagatacgataaatgaaataggttgttgatgttagaaactaaaaagcccgctgcgcttcttcccaagcggataaaccaccaaagcagcaagaaacagtcccacagtaaacccaatagcaacctgtaccatcccgtatccaatgtcgaagacgacaccctggaaaggattctcttggtagctctgctggcggtgctcagcggtcatgtttttcgccgcgtcgacgaagctctgcgtgccgttactgggcaccgagaacggcgtctgctgcgtggtaatttggcctgccgatgcaattcccgctaccaatgacccactggctgcgaggccagatgggacaagcacaaagatggcagggagcatggctgctgctgctaggccgtgccgaagacgcgaatagaggtttgccatgaccccaacaacgaatgctcccagggcggaagagacctgcgtggaagagtagaagcgtttcgcgccaaagtagttggtaatgtatccggcaaaagcgataacgagcatcacggggatctgcttccatttggcctggttgactgtggcgaggcagaaagtgaagatgatgacaaagggaaagcgctggaggtactcgttcgtgatagggctggcagggcatgtatagtctgttgaggcgtggcggtctaaaaggccgtacacgcagtgccgattgtgatgccaaagccgagaaagagggaatagatgatggcgtacaccatgcgaacggagccggcgacgatgctgcgtgattgaagctctaggctggcgcagagaacgaggtagccggggagaatgagagcgatggaggattgggcgagggctgcaaagcagaagagatggccgcctttgtaggggatactgccaaatgcgcgagcgaggaaggaagtgagaacggcggcggatatttcaaacacgttggagtagaggtgggagcgaggggagaggacgagctgtagaattcctaggaggcacccaaggacgaaggcgatgggcatatcgatgggacgagcaccaaaggcaaaagggccaacagatgcgctggcgaggccgtggaagagaataagaagccagatggggtatttgttgtccttctgcaacagcttgcttagccgctgcatggcctcttccaccccgatcacgtcgtggatcacttccttataaacggtgtgtgcatcagagagcttgcccaagtcgacaccctggttcacgcgaacaagtttcacttctgtagtgtgggtagatgcatcatcaaaggagacaatcatacagccgggcagatataagaagttggcattgatctccagcacgcgggccgtcatcttcatgtactcctcaagtctatgggtaggggcaccaaacttcatcagggccttgcatagtatgagcagatacctctggcgcgcaagcagctcggcaatgtgaacagtgatgcggatttcatcttcgagctggggcttccccatgcgcttggacatcccggggatagccccgctactgcgggagcgtctgagcattgaaaatggcgagctgatggaattcttggctgtcgaacccgacaaggaggtgttggactgattggccgacttctcataccacttcctgggcttctgaggagcacgccacgaagggtccggggagaggccgcgggcactcaggtcaccagagctgctctggcgggagtggccatagcggccccggggtagattcagggtcggctgctcgtaaagcttcaggagcgaggacagaatgccgccgcggtagtgagtcggacgctggacgtaggcgtcaggatccctttcctcgataggggtgaccgggccagagcgcaggccgctgggagaattagcactgatgcggttcagaaggtgaaagtctcggcgagtcatctgttcaacaagctggtgagcttcagagttgcggttgtgagggcgtccatctactaggccgtagtagtcatcgtcctcgtccgaagggtagtcgagctgtttttcagggagccggatcatcggaatgtcatcagcatcctcaaatggctgtgacgcttctgtaggagacgaagcaacagatgacggcagactcggccacgggctctgactgggagacttcgagggacgtcccaaatgggatgccaacttctgggctcgctcctgcgctgagtaggccgagtggatagccctgcccttctcattgctgacttcatcggtagcaacgatccctgaggagctatccctggagtaaacagcggtaccggcagaaaggtcgagctaggtccccattaggaaaggggtggggatcagatgcggttcgctcatacgccggaatgctggcagtaggcagcggtctctgcggcagaggcgaaccccttcgctgtgacgtggggggcagggcgcctcgccgacggtgaacttgacccgg

SEQ ID NO: 1900 - DNA, 3562 bp, Emericella nidulans
tcttcagggatgcggatatccaagcccgtttgactcggcccgatatccacgttctcgagtgcatcatggagcaatacagcagcgtgaaatctttctcggcgaagttgaaggagagtattccgcgcgtcgatatcctcatccttaacgcggggatccacagcttcgtctatgagaagacctcggacggccatgagaaagccttgcaagtaaactatctatccaatgttctcctcctcgccgagctactgccattccttgaatccacagccgagcaaaccggctcggccgtgcgcataacctggctcggcagccgcacatactatctcagcaacagcctcgagaagtccgatatcctcacatacggcggcgggatcctgcaatacatggattcagagaaggcgtctgccagcgctgggatgaaccagtactctgatcgaaaacttctctgcgcgctgtttgtctatgagcttgcgtcccgactgaacagggacaaggttactctcaacctggtttgccctggcatggttaagacggacctaggcagtaatgggccattgtggattcggacgctgattgaaattgtcaagatactccgggctaggccggtcgaagttggcggatggcttgtgctcaatgcggcggttgttgccgggaaggagagccatgggagcttgattggggataaggaagttaccgagtaagttctttccatcgttccctagacataggcaggtagtgagatggcaggtgacttaacgttataacacaggcctaccaagtttatcaagtcgagcgctgggcaggagctgcagaagcggctctggaaggagacagttgaggagatggccacgctgacggaactgctttcagcttttgtctaatatctaccaagctatcacctaaatattgtcatctcatcccggtagtctccctaattgcatgtacttcccgcccactccaatcaaacatctcatttaggaattccgtatccaattcaaagcaaccgttgccgtcctctctggtcgtgcgtctaccattctcgctttgcactctcacacctccaggcttattttgtgactgtcgttgttcaaggccctcatactcaaccttcagctggttctgtccgttcatcatctgtatgccatgcctttgccgctgcaactcccagtgcgcaaagacatctctcaaacagttcctactcaatccagaatatgcaccggtagagccaggccaatggcacaagtatgataccaacagagaagcacaccgaatcggttccacacagcgcacgaagaaccagaggtgtggcgcaaatgcggaagacgatacgatagataagtagattcggaggtatcggatgcagaggcgaattatactagtactttctcagacacttctagcaaaaaaaggaaaagaaaagaaaagaaaagggggagcggaggggcagaattcacgtaccgattccacaactggtcttgaccttgatcgatgccgatattcggatctgaggaaggtgttggccgtaacggggatcgtaagaaaggactgtggatctggattgccatgtgcaggtgaatcaacgtcgccaacctctgagcccaggaatctacctcgctgttcgtggtagtccctgcggcggactccatcgcgtctctcgttatccttgcatctgaaacaaaccctcgatatatctcctctgaaatcaaccctgtacttgcgcttgcgttatgaacagtgtcgataagccgatgttgaatacgagcaatttcactgcgagcctgaaagagtatagcagtatccccggccagagtatcaggccctgccccagatattggcgtcggcaaagaaccaaatctgcttccggctgttgccgttactgccagtggtaacccggtcaggaggctatgctgaacatccaaccacacgatatgcgcccatattctacgctcgagtctcgcttccaaggctgaaccgaagtctatatctctatccggtgtaacatgctcctgccgatgtagcccaatactctgagcaaggcggactgtcgaactcacccacagcccatactctagtgatccgaggtccttgctcatgaacgggtcgataatcagcgaggctgcgacagtgttcactgtcggacggcgaagatggtcgcaggaagtaaggatagccgaaaccgctgattctagattcctggttgtgactgattcttgggaggtatgtgctgaagcggcagctcctgcatacagtaccgcaaagagcacgcagttcatagtcacgtcttccagcagggtgttggggataatagtcgatcgtctatccccggcctcatggcaccattgccagaacacggcataccaggattggaaatctgggaggtcaatgagcgggtacagggggtagacggaggtaatgaaagtctgcacaaagccgtcgcatgcgtgcctgtcaggaatcctctcgaagacggatgcgatggtcaggaagttgatatgaggtggaagagggtctacagttgctttcttgcgaaatggcatctaggagtgttagggctgttagggctgttgcttcgacatggctggctgatacagtggcactcgacataccaagccaaggagcgagtcgttgaccggcctgactctagagggcaatctagaaacaacgtctaaccgagagacattagagcggtctgtatggatttgatcgtgtctactctgattatcagaaactttgctggtactttgatattcgcacactttattcatccgtctgcagttggcgcattccggccgttctcttccacatcgaactttacgagtgcgacatgtcagacagctgaaagcagggcgtggttttttgacaggtgccatactcagggtcaggtagtgatgctagaagcgcataaagcagattattcggtctgtcaatggtattccgggaggaattcgtggtttgtggccgagaaacagtgtcgcttacaaattatgccctgtttaaatatccaatttgctgggctgatatgtcacggaatgtcttctgtttgccagtgacctggattatacctggttgtgcctttgcaccaggtcaacgcgtgaagccctacaaaaaggtatctacaacaacgatgggtacttagaccgatacatagccaatctcttctctagtgggctttctgataaatccctgggctgacctgatttccctccttttctaacgcagcatccacggcacaactcgaagcaagaggttaagaagacctatgtatgtctgcggtaagcaggttatttcatagaataagagcgaaacacgggcggaaaggtatgggtatgatgcgatctttgagaggcatttccctaacatggttgggagaaggtgagacgtaggagagacagtcaactctatatcatagtacacttccaatcaacagaacagtatagttttactctagcggcggcgtatctgcgcacatagtggccattacgctgtttccaatcagccactcacatccttttgttcaaaaataaaaaagagacactcacgcagcaggataccttgtccctga

SEQ ID NO: 1901 - DNA, 3311 bp, Emericella nidulans
ctcccaggccaagcacatgccccagaatcgagattgccgcagtgctctgggtgtatgatagccgtcggccaaaccagtcgtctgggttgttgaacttctccatgaagaagtagcgcataacagggtggaatttttcgattacctggcggtatgtccggactcgttgctcaaaggaccgtgtctgtacatcggcaatatgtttgcggcaggcgctgggcttcatgtctcgggggtagtatctttgatgcgcaggcatcaagaagtcattgagcggtatggtattcggaacaaattcaataatgcccgcattagaggtcagaggaagaaccttgtaggctctgataccgagattgcgctgccgagtcgcttgatggtctttgaggagactgctaacttgctcaaatacttgctccataatggcgtcctgccgcaggtcatcattgcctcctttgaactatgatactgttagccacggccgaacaacgcgaatatgaatcttacgagctgcttatagcgaacaccattgcttgcaatagctgtaacaattttcggtgcgctcacgccagacgctaccgtgaaatcagggaggtacttagcaagcttgggcacatcactatagtcgcagtcaacgcgaatatcaattttcatagtcggtggtggtagccgctggttgacagcatcctgttcaaggcgtatgccaggtgccaatttattcagccgaatctttgcaccactctttgccttgtcgtctaaccgctcgacagcgaatcgaacgtaatttatattggtattgtggaccgccacccacaaaggcccgatatgcctatcgtttctcataatatcagccaattttgcggcggctcgattgcgtgatagagccgactggtcccttccacccttggatttgctgctcgcaaagatctggtacatcccatggaacgggtgatcagagcatatgcgataaatcagttcggataatagagcttggaaatcgtctgacacgtcgaggagccgcgaagtcagctggttcataagaggggcgaacttgcgactcgggacgcctgctatgtatttcgagactgcactgttggcaatgtcactgtgagattgcgcaagccagagggggcagaagcgcaggacgtcgttgttgtatcgttcgctttctctaaggcagataagatagttctcaagacattgctgcaggaatgcctcgcgcttcgcttgagacgctgatactcacgatcatcgaggtcgaaccactgtttcgtctttgttctgtgaaatttgagattgtctcgctctttcccttctgctgttttgagcatcgcatcaagagcaactacttccttttccttacgattacgaagctgctcaatccgcgcaaagtcttccagcccatccggattttgtaactgctgatcacagaagatggcaaatccatgatagactcgcccagcgtcttctccctctgagcgacccttcaattctttgactgcaggtgtcaaatagttctggatgatcgcctccggtttttctaaacgagcttcggcgatatgatggccctgactctgttagccgctttaacttcagtgaagatctgaatttgcccaccagggtgacaagaagctcggcacgactaataggaattgcttgcttgtgaaggtcatttctgtcttttagctgctggagaatttgaatcgagggcgccatttcaccctgatcccatagcacattggccaggtcgaacttcgctacgccttcaatattgagccctagcgatacactatggtttgctagttttgacaaataaacagcagatcttagcgaagcctgggcgatgccgtgatttctggcaatgtgtagggactggcggattactttcacttcaagaagctgtgcatcaatgtcacttaagttgaaggcagacctgagataatctttctgctttatggaagagaacagggtctcatgagagctcagaatctctccaacctcctggacactacatgccgttagtataacctattattagcaggaagcgcacatactcagtattttttaaccaggaagtccttgctgagatttcctcccacttctgatcgatttccgccgcagatcctgaaccaagaacttcttctatttcggtcaagatgccgagcgtcctcatagcggtccgcaatgacgtcgctgatcgacgatcactattgataagattcaagttgcttctataactctcgccgatagatgcacgcatgtcaactaacggccctggagtattcaaggcctggaaagccctgaatatcgtggccggaggagatgtgttcaacggagagataggtatttcccattgtcgcagatttgtagcggccttaagcatactacccagtgggacagcagtgtcactagaatttccaagcgcaccgatcatagagttagcaatgccctgaagattggtggagttcagtgccttgaggacaccataggcgttttcagatcctgtcatctgaatttcgctgtcatactgtgcgctctggaaaaggagattcttgaagccagaactctcgtgctcgagagtttctattacggaatccagagaggaagtctgctggactccatagaaaaagtcggggtcgtcaatgttcttgaaaatgtcatgcagcaggcctgctgggagatcgtatttagcaacagatgaccgacgagagctggccgtacagcgagaaacatgagtttccaaaaacatgagcgccgtcttcggcaggcggcatctactagcggctgaggaagctaccgcgtagttgatatccaaccagtcatctcggtccactattgtttcctcacccggcttgggttggttgcgaaggtagaggacgcatttgatgataagccgagcgtgagggatagagttttctgcaccagcccgtaaggtttcattgaagatttgcgatatgctgtcccttacctcagccaccttacctcgaatctccgccagcagagcatcatgtaggatgtagggcagtagttggactgccaaatcaggaataaggtataatatattgctcagtgacccaataaccgggtcctcggcggccgcttttgagagaaatagtcccacgtttcgtgcccagtaagagggcgaaaggctaagatcccatccatgtacattttctagttctttggcttccagagcgttcagagatatccccggacactgatacgggctccaggtgagagccttcatgacagaaggggaaatagcactcacgcaaggttcaaaatcagggaagttggccaggttactgatgatagct

SEQ ID NO: 1902 - DNA, 3358 bp, Emericella nidulans
ctgcggagaaagtccttagcgaactgaaagcaatgaccgagcattcttctgtttttttgacccgcgttaacaaacgtgatgcgcctgattactataacggcgagttcgccttctcccttccttgtagctcatattaactctgttttagtcatcaaacacccaatggatcttggaacaatgaccaaaaagctaaaggccctccaatacaaatccaaacaggagtttgtggacgacctcaatctcatctggtcgaactgctttaaatacaacacaaacccagagcacttcctccgaaaacatgccatgtacatgaagaaggaaaccgagaaattggtaccgctcattcctgatatcgttattcgagatcgtgccgaggtggaggcggaagaacgacggcttcagcttgctgatgacggcggagaagaaagtgacgatgagcctatcatgtcctcaagaggccgaaaagccccggggaaatcgtccaagaagggtgctgccccagcttcgaaaaccccgagtggttctgaacctccagctggctccggctcacaaccgtcggcgcctgtacgctccgactctgatgctgccgtggaaggagtacagaatggatttgcaacaccccctcccggcacgtctaccccatccgaccccgctggtgcgggtcttgccacatctggaggacaagatgatagcatggaccttgatggtttggtaacgccccccaccgcactaagcgcgttggccacgcctggtgtagaacttgccgaccctgaatataaagtgtggaagcaagtcacgaagaaagacagagcacttattgctgcagaaagacatcgtctcttcaaaggcgataagctgaattctgacgaaccggctcttcttcgcacgaaggcgggtatgagaaggtggctcaggaaccagcaccagatctcaaccgatggcgatagttcgaatgaccttgggccaaaaccgaatgccgccagcgagacgctagctgaaggtatagaagttgaagaggacagagtaattcatgactattacgatgttatgtctggtataccagatcttccccctcatctgttgtggagagaagacagcgagggaaatctagtagacaactcagaagactttttacgggtccttcccaaaggactcttcacccagccggacagcaagctttctcgaaagatggatgcaaatatgaggcaaatgcaggaaaccaggaaaatttgctcaaagattggtatcgtcaaacaaatgcaactgcagtctcaggtaggaacatggtattcctacatagcatcatgctaacttctcccccagatgtaccagaaccagttccagaagtatcagccagagccctttgttgaacaggatgtcgaggcccatgttatgaacgacaatggtcctgtgatcgccccatgggtatgcaaggccgctctgcagcgttcggtagcaaagatattctaccacaccggctttgaagaatatcagccatcggctatcgatgctgcgaccgatatggcttcggacttcttcgtcaagattggacagacattgaaatcgtacatggaagcgccgaaagttcctgtggcagattcagtggaagcaactagctcaccgcagtggaaacgggcgtacaccgagccagagatgatgcttcatactctgtcctccgtcggcatcgacattgagggactagagtcttatatcaaagacgacgttgaacgtctcggaacgaaactcgtgactgcacatgatcgcttacgctcgcttctttctgagctccttcgccccgtcctgcaagatggtggtgaagatggctctatggccttcgctgacggtagtgaacaatttgtcggtggtgattttgccgaagatatcgacgaagacttttttggcttcaaagagctgggcttggacaaagaatttgggctagccacgcttagcgtgccattgcatcttttgcaaaacaggatgtacaacgcggcccaggcgcaaaacacaaagtaagttatccagaccgctgcctattcttcaatactaaccaagactccgacagtacctcccaatccgttacagtctttcccccgcctcctccgtatccacgcatcactaccgaaaatgtatcatcgcagatcggcttggtgcaagccttttttaatgccaaattacaagcgcgcaacaacgaaccactggtcgaggacctcgaattacctcctaagcaaaggccatcggctggtcgacctcgtcttcctgcttctgggaaaatcccgccgccttctagtcttcctggaccaacttcgagtccacagaagcggccactgccgccttcagttcctggattcaacgcaaacaaaccaggaagctctgaacctaataagaagaaggtcaagaagaacagtggcgtggcgatgggggttgctgacgctcccggtgaagacgaagcagcaacaggaaccaatggggcgaaggctccaaacctaaaatctgagggctcctctaacgacctcattaacggcaatgccggagctgaaacattagacgctcctggtgctgaggattctaccaacgccgaccaggttaagggtaatgacaatgcagtgcccatcaccaacggaactgcaggcgacgcggcatgacgtatgaccatggtataggtatagaactcttcgttaatgatctcttcgactgggtctgttggacgggtatgctgcttgtttcatggaatgcagcacttgttggttgtttgtctagagcaaatcggcgtcggttgttcggcttatcctttcactttttcttctgtcattttcttccttaaattcacccatccgcctaccttcttcaattctcattccccatgtgttacttggaccccttctattcttcgtcttgttatatcttctccacctaattgtgtttactttactggatgcccacctgcggtgctccaacagggcccttccagcttgttgttctacctgcctacccatctacctatacctataacatacaccggaatcacatctggtctatatcctatccctcttcatcctccacttgatattccagcatttggttaggcagcttttccttccggtggatcttgtcagcattgaacgcgagttgcaaagctctaaggtggccttatggaagtcgaaactaatataccccaccctggagaaaactgcatgtactgggtctacagaacggttcaaacacctcatcatgcttacggtttttttccgcgccgctaaaaggtcttctttctgcttccttgtcttgctgcattatggctattatcttttagtttgcctgactttacctaggacggctggctccgatcatatgttgtatc

SEQ ID NO: 1903 - DNA, 3883 bp, Emericella nidulans
agcaagccggtatgttgattgttaattccacgcgcttggctaatgtgcgccggatgtagatttcacgcatggcagtcaagcttgttgttcactgtcatgttcgtaagctgtgtctggccattttcctgaggtctcatgctcatgcggtgcagataatccaccttatattctcatggtccagtttcttttcatggctactatttatttgcgaccttgcattgatcggcttcctcagcctgaaagcctatcgcgacggtaagagccaatcatcagatctccgtatagaagctcacagtcgcagttgatacactcgagcactttgaggttcctgttattggccggctcgcgaactcgtttgtcgacaacgagtaaatgagttttgtcattttcgcaaaattctagcctatactaagcgacttcttcacacctcgacttcctctatgatgttcattgtatattgtttgagttgagcattttctttgcatactgaactaccgagttactagtgcatgaatcttcagtgtcttcagccttttgaacttttattagcgtgtcctagtggttggatgcattgtacatactgagatattgttctaatttgcaaataatatcaaatatttccagtatactatactggttcttatatgcatacccttgttcaacacaaatgcttcattgcacagttctttcctttttccaaggataaagctgcaatgtcgcctcctaaacagtgcaagcacggcaacacaatgacatttaccgctagatcaacgcatattaccatcttcatgctcatcttcttccttctgccttatatgctttgcagccgctcttgcacgcagtcattaaagaagcgtccagcttccaaatctttctctctagacctgccctaccccatccaagacagactcggtcctctcgcccaaagaacagtctcacatttactctgcaccttcctgtctagccaacacccatccaccttggagagaaagccaaacccgggaggccaagatgtgccaggtccaacgcgttacgaacagctgtgggcacataaacgaccacgtcctcatgtcctgctacctcgcaaaggacgtcacgccgtcccccccgccttcacatctctcctttaccatcactaacttccaagagtcgtacaattccgcttcagctaccttcgcaatatatacgagtcagagggagcgccaactccagagtgaggacaaagaccaaggcaaagacgaaagcagctcgatctggtctgggaaatccaggacctcaggcagtttgagtcaaggacctaactcgaacaagaataaaaaggacgaggaggatatgattcagcgctttgggttcgaagcaaggaatcagccatattgcaagctcacggtccctaaagtcttgaactctccggaaggattcaaatgtatggtttatgcgtgcggaagggccgattaataggtttatagcccggggtgtcaattttcgacgtttctgaaacttctacctcaaaacaaagtcatgcttcgaatgaggaatcaagacggaagggatacgtaaactgatggtattggcagtggttgtttctgtcattttgaagaaagggaaactcgatgtacggagtatagcgggtggaaatagactgacaggctgacagagaccatctcaagataaccgtacggggggttctagggcttgacgactccgatgttctccgactctttcgtcggagttgaaacgggctttcagttggtcgagcttacatatcctttcccctttaatcacttcaccttgcatattagtatattacaggcacaatggtatagtaaggagaaaaagtcaataagtgccattctgaaggacaaaatcctaaaatcaaatcccgattataaatcaaacccttaacatcaaaaaatcccaagcaaatccagagcccaaaccatcagcataatcgctgtagaaagaaggagaaaaggcaggaaagattattatcgaaaacgacagagtatgcgcaggtcatagtgagcaagagcgaacgtaagtaaaaggattgaaacgtgacgaaaacgggaaaacaatacatcaaggtattcacttcgtgagcacatcatagaagcaataaggagtgaggaacaagatatctcatcatagatagccatgaacatcagtaaatggccggtagtgattgagggcaggtagggttagattgagatctaaatgatctggagataattgcttggcaccaaccccgtccttaggcgggtggtagtgacttcagcttcccaccaaccgtcatcctgaagccggataacggaaaggacatcacctttctggaatccaagttcttcaggaatggcagcggtgtagctgtacagtgcgcgggctatcaggacagtaaaggttagtatgaaggtgtgcatgacatggatgattggccggtacatctggtacataccaaagtgcaaaatggggcggccatcacggctaaactgtcttcctggatccgcgaccgccatcgatcgactcctggatcgactgcgctgactaccaccatcatagtacgacattggtcttctagattccctctgcggggatgcgtatccgtcgccgctactgccgtacatatccggctgtgaaagctgcagctccattccaccggcgctcgaaggtcgagcttgttgccggaactgaggctggggtgatacagcccttggcatagagttctgagagggccgcttggcgaagtcattgggtgagaccgcgcgtggaatggacgtttgctgtcggtattgcggctgtggggatacagctcgaggggcagaagcttgctgtcggtattgcggctgtggggatacagctcgaggggcagaagcttgctgtcggtattgcggctgtggggatacagctcgaggggcagaagcttgctgtctgtattgcggctgtggggatacagctcgagggacggaggcttgctgcttgaattgtggctgcggggatgcggctcgagaagctgagctctgagaagatcgcttggcaaactccttcggtgagggtgccctgggagctgtggttgtagttggcgatggagcagcgcttgcagaacttcgctttgcaaagtcatgaggcgaatatggagagtcgcttgggcgttgtgggggagtagagacacttggggattgactgtgacgactcttcacgctgctcgattggtattggcttgtattggggcttgcagcgcgactgtattgactcattcgtgactctcctcgagtggccggttgctgttgcggttgcggttgagggcttacgcttcgcctaggagcagcgggtgatggcgctcgagtggcttcctgagactgcctggggctgcgactagacaccgagaccgggttcgctttgccccggagcatattatgggtcttacctgtatattgctgggtggttttttgcatttgctttgaggtgaaggccggctggggagcatcgagacgcttcactgaggcatcgttatatgccgggggtggtgtggccacggagtttgcagtgaagttcgatgcaggtgcagaaggaactggcgtagcaataccatgatacctatcagcagagacacgggttgccgactgctttccagccacttttagatccgctaatgcgcgcgcgatggggtcggtgtcctctccatcatttgccggctccgcaccatttggcgcaggtctacgatcatctggagaggcaacatcaaacacgttgtttccaacatgtaaattgaaagttagccctaggatcaaccggttcagcgatagcagatctagcaatatcatctgccgccttcgtaagcagcttctgaagaaggtgaggcttttgaggagttggagctttgatagga

SEQ ID NO: 1904 - DNA, 3070 bp, Emericella nidulans
aaagaaagaaaacttcaaggctctcaccaccgggggacgccccagaaattgcagggctaagtcgccccctgcccttcttgaaggcccctttggggatgccaaagccaaaccgctcgtccaaaaccgggtttcggtcaaaaacaattaatgcccagctcctcaagaatgacacaaacggtaaccaccgtatctggatgtactagagcgggtgaagtcatcccatcgcagtagagatgaccgagtacatggtgagtctgaagggtgagtaccttgagattcctcagaaggggtacgttgagggcccgtggatgttgaagagacacggcatctattattttatgtatagtgttggcgggtaagtctggtctgttcgcggattcggatgctcatggttcacgggtctgtccagctggggagataattcatacggggttagttatgtcactggtccctcgccaactggtcctttctccagcacgccgacccaaattctccgtggaaacgatcaggttggcaccggcactgggcacaatagtgtgttcacacctgatggcgaggagtactatatcgtctatcatcggcggtatgtaaatgatactgctcgtgaccatcgggtggtctgcattgatcgcatggaatttgactccgaagggaacatccttccggtgaacataaccattgaaggagttgagggaagaccattgtcgtgattaggcatcttcgtaaacacttgttatatttaggggacgcatatcctgaatctatataattgacctagcgttgcgtacgcatatgctcctaacacaacgccaaactccggggtatctgcgaaatcaacaaaaggatactgatgggcaaaaaagggaaagcgaaccgagacaggcagagcgtccatcaaaacatggagctacgtttcttcgacagcttcccatcctcagagactcgtcgcagcccgaaaaaactactccgcttgttctgcagatgcggcttggccgcggtttgtggtcctgctactgggggtgttagcaaggacattgtagacatttgaccgggcaattgcaggtacggtcgggagcctgagtgcggcattgacggcccagcatgattgtactgaggacgtgggggtttccttggaggcagagctgaagtctgcgcacgagcttttctttcctcttcaccatagagcttctgcaaccggcgcgtttctttgtcaacctcggcctgccgtctccgatgggctttttcctcctcctcaagcagtctctttgttcgtcgctcttcttccttcctcgcctgctcctgttgctttgtaagctgaggactgtggacaggtgggggttgaggtgctggtggaatatcggtcaccaagccgcttgggctggcgggcagcctattcgtagatggagtggttgtaggagagttggatgttggtgagacggaagcggagttttgcctagagatgcggaaggcctcttttgggctggcaaaatacacgtcgcggatggtaatggctccgagcaggagtacaacttctagacctttaaagtcctccatctcgacacggtacaggtttggttcgtacaaagtcagctcacgcaatcctttgaatatggagacagtgatatctggctctttgcttttggtctttgtttcgggtatcgcagtcgttttcccacgaagaaggcaagtaaggtcctttgacagcttgccatccttcttccaactaaagcgtagcttgggcgtcgtgtccgcggcggcaggatcgatttggacgcggtcgagagtagagccggtgggtacccggaaactgtgctgcggcatctcgaaggaccatgaaggcgggctattccagctcttcggcttgtagtgcacaatgacctgttggtcagggttgtagagctgaatcgtgaagcgcgtagggagaataggttctggcggaggggagacaccattgttctggcggatagcttccgccgatagtgttggctgagtccattcgggtattattaacacttcgccgtatacaacgtctggcacgtaggggtcgtagagggctacggcgaagcggttcctggaatcgggagaggatcggtccgggtagcggagagagtacgctggttcgggctcgttgccaaactggagaaggtagatggtcgatacattggagtccttaaccggtttgaggtagaatgctgtgttggttagttctccgcatggaattgcggacgactgaggacgcactgggaagattctcgtcaagcatttcaagccgacgcgggaagttatccagtagatgttttgaatgcaggaaagctggtggtttgcatagatgtaagccaagatacaattgaattgatgggagaaaaagtgctttataaggaaatgaaacactgccgtctaagctccagcgactgggaaagtagatgacgaagcatgatcagacacagcgggaaggctgattggctccctgcatcaagaacccgtctaagcccccctccgcacaccaaaaatatcgccccggcatacacaggcagagatattcttgcccttcagccaaagaaagaccctttatcgatcatcataattaaaagaccgcgtcgagccctcttccatccgaaactctggtgccttagctcagccccagcaaatcggacatctcggattctgcctcgtatcaccataccccaagccttcgttcttcgcgctaagccatgatcatccacagctagtgtacgaactgaccaatgtcggccgtgcgagcctcttcaatctccattgcaaagcatcgtcaatattcattctgtcaaaggaatcgcatcctcgcaaagctacaccattacccttggtgcctacgcgctttgtttacccagtcacttttgattatatggcttcattataatactagctgcttcagggctcaagcgaaagccgccggggcgctaaatgtttggttctttctgtatttgccatcagcgcccctgtcgtctgacgatcaagcaaaaacgttacgacatcctcaactattgagccttggttgagtactcaggcgatctctctcctactttgctcc

SEQ ID NO: 1905 - DNA, 3358 bp, Emericella nidulans
gctctccgttggatccagtatatgcccttgaaacgttaccaagcaactgtactgcgtcatataccatctcatcttcgatatcgaggatctgttgttaatcttgagcacgcatggaggtgaataacaagcacatttccgtaaataatctggcatgtggtcgacatatttaatggacgtgatttttcccatacttagagaacccaatcttgccgagattccttggtccccttaacgagcgaatagtattgcagtcaaatctctctaaagttatcgataagaccggcgtctgttcctgagcgcgcgttaatcgagctgtttctacgctgctacgatcgaacttgttgtccatgattgaaaaaaataggtaagaaggcgggttagtgaagcagagaatggggcgaaataacatctcagaagcccagatctggctagaacaggtacatattatcttagtctcgtacctgtgtccaaaggaagaaggttaagcgacatcgtttccccagctggacgttgtaggtgcttgccagtaggtacggtgcattctccgcggttagacccaaggtagagtccaatattattcactctctaaatctcatcgtatgattgtacttcacatgggccgcggaatagccttgattactgagcagtccggaactgcacgagagagtggagagccggcggctttcactccgaagcgttatttgttactaggccctatttgggcaggcaataagaacatgcagtcccccagcctccaagcatagcccccgacgatcatgccctatatcaagtcaagtgaacctgtagaactcggtgttctcacgtatatccgtgactattcccccgctgcaaaagtacactaatagcctaccctggctgtaactcacgcttccggcattactttcccgctacaaggtcttctccaacctctaaatgttgaacacatttatgtttgccactcgaccgcgaggaggatactgctggctctgaagcataccctgggaaaggggtataatacactgcttatacatgaccatattatcaccgaagtggggtgcattcgcttatggcagcctataatattaacgtctcacttgcaattatggagacgattgaggggcagtggatgacttaactggtgggtgttagatataaggtgctgatggacgtaggtcgccgctggtggtgcagactgtggaggtggaactggcctagttagcgtgcgataaagactgatgttgagaatatgctttcaaaaaggccacttatggaaatggtttatttaggctatgatcataagctcatggcagcgtgtgtccgtagtgcgagctcgaatcagggttagtgtatttgagcttgatgagagagatttagtatattctcaatctcgttttattgtcactggctcctgttttcaacctgttaaggaattgaccagaaatactcacggagcagattgtggctctgcaagagcaagcaaatgggctcttcagtacatctctccagcccagttaccaaggactaaatatagccgttgcatactacacccagtattactccatgggaggttcagctaaaagagcaacccctgaattagcataatccgctccacgagatagctgagatgattgtccaggtggagttgaaaagcatgggtataggtgcagcgccgcactccagttgtcaggctatgacagtcacagataactatccacgagctcgtttatggcaccgtgggcaaagggaaggtgggggggtatagcacggtgggggccctttcaagagtacatggccctcagacacgtaaagatattttcgttctccatgcttatctcgttctcatgcttatcctttggccactggtaaaagcatcggcagcgatttgagattatgccaataagccagtatgtactaaacacttccaattcaagatacgcttcaaatttcatagtctgaaattcggcttgggaacgccctgaggatttttcgtcgcttcctgggcgaactcctggttcagtcatcaatgcttcaacgtcatagccattactatttatgtgaaatggatcgactgcagatattgtgcacaccggccattttcatgtcgcggttgtcgccctaattgttatcatcatatgcacaatccagcagccagagtccctggcttttacctctagtcagccaacaaagctcctccaacaaggaatagagagccgatgtctaaaatcagggtattgaattgccgatcgagattcaatacgccgaacaattggtcattctctaatcgcctccgactacgcccatagtgataacttcgcccgccgtcaatcacgtagacatccactcagtggatcaagggtgtcagaattcaaggagaatatgcaaaaggatgcctagactctgtaatgtctcggagatgggcatgagtagggcttgataaattaacaggagggctagaaaaatccgcattattacattacgccgggatggtcttgtccagcccgcgcaatcgactatgcaaaatagtaaccaatccagaaggtaatgcgttgttggtatgcatcctgtctatcaatgacgttggcggccactggaagctgctaccagagcgccacttatgcgcgaacgttagagatgcacctcaatcaccgttacctgcagtatcgtgcatttcccctcaatctccaaccaaccaaagcggttcctcaaccttatacacccagcctgtgaggggtcttgccgcttgtttcggattgacttcctgatagagtcagctgcagcttggtaggacatgcctgacgagatagcagtatgtttattctgtcaatggcactgtatatcggttaacgccacgctcatggattgggcacctgcaaaatagctggtctgcgatctacttagtgcatttgccatagatgcagctagcaagtaacggcaattgcattgattgacagatgccctaaaagctggttgcttaccgagtggttcactgcgatgctctccttcctttacacaccgagctcaactcaagaatggactttctaatggaatacggcagtcctgctggttttttcaccattttcgctacattatggctcgtatattgtctgttgcgcatgctgtataatgtctcgccgttacacccactgagccatatcccggggccaaatctcgcagccgcaaccttcctgtacgaatcatggtttgacctggttttgggcggcaaatacacgcacaagatcgagagaatgcacgagcaatatggtaatcctccaccccagttgtcgccagaaaggaaacagcgctggaatgccctcgtcgtggcaggtacggtggtgcgcgtctctcccaaataacgccc

SEQ ID NO: 1906 - DNA, 950 bp, Emericella nidulans
tgttttggtatacatgaccctctgacagaatgccagagaggaggagagatgtcctcgccccattcattccccctttcccgctggagagagcacctaagcctgaacctatgaggcactgttttcataagcctgatcttccaaatggtcctgtttttgtgagcggaccaaaagaaagccttgaaagaaatggcaacggtctaagactgccacctcggtcacaggtgcacttacaaaacaggaatgtgaatccacaggaccacgtgcttccttccatcgagaatcctcttccggtggagatcaaacgcccaaacagtggccatatagagcaccttactaagaggatgtctggagctttcacctttcgctcagtaacaccacaccgccaggtgcaccatgatcttccaagtcgtacttttcaggaacctgttggtcaagaccacatatccaaaagacggcgtttggcataccacgagccaactttagtggaaaaacccttgtctcctaacggacctcctttgagcactcacccaggaactcggtatgcccggccttttgtccagagtggtccccatgtccgtaggccatttgtttccccaactgaggcgcgtcgtatcgcacaacacgagccaagcattggccgtgactcttttagcactaccgctcgctttgatcgcgagcaacacacactcgcacatccaggatcgatcaaagcttacgatggccagcaatcttcctacaatcatcttgttaacacccaggccgcgtatgatagatctccagttcaggctcgtaccgcgtctgacacgagatataccgcagccggcagtaacggctatgataggaatttgcagccctatttgtcagacttaccagagcaccgtgtatctcacaacattaaggtacatgatgacgctgaaatgagacactagcgacgacgggtacttggttag

SEQ ID NO: 1907 - DNA, 3318 bp, Emericella nidulans
  unsure (1)..(3318): unsure at all n locations
gtgcttctatgccgataccctgcatgtgcataagatacaatgcttagagaactcatgggttatttcttcgctgcccacttaatgactgaataatacaagaccgttagacatgtgattggttttgaccgaattgacataccttaaccaatgttccagactcaggatatagtaaacggcccatatactgcctgcatatactgcgcagctaaggttgagcctttttcctggacctaagctaggcacaacggctatgggctcgaacaagacaacgggttgactaacaagagcatatttcaagagaagttaacattgaaataaacataacaagtcaggccatgcagggcatccaagctaagagctactaagaaagatcaagcaccacccgcccctgcaacttcccctcctccatctctttgaaaatttcagtcaaggcctccatcttctcctcccggaagtgcgccttaatgacacccctcgccgcaaactccatagtctcaatcgcctcgttcctatttccgacagccgacccagtgacatgcacatgcttctggataaacaggcctgggtacgcacttgcgatagcctgcggctcgttctcggggatacccacgcagaccatcgttccgttgtaccggaggaagagcaaagactgagcgtaagcaatattggacgccgtgcaaactatgacagcatgcgcaccaagacccttcgttgtaagcgatttgacgtgcgaggagatggcctcgaatttatcgcccgttgggaacttggtgatatccacgaagtgctcggcgcctgacgccttgacgagctcttctttactcccgtggtcaacgccaatcacacgcaggcccatgcccttggctgcgatctggacggctaagtggccaaggccgccgccagcgccggagatgacgatccattgacctggttgggctttactgcgcttaagagaagcgtagactgtgacaccggcacagagaaggggcgccgcttcggctgatgggaggccatcgggaattggggtaacgtattgcgcaggaccgagcacgtattgctggaatgtgccaggggtgtagtaacctgataccttttggttgaagcagaggccgtcggcgccgtcctggcatggagctttgcgttgttagcaagttttggttaaaatgcgtctaaggtgtatgtacgtacggcactgcccacaggcgctggaaatccacttaacaccgactctgtccccgatcttcaatcctgatgcttcaggcccgcgccgagcttcaccactttgccaacgccttcatggccaccgacttgtccgggctgagtagggaagggtagtatcttccactgtatcatccattagcatgcgttcgcccttgatgagactccaggacaggaactaagtgcctaccgtgttggtcataataccaaaatctgagtggcaaacgccggaatgagtgctacaatgttataacgttagtaattggtacatgccagtactcgactcggcttggatatcccattcctccaaggtaacaggtatatccagggcacgcacagattgatcaggacttcattgtcgccgggctcaggtacatccagctcgacgaccttggtagagacggtaccggggttgtcgtagatgacagccttttgcttcttggggatttcaggagcagccattctgacagatttcgcggggcttctcttgtatcgttgataagataaatgtgggaaggtgaaagaagtagaggaaggacaagcctctctttatatggctatcccagaccagagcaacgtaacgccaagtcgactatcatctctagcctgaccataaccttagaagcagtcaggtagtctgattgctgatatgaaaatgaggggaaagggcatctccgcagggaggggagagtggctgatccaaggaggagagagcagtgggccttaggccagcccaaagcaggagtctgagagagcgaagtttcagcatgacgcagctaagctagaatatcgcattcatggaacgtggtatcatgattcatccaatcagtctcgaggcagcgtgaggggcgccggcggccgaggaggtgccgtggtggaacagcctcggttacggtagacaaataagacgcgtttcatagtcttttgagtccgtaacagtaaactagctgacttgagagtgttcgtaatgtggtcttcgccaatgggatccgacaggttcaaggttgggacggaaacactgcggaacttggtgtcgaattgtcgatgtgatggcggggaaaacgcggggtccaggaggaggaaccatagcaggaccgcgacgatgtctaggacaaggtctgactttatatcgcgtcgaagtgagtaccctggactccaagcgtcactcactatataatgaaccttcttgaacaagtctatgccaatgatgtcaagccgtaatgcctatggccagttcggtctgaaatcacccgacggcaacggctaatatagatcaaccgcgaatttacccccgatatctcactcttatatggtcatggcatcctgacgttcttcttcaccatgtctagaccagaaataaatcctcttctggacctctggacacgtaaccgctcaagatggccttccctattgtggactcgcacatccatctatttcctgaatcccaccttcccacactagcctggtatacacctgacaatccactggcatctcaacattcagtcgacgaatatcgttctgcagtgaaatcctccacatctttacgcggctttatatttcttgaaactgaccgcctctcatcggtcgaagagtcggagacgggaaagcatggctggacccatgccctcgatgaagtttcgctcctcgcacgaatcgcaagcggtacacctcttccgggagaggggcacaatgctgaagatcgcgatctttgcctggggatagtcccgtgggcgcctgtatctggaggaccggatgcgttggagaagtatatggcgctagtgaaggagagagcaggatcagaggaggtttggcgtaagatacgaggcgtacggtatttggtgcaggataaaccagcgggggttatgctgcagccagcattcattgaggggttgaaatggttggggaggaaaggcttgactttcgacttgggcgtggatgcgaggcagggtgggatttggcagcttgaggaggcggttgagatgatgagaagggtttncgagggcgttgaggagcaaaaaaaagtcacgcttgtgattagtgcgtcaancctcgccgtctattcagagtcttaatttggtgccatgcgataatatgctgcct

SEQ ID NO: 1908 - DNA, 1734 bp, Emericella nidulans
cccctagggtcaagcaagagctcgtacggggatttggcctgttcagtctgacgagtctagggattattattgccaagtgagctatttttttggatttcctttatctatctctccatcttgcaccctgcataccagacacgtcacctatctaaatgtcgtcaataacagctcgtgggccgcaaccggaggcacaatcgttactgcgctgtacaatggcggcccaatggccgtactctacggcctcatcgtggtcagcatcttctatgccttcatctcagcctcgctatcagagctcgcctcagccatcccctcggcaggcggcgtctatcattggtcctcggtcgtcgcaggccggtacggccgcgcggcgggcttcttcacagggtacctgaatgcctgcgcatggctactcagcgcggcatcgatgagttcgattctaggcaacgaagcagtagccatgtatctactgcgtaaccccgacgtagaatggcacagctggcagccgttcatcgtcttccagattgtactctggatgtgctgcggaattgtctgctgcgggaataggttcctcccgctgttgaatcgaattgcgctcatttcgtcgatgggtggcttgttcattacgattattgttctcgctgctatgccgcgtggtcggtgggccagtaaccagcaggtgtggaggacttattataatgaaacgggggggtggtctgacggcatttgtttcctgagtggcctgctcaatgcggcttttgctgttgggacgccagactgtattagccatctatctgaagagggtaatgctcttccgtagcattctccatgatgggatagatatagcatgctaacagggtggcatccagtgccgcagcccgaacggaaagtcccgcaaggaataatgctccaactcctcacagcattcagcacagcattcatctatcttatcgctcttttttacagcataaatgacatcgacgccgtcttcaacagcgcactcaacttccccaccgccgaaatctacctgcaagcgacaggctccaccgccggcgcagtcggcctcgtcgcactaatgttcctcgcaacctttccaaccctaatcggcaccctcacgacaggcggccgcatgtggtggtccctcgcacgtgacaacgctaccccctttgcgccgttccttgcaaaggtccatcctacccttgatgcacccgttaacgcaactgtcgcgatgacaaccatggtgacgtgcctagggtgcatctatggaggaagcacgacggcttttcaggcattgatcagctccttcatcgtactcagcacgctttcgtacgccggcgcgattctcccccacctgctaagcggtcgaggccgcgtcattttcgggcccttccgcatgacccgaagctggggattcattgtgaacgtgctcgcggtggtgtatatcgctgtgacggtggtgttcttctgcttcccgtttacgttgcccgtgacggtgcagaatatgaattatactagtgtcattaccgtaggtttaatgacgattgtgctggcttggtggactgtgcgggggatgagagagtatcagggcccggtgtatagtatcgaagctgcggaaaagattgctcatgaagagacggagagggttgccgaggaggttggggtcttgggcgagggggttgggacgagggaataagctatagtatagattataccaacgaagtgcttgcaaacagctga

SEQ ID NO: 1909 - DNA, 4454 bp, Emericella nidulans
ttctggacctcccgtgcatagtcattgacagccggcataacaggtacaatcaggacctgacgcgggctgatccagaacggccacttgccgccaaagtgctcggtgatgatacccaaaaaccgctcgaaactgccaatgatcgcgcggtgaatgacaacggggcgggcacggccgggtgcgggctcgttggacttggggtcagcctccttcttcgcttcctcctgggtagcctgggtcttttcgccagtcatgtactcgagcttgaagttaaggggtgcctggtaatcgagttggatggtggcacactggaactctctcttgagagcatcagcaatcgtaatgtcaatcttaggaccatagaaagcaccatctccttcgtcaatagttcagtcgtcgcccttgaacttggtcatggccttcttgagctgctcttcggcgtagttccacgtctcaagctcacccagatacttttcaggacgagtggaaagcttgagcttaaaggtgaagccgaacagtccatatatggactgcaggaagtcaaagagtccttcgatttcggattcaatctgtcctcgtcagcaggtctgtaggatacattctttgcaaagcatcttacctgatcgtgggtacagaagatgtgggtatcgtcttgctggaactttcgaacacgggtgagaccgtgaagagcaccagacgcctcgttcctgtgcaaaacaccaaagtccgcgattcgcagcggaagctctcggtagcttcgctcgcggtggccgaatagcacaaagtgacccgggcagttcataggcttgagagcccattctctcttttcaacatcaagtttgaacatgtcatccttgtagtgagcccaatgaccggaggtcttccaaatgccgacgtcgtacatgttgggcgtctggacttcttggtatcctcgcttgcggtactcggaacgcaggagggactggagggcgttgaaaatcctgacaccgttgggaagaaggaacgggcatccaggcgacacgtcatcgaaaaagaaaagttcttgctccttagcgattctcaggtggttgcgcttttcagcctcctcaagaaatttgaggtgctccgccatctgtttcttgtcggggaacgcgacaccacgaattcgttgtagagagtcgttgttctggtcaccgaggaagtaggcagaggagttctgctaggggttagccttaacgcttttaggggattcgcttagtatagctgacctgcatgatcttgaaggtcttgacctttccggtgctctggatatggggacccctgcagagatcaaccagagtaccacatcggtaaacggtgctcttctccccagtgacaagtttgtcgatgtagtgcagcttgtacttgctgtacgcaaacatcttccggagattctccttggtgacttccaatcggtcgaaactctgcttctctttgaaaatcttgttggccctgttgtcgagggtcttccagtcggactcttttacgacacggctgcctagatgtcagtgactgtagcgaacggacgaacgagatgcgtacttatcaggcatagccatatcgtagaagaaaccttgtggagtaggcggcccgtgggagagcatacacccgtactcgcattcgcaagcttcacctagacagtgtgcgctcgaatgccagaaaacttcccttccctcaggatcgctgaaaggaacatacgacactgtgcattctccctccaatgggcggcctagatcccagagctgtccatcaacctttgcaataacaatatccgcgctgatctcctttgggacgtgtttcagtagctgcgctggtgtggtttcccaagccttcgagggaatcgtggtagtatttccatcgccgagttgaagggtgacattgatttcagggtgaggcctgttcttcacctcctccagatgctcctgccataactcctcaaacagcttgttccgctcaataatgaagtcggggagcgtgtcgccgcctacaacaatcgacatagtcaggaggggttcgaagattcagcggggcaaggaatacgactcactggccggtttagcctcagcggcagcccgaacaggcaaatctttgggaccatcagaagccataattgcacctctcaacaaggaaacaagaatgatcaaaggatatgggcgttctcgcgacgagaggttcttttgatgtctcaagcctctagaaagttgactcagatctgtgaatcatacctacccggaaggcggtgagtaactcggctagcaacattttcctttgaggctcccgccgtttgaaaacttctccgcttcagtccgcaccaggtcgacaagaacaaccccaacatcaagatgtcatttcgcggaggcggtcgtggcggcttttccggtcgcggtggaggctttggtggtcgtggaggtaagcaattgtgacaattgaagacagatatgtgtttgaccagagctaaatgaaatttttttggataggcggccggggaggtttccagcagtcttttggaccgccagaccaggtgttaggtgattactcacattgaaactggcttggaggcatcaaccggctaattacaattttagagatgggcactttcatgcacgcatgtgaaggcgagatggtttgcgaatcaatcaacccgaagattccttacttcaacgcccccatctacctggagaacaaggtacgagacgagcaatatgatctgggaacaatttgactaatgattgctttctatagacacccattggcaagatcgacgaagttctgggccctatcaaccaagtatacttcaccatcaagccccaagaagggatcgtcgcgacgtccttcaagcccggcgacaaggtttatatcggtggtgataaactccttcctattgagaagtatgcatctttctgcccttgggagagtagtagccccgctgaccagctatatcaggttccttcccaagcccaagcctccacccggtaaatatatccattctgtaacatcgccctcttacggactctgctaacaagacaataggtgccaaagccaagaaggcagtcggagctcgtggcggcggtcgtggtggtcgtggtggtgctcgcggcggcggtttccgtggccgcggcggtgcccccagaggacgtggtgcacctcgtggtggaagcttcggattccgcggtggtgctggcggtaggggaggtggccgaggagggcctcgcggaggcttccggcgttaaaacgtgacagcttctctgtctttgcctcgtcctgtcttattacggcgttatgggaacacgggaattatgtcgataattttgaccacggtcatttgagaaaaattggttttcatctagtcttgaaatttgtatgatctgatcttctccgcggtgttgccgtgacctacgttgtatacgaaatcagcccacaatagttacacgtgctcaacggccagaggcatctccagtttaagcataatccaatgttgaactagaagcgttattttgtcaactcgaacagagaagcttagaacctgcttgctggtagacgtggctgagtgtggcgcagcgatgacgtctagtcggactgctgagagcctgaaagaagcgagagcctgcacgtgcaaatgtcaacacattctccatcggaccgcaattgcagcccagtattgctttctacctaagcatcacccatttatattactttctagccactatttaccctataaaccctcttttctagctttcccttgtatgagcatgtttcgaaggacttcagccatgcccgcgaactcgttttcacacagtggtgtctcagtgactgcggatggaggtatgccaggactgcataaatgacatggctcagcttattgccaggaagttgattagctcatgaaaaccataatgatgcagtggccatccaaatctagtggacttagtttgtctgggccagatcttccgtgcctagaaaacttccttccctctctgtcagtgtgattctcggccctctgcacctatgctcacctttctctcgtcctttctttccaaaggcttttttttttacctcattccgagtaggtgatctaacccttcttttaactttgccggtctctatatattctcccttacaacgccttttatgtcctttatctgttttcctaacttccttggttgctctttttagacttgtacctcgtaatttcatatctcgtatccattattgattacctatcactgtccctttttctcttatctgcatctcttacttatacttagtctatttctcttctcctctctttaaattctatcccttcttcctatatccccctcatactttcattcttttccttcgcactacattcacttcctctcttaacttttatttttcttcttaataactatatattcatattttcttcctcaattattctacctgactacctctcttaa

SEQ ID NO: 1910 - DNA, 8709 bp, Emericella nidulans
tcgccgttctttgaattaatctaccaatcacaattccttcggtctcaaatgggcatcaatctctttgcctttaaattccgaaacacaaaccgcaagacagaacggggtcccccatgcaaggcgcgccaaagatccaccggtagttcttgcacacagaatggcacccaacccgggcgttcagaagccatttgttgttatgtgtcaccctcggtctccaacgttctcctaccggcgcagtcacctttcgcgcaaaactgttcggcatccgagctgtactcatagacggagaatgtccacttatctagcgtcaagctccacactccgtttgagcccggcgatgaatctacgcgttgctcccacaggtactggaagccctggttcagaagacgcggcgcacgatgccaaccgggctgctctttttgcgagggcggcatatgcattgatgcggcctaccgttaggtttgagggttaacgaacgtgctcagccattcttggtctacagttgctatgagccggtggtaattaagctggtggctttggacctgttcgggttacgtgagctccgcttcacaaaagcatggaatcgcgtctatttcggagtgggcacacccaggacctttcccactagagaagtccaaacgatgtaatggtgcttcagtcagaaggacaatcattgcgccaatacagcatggatgtgaagcggagttcataaacccatgtgtcaaagccagttagtgagcccactatcacccccatcaacatgcattgctgaagcagactttgtcagctcatgcatgtgcataatattctacaaaaccgagatagccgtgccagtctgcgttcgctgagcgcgacataagcttgggcgtatttttctgaggtatggaatagtgcatgggcagcagaaattaatgccagaacggccttaaacgaagcccgtcatggccctcgcaataaagtgacaggacatgaagcggcaatgagcattacctataagggaaaggcattttcagcgcccaatgtactgcttggcctacctgcctgaaatcgtcaataccacctcgaacgaccattcgtgagtattacttggtagtatgctccgcagttggtggaaatccagcgcgaacaaacaaacatgagaacgaacgtgagctatatctagaggacttgatacctttaagaataccggtgggtagaaactgagatgggggagtgggtgggtgagggatacccatagccgacagacaactgaaatcgatcagcaccttgcgcgattcacagcataggcagaaagaaaacccgtacttgcaagacaatatgttaatgctcagcattgcatcatacattaatgggacaactaataaattggctaacttggaacctgttgttctcaattcacgaaacacttctacaccttcagggtttataaaacatatttgccgccgcaaagtatggagagaccaaacccccgtcctacgaatgaaacgcaaatgaaaaacttccacaaagaaagggaaaaagagacacagtgagaaagagaagaccaaatatcatacccattcgagttgacctattcaagtgcacattgcaggttgatacgatagttagacatacccgcaattcgttgaagactgcaagtccatgagcaaaacggcacatagtctgcttgttgcactcgtaagctccaaataaatgccgcattttggagggaaggcggcaaagttaagactgttttctgtgtccgagtagatcatagtctgacacagagaggccccagatagtccagtctgctagaacaaaccgccgggagaagcacaggtgtcgacagccctggcgcgtatggtttaccatatcaactccagccggacatttgaaggaagcgatggttgaggccagctgccggtgagtgagaccgctatagggcgccgctggcttgggtcgaaggaggccatgctgtttcatctggttcatcagagcatccaacatccgagaatcgcaatctacagtgcatcctgggggccctttaaggagtacgttaagagtgttgtgcaaaacgtcgaaatgggcgccgatgaagcaattccggcgctggtttagatcttcgaggacatcaccagaaatgggagcgcccatggaagtaatctgtccagggctctctgcgattgcaatactagtgtacttggcgaacatgttgtcaaagtggaggtggagcgaaatcgacacaaaaaccatgagggtgggacaataggttctgggcggttcggagtctctgctcgatagccacgcagaaacatgggaggcaataagagaggggcattcgaaaaacgctgctatttgagtgagctttgcaatttgaaggaggtcggtaagaggcgtaatggggtgttgcgggttgtgaaggatcgtcaagaacaaccggacgagatcgggatcgtacttgggtagcacataatcaagcccacgcggcgaacgtaacatggtttgagcttctaaggtggtaaggaccctgttcattagaggcgagacacgcttcaattgatcggctgatgtgcggaatccggctgcaggaggctgagctggtagagagccttgtcctggtccaccttgctcgcctgctccagcctcgtgattgaggggcacgatgatgataagtgtgccgtctcggctaaagaccgtcaagcggctgggacgaacagtagggtaagacataattgtgatcaatttaaggctggtaagattagacagctcagtagtctaacagttaagaaccggaatggttcccaagagatccaataaaccgcttcaagaacagaccagaaagaggataaaaaacacaatcagaatttaaaaaaaaggggagaaggaccaaaataaaagctgcatagccgaacaattagtagtgaataagtataacaaaacccagtgaatgaaaactccttagggctctggcctatctcgcaccggcagttgaactgccaatagtaaagatatctggaaatgctggccaatgtactcaattccttcaaggctacctttgtctcttctgcagcacctatgagcgtcgcggaacatacgttacgcgggccactgaagtatgttagatctaactgaagacataaatgacagttggttatcatggcggagcagaacgtatccaaacagaatatatgccctgcccttaacagttggagcattagcactacatatgctagtaataacttcaacgcgcgcgcggagattcctcccattaataatggctcgaacatgaattggcattgccaggacccgaaatgctgcaactgggtatgtccaggagggctagttgatggactcttagggcagttcaaagtgaaaacctacaaatcgattgcccagaatcccataatcattaagtgtataaatgacctcaaccaatctaccagatatatatctcagcaacagcaatcgtcgtcatcattcccattccctccacagcaaccatcgcagcagtcgtcatccccgtcgttcccatccctattctgcgtcataaagtcgagagatgtatacggctgctgctgctcatacccactgtcgttataccccgagttgccgttgtcataccccaaactctgagtctgatacccctcgttcctgctctcatactcatagtcagatggctctagttcgctcgaatcttcctgccgctcagcttcagcttgcaatcgctgctcttcccactgctccctttcccatgcaacccccgctgctgcaccggccgcagccccaagtgccgctcctgcaacaacacctgcaacagtcttatcccaatctttcctgtcttgctccacctgcgcctgtgacttataccacatatattgctcgtactcatactgcctctgcgcatcagcatgccggatctgttccatttcatggtccattgcggcgcggtctctctcatactgagctgcaagggcagcattctgtttctcgaagtgcttctggtgcgcagcagattgcttatcaaaagccctttgttgtgcattggcgtgcttgttgaatgttttttgctgtgctgcgaattgtttctgcatgctctttgctatctgcgcgttctctttctgggcactttggtttagcttcgcttgggacttcattgtatttgcatgctgcgatatctgagtggtgtgctgtttcaactgttggccgtggtggcgctgcgttgtttgaatgtgggagagttgtcttgcttgcgctggagccgagcggggatgagggaggtagtgggagcgagaccgtgctggagctggagtaccatgggccagagactgaggaggatggtatgccatctgctgtggtgcacggggttgagcaggtctggtgtatgccggcgctggggagtgaggatggggatgggaaatagcggtaggatgagagtgagagcggccatgaggctgggggattggtttacggcggtgtggtgcggtcatttcggatagagtagccttgttaataggcaggcagatagggctcaagatgtagctgtaagaatgattggagtgaacggagccgaaccttgcagaggatggacccggcgatgttcttataccctgcgtcctcagatgtcctgcgaacctgattcaaatagcaatcctctactcatgctaatagttctaggtaaccttactatcaggacttacaatccactaatccgaccccaatgcacggctaaagattaagcaatatcgcccacgtttgttggcccagcgctgccctatttaggaaatccacgaggctgccatgcacgcacgcccgaacggctggcccttggcgacgttttccttggctaattttaggctgcgtgggataatgtaaactatttcaagcatcagcagcaagttaattggaccagaactagtctagacttgtcccagggacgctcgcttctggggctgagttcgacgccaaaggctgaagacttcacaactccttcaatgcatttgaacactgagcaatagcctggccttaggaaagatagctacttgttttgcagcataatcttaattccgtgatacttgtcccttcttccgtttcgttgtgaggctggagttcaaaatgagagctaatagtgtagagcgtggagatctccaagtctgtctcgattgttttacaaggtctcatcactctgaaatgatgttttgatcgaattgcgttgccagagcctcgcacatctcttttcggcttactgtttattctgagactcgtgagttaatgggtcataagagggctaatccagccattgtctggtgtttaatctccaaccaagggtaatgtatatgctgatcggttgcatttgggctacttatagtgtccgacaagaaactaaggtttatctcctgattcaagaagaacactgacggtcctacagcgacacttttctgccgaaattgggaactaaagaagtatgtgagatcttattcaaaacagataaggctaggccagagaggagatatttgtctactgagtggagatcatacgctagtatctattctaatcgcactatgcaaaccccagtaccactacccgtatcagaattgacgatatctacgtcccatgctcatacccactacgcgcccgaaaccctggccccttgtagaagaaaacccacggaatcggcgccatcaccgtagctagaaatcccagaagactagtcgcccagtccacccccagcgcgtcgtacatctgcggtacgaacagcgggaacgcagtggaaagggtataccttgtcaagcttgacgccccacttgcagacgccccgtatttagacccatacacgtcaagcatgtagaagttacaggggatgtatataagcatactgccaaggaatgtcaggctttgtgctacaatgggggccatccagtggatgtgcggtttcgccgtccaggcgaagaggaagaggccggtggggaggatgagagagccaaacatggctgtgtagagcttgagctctgggggcgatccgccgccctcagtgttgttatttcggattcggagggtaggatttagctgcacaatccggtcgactgtgaagaggactagaggtgcacatatgcagccggctaccatgcctaggaaggagaggccctgaccagaaggggagaagccgtagacgtctgcaaaaacgcgcgggctggcgacgatgaaggtgtagagcagggcaaactggaagccgcagtagaggcagatgaagccgacgaggggctcggtgaagagcatatggagcgggcggacgatggtcgaggtgacgaattctttaaagagctgcattgcagtttggcgctgcacaggcaggacaccttcgccacccagtttctctgcgcgcctttgcaacaggatcggcttatatgactctctgatgaagatggctggcggatggacgactgccgccatgatgagcggtgtccatgccgtccatcgccagccgcgctgctcgaccacaaatgaaccgatcaagggacccattgagcttcctattgtcgggattgcgtagtagatccccagcggaatgactctcctagaagggggtgtgtagtcagtaattgtcgccgctgccactgagacgcccggtgctgcgaagacgccggcgacgaagcggcacactatcaacgaagcgatcccctgcgacgccccgacaccgagcgtgaagagatccaccatcggaagggtaaggaggtaaacgaatttgcggccgaatgtctcagagagtggagaggagatcatcggtccaaatgccagtcccagggagtatgccgaaagcggaagcagagagaccgtcgttgacacattgaagtctcttttgacctgctcatgaccagaagaatagatggaggcattgacagtggttgcgaacccaatcaagccgatgacggtcgttgtcagagtctttctcagcgtggaccagttgcgcggattccccgggtcgtcgtcactgtcccattcttggagtctcctctgtctttcgtcttggtcgtctgcgaggtctatttgcatcatcttgatacttgagccaatggaggtttccatccaagcaagtttgcgagacagtgctggataatagaggagttcggctatgactatccttagccgagaccaggccaacgatgccggagatctgcaaatgccacccaattagaggcagcgttcacagctactggacagggctagactgctcagtgagtcggtccagcccgatcagctgtcagctttttaaagtgcgatcggaaacactcggctcactgtcaagagacccaatgtgcggggaagaccaatgtcacgcgtggggacgcaaagggctggacaaatatccggctctgactcaaccacgcctgggtaacctaagtaataaactagatacatcagttggttactacatgtagcagtaaacttgctgccgacgaacagcacttttcaggcggagtcatacaaactcactttacacccctttcagggcactgtcagcagttattgttatgcctttgccagaggaggccgcagccgtaatatcaatatgatgttctctatgataacagtacttcgagatgttctctaggatagacataatagctgactgctatcactaggaaagacacatacggaagacaagtacctgaaaggtcatgatatagatcgaaggtacctcctggttatactggctggctcagccattatcctagtacttaatctacaagagaggcaagcaggtgcgattgccattgtcgccgcagtatctggggaagcagggctccagagggttggtgaaggaacccagcactaaaggccagcgccaaccgagcaaaactaccaggagatagatatcttaataataattatattgcagccagaattatctcgaccaaaggacgggcagtcgtgctgagcttatctccacagaccgtgcttccttgagagtttccgacatgtagggctgagatctacccgcccaaaaaagagtaggcgcactatcagccctgtggggaagacttttatataaacatcagaagcagctagttcttttttatgggcacctgtatatctaaggagtcagtgctcttcgtggtcttacccctcgtcttctctcgcgattcatgtagagccttgtcctcccaaccgttgggtgcgaaacacccaccaaggcacaatggttaatagtgcagaacgacttgtaattcgcgctttcaatcttcccggtaaggctcaggagtatgggcgtcttagtccgcacgccctctgtggcgcagtcactagcaagcaagcttctctgactggttgcggcctatcagccgcctgtagtactccgttttcactagagaaccagcagggatgatagtggctgagccagattgccttagtatcaggcagaataataaacaaagggtggcctataaatacgatctatcagctgctgtacctatctccttccacagcctggccactgacacctttactacttgctacagcacgcaagccagccctaaattttgctagaataggtccaagccagccatcatactcgcttcaatccagtttcacagtctctaacactacctaatggcgtatatcgaccagccagaaaaatccaccatgcattacgaccaaccgccagcctacactgaaacaaccttgacggcggcttcattagtaggcccagctctagaccgcccctacagctcacat

SEQ ID NO: 1911 - DNA, 2090 bp, Emericella nidulans
aagatagcgacgggaaatggcgggggccacactattctctaggtaccgatgagcgtatagtgcaacggagtatccgggcaatagccagataaacttgcgggaggagaagaggatgcggccccctgtccaaatggattctagaaaaagccagaacccgacgacgactgcttggatatatggcggttgatcttcgagtacttgagtccgctgactctgaaaaccgtgatcgccgatgaagaaccagccggcagccgataagaagaagcaaatcggggtgatcaggaaagagtaattgtttccaagataggggatcagagccaatgcggtgcaaaaagccccagccgttcctgatacttcgtagaatatatgcaccaaagcatctacctgacgtagtttctgcacattgccaccaactagatcccgcgggatcacacgccggatcaactcaaccatgccgtaggcgataccggccacgcaatacacgggaataatgccatcagtgtcgtagctgccgtagtagtggaagtcatgttcagggtggtgatctcgaaaggccgacgggaggaatcgaccgcctgtgctggcatcaatgatgagaagtagggcgctgagaaggccaaagaccagaacggcgccggccagaaccagccgcgaagggaaccttcggataagcggggcgatcaggatggacccaacacattgacaggcctggttcaggccaccataagcccaacccgttgaaacgtttttggggtggtgttggtcaggtaggcgtcataatcgtagcgattagttgcaagtgtcacgatcgatccgttgaacgcttcaagcccgaacttgtacatcataatacccaaaatgtatatggctatgttgcgtctctccgcagagtaaacaagcgccaattctgcttgactgcatcgtaaaagggttccatagccctgggcgccccataatcatcttccacaagcgggagtaatatcgcaggagcgtgaagcgctgctgccagaggcttttaaatgatgaccagtgacgaacgaccccgccgtcagagatgtagtgctcagcctgacattccgatagctgacccgacattgcttcttccctgtggtcatcccacgggccctgcctgactggcatctcggcgagaacagtcgagaaccgtgagaacaaatcgaaccccaggaatcaagcacgttgggtgggtaataacagggatcaggaattgagtaatatctaaactttgcttagtgaagtactagggagctctcatggaagtcgtgtagaagctcttggatggctggtatgcatcttggcccctcgtggtttatggaggaatcgaatcccgcgagggaggcacgtggtggagacctccagatagggctagcgttcaatcacgtgaggaaactgggtatgcccggcaatgccaagaccaaacatatggcgcttcagcatggttatgtatccagcaaggagcagaatacaagacagcacatttggatttcagtcctatgatgtcagcgcttatgcaccactactacagtagggaggaaattttatcaacaagcacggttgtttcgcgcgggatgctgcatgctgcatgctgcggacttggctcagctggtcctccgcatccttcgccaagactcagagccgtatgaaggagtatgaagtacataatctctgccagcgtcaactatactatgatcacaataccagttctatgacgatgacattgacactatactagaaatcaacaatagccaactcattcatgcatccatccatagcaacccgtgtcgcgtccgaatatcagtatacaaatatcaactggatgagtttaccccttaaacaccggccgattttgagatgacggggaaagaacacataggcaggaagcgaaggtaatgaaaataaattggaattgagaaacctcagtgaagactattacaatttgggctaagtgtcagcttggtcttacgatatcttatcatggttctgccgttctgggcagaacatactagagagatcaagactttgctgcctcaggcgcgatcacgcaacgccgcaaacaaccgctctttccgctc

SEQ ID NO: 1912 - DNA, 1762 bp, Emericella nidulans
ctcactttccagctcgatctcagctccaatcgtctcgaaacagtatcaacaccctccccgctaaccaagctgcgggctctgagagtttcggacaatcgcctgcggagtctcaatgttggtctattcccagcgctcactcttctttacgcagaccagaactgtctatccaccattttaggtcttgaccagagtcgtgtcttagaagtattgtcagtacgggaacaggaaattccggatggcgaatcccttgatttggacctgggattgctgaaggatatccggaaggtattcttatcatcaaacaaactttcaccacaaacactttcaccatccgcgcctcttctgagcctgcaacttctcgatgtcgcaacttgtagcttgaaagcgctgcctatggacttcgccacaaagttccccaacgtcagagtccttaacctcaacttcaactctctggagggagtgaatgcattgctcggcatgaactgcctctcgcggctaactgtgctcggcaactccatctcgcgcctccgagatatctgtcaagtcctcagtcggatcggccgtacaagcaaatcaaacacttgcacactccaaaaagtcgacatccggcacaaccctctcacagtccgattctatccacctgccttaaccgggagcggcaaaccacaaccccagaaattgatttcaaacgagggacgacgttccggccatagtcatggtctcgacttagatctgcctctcatggagcagctcaatcgcgaaggccagctgcttcaagtgaatggcgaagacggcgaagatacagcgcacgctgaccccgaaatcgatgatccttacactcttcccccagcagatttgttgttggaccaaaagcatctagcccatttagatcaagcaacaagactcaagcgtagagtcttcgagcttatgctttatgcaggcacaggaggagcgattaaagtccttgatgggctggatttccggccggtgcttgagcctggttcagatatgaaccaggcttgggctaggcttgaacgactcggtgttctcagaaagaaagcgatcaccggttgatcatttgattcttttgattaccccttttttttcacttcacttctcaatatcctctgcctttctgcatttcttatctaggacgggggtgaccccgatatccctcgaacttttttttttcttatttgcttccgaccatgttgtgtgtactttggaggctggctgggatttcttgatgcagcgttgctcttagcgagttactttgatcgtacctcggcgtttcgggattgattgacatctgtatctgcgtctctttgttgctgttggcgtcgcccgggaatttgggtgcatggatggggttaggtaaatagcgagcttgtccttaacatagccacttgatccgcattactggcagcatttgcattttcaacctgacttttactgaattctctattgactgctcactcaataggggtgggtgtgtaaatcgggtaaattccttgctggagcttggttctaactagcggactcttaagccttcgtgagattggtgaaaatccaatggcaaagtcttgtcttagaactccgactcgaggttactcagttgcgtgccaaactgtgcccttaccatttccatataagccttccacttgtgatggtcacccatcgtctcagcattagggaatgctttggacaattcgcgtgtaatctttagaacacccgttgacgcctcctgcgccttctcgatcta

SEQ ID NO: 1913 - DNA, 3558 bp, Emericella nidulans
  unsure (1)..(3558): unsure at all n locations
aaaattgtccgaaaagcatcagaaacgggctttacagggctccaatccggctcggttgaggaatagtcgatgcctaaaccacctctgctaaggaagtctgcacgggctggaagtaccacatggagagcaattagacgctcaatcccgctcagcacgttagtcctctcgtccgtatcaagtccagcagcacgaacgcagtgtagtagcctgagggcgcgctgggaacaatgagcagcaaatcccccctaagaatataaaagtcagcaaacacacgcatacatcaagttgagagtccgcatacattaccagatccctctgcaccaccctggcggtacgatctccactcccagatctccaagagagcaggaagaacgtagaacaaatgctgcaactctgtcgtcttccgagcattggagaactgagtaatcgcgagagaagcaagggtaaatgatttgcccagcgtaattgcgatcggttgaggttcgcccctgagagcatgcctgagatgagagcgagcagtttcatcaacgccgtcctttccgctaaccagtgtgaccaagctatagatgcagtcaaggagacgtgtaaaagccaaaaagcatgagacaggcgttcttggctgctcgtcaacgtccatcgaatcgtgctcaatcccattggttctcttccgcttcgtgcccttcctgctagatccttcactcaaagtttggctggattcggaatctgaaggcagtagctcgtttgtcccatttccagatccagatatgacatcgtctgttaagtccgtaatcgcatggtctaggatgccgatgaacttctggtctttaagcgtcgacgccaatgtcttcggagaaatgaggtcaatcagctgccgcaacaaaagaaaagatgcaggctcgacccgatagttcttggcagccttgagcttctttaataaccatcgtaaaacccattcttccttcggggccgcgtggattgggacatgaggggctcggttgatctccggatggctggcgcataacgacaagtcgagtccaataatttgggcggcctcgttcagctgaatgttgggagacgccgtacccttctctagtcgaaggagagcctcttgcgaagggcgcggacgctggactatcacgttagcacagttagatatggttaaaggagcatgctctgtagaacgcacctctggtaacgaaggcatcctggaggaggcaccgtcacttttccgtcttcccttttcccgattctaccggggccaaaaccacattgccaagcagaaacatctaacgctctccgcccgtgttgattgtagtctggactctatgcatctcccgagaaaaaaagtggaaagactgatagcgggcaggccgctaagcctaatttttccgaccgccttcctgcttcctgggcggacccgaagctcgaaaaccgccgctcccgaccgactcaagcctgacgtctcgtcactactcactcaatccaaccatatttacctagtatcttggtccattcgctgttccagcacaggttaagtgatattgtcttcaaatagccttctcaagctaatactcgggctctagatcgcttacaatggccgactcaagcgactcccagcctgtcgcccgctcgaccaagcttgtcagcgaggccttgcttaacgagaaggtactaggcttaccccgtccgcgccgttgatgacgaatatgatttctccataattctatcagatgctcaactctggcctcgctgagaattatctcctcgcattataacaatcatagaagcgtcggctaacatgtgccttgttaatcattagtgggatcgtgccatctcttccatgattattcgctcttccctcggcctgtcgttcggtgttgtcttctcagtgctcctcttcaagcggagggcatggcccgcgtgggttggtttgggtttcggtgctggacgtgcatgggaggaggctgacggtatgttccggcatatatgtaatgatccagtgttactaactccataatgtagcctctttccgcaggggtgattccccggtgagagacgctctgcgtaggtagacggactttggcatgcagtctgaatttgtatgatacctgtatagctgcgcagataactgccatggcatggtttttaaagtttagaagaaattctagacctgtatttcaacattgtctttcgcaaaccaatgattcttccttatctgctcattggtttgctttgtcataccttaagcacgtcaatctatctcagaacaggggactactcattagactcgcagattattgagtggcgttgtcaagtgtacagctagtttcattttcacgaaccttctgtcgcccggctacgaattatgtattttcaggcagacacaagcgcaagccgtgtggaagtccttcgtgcgggctgtaccagtggcttgatccactcaaatggataaaatctaagtaaaccagcaaccagaaacacgtagagacaaatgcagatgaaggacaacagcgtactccttgcgcttcgctagacaaaatctgcaacagtttggactgggcaccgacacgctagacgcaggtaaacaaaagtagttgagctgtgcggataagtgaaaaatgatcgatcgagtaatacaggaggggagatagccacatattgaaaagaggatttgaggtggaaaagtagcggaaggaaatggaggctagctatgcggtgggaaatggggaaagtacacaaacattaagccaacaaactccgaagcccgatatgcaagggtatcatgatcatgaatcgtccaaagatatccgacgtcgagtacaaaaggtgtgagaaaggacttggtagaaaataaaccaagacaaacgcggttgccaagtaccagtacctgggaaagctgctgaattcacagattgccgtgtgttaaacagccaaggcagctacagctgggaccacattggcaattaccggcctcaccggcacaggcgccaggcaggccaacctgatactcataggtgtaataagcatcaggaaccatgaggtggtctgcagtaaaggactcaataccctgagcgtcatggccattatccaaaggagtattaccggtgccacaacaagactcgactggcacattctcagagttagtctcgacttcagctaacgtctggtccatttgcggcgcgctatattgaagtacgttggcatgagagttctgctgatcgaactcgttcccgttcccgaaggcttgcgaatcctgagcaatgatgcgtcccacctcttgaatatgttgcacggtaacgtcgttatacggatggtccgggcaagccaagcaactgcattgagggccacaactgcagctatgggggataccactggtgtggtttgttaaagtgtgcgttggtaaactgggggaancaagatcggaagcctcagaatcagtctgtgccggatgcacatgctcctacccgatgctggttggatttattagtttccctgnggtgcgggtccggacaaggcgggttgtccccgctggtgccggttctccacaacaatcgtgcc

SEQ ID NO: 1914 - DNA, 1504 bp, Emericella nidulans
tgggggtcccttgacaaaacgttgttaaaagtagcatcggcgtccaagttccctgtaaagcggtacgttcgcaggagataaccgctatatcactgctctggagcgacagtgaattgctcggtcccacctgcaccagagtggcggtccgattgaaaccctacagcttatattagtatatcctccatcaccttcacagcccccgtaagcggaaccgagtttcccgatacgctgcacatgtttgcatgggatatgggaccactgaccctaagccgagtctgactgccttcaaagctgacaggcgattgcagtaatggggcgacgtgcaagtccaagccgccagggagatccacttgagagccctcgaacaagaatcgcctctgggagagagcgggatcctcagccacaggagtttctgacgacagcacggtcgagcccacagtcggaacggtggaaagaagggaaacaaggaagaggagagaaagagggcaggaaagaagagcgtgcgagaacgaggaggggcgagagagaaaaggacgttgtgggagccccatggagacggtgatggagtagatttgagaaaggaatggatttccccacgggttgcgaggcttacggagacgtcggagggtatggggaatcgcggaagatcattaggtcacggatctcttgagtgggacacagaagaagcaaagaaaggtcgaaaaatcgagtaatccacgcgcttccaaggcctgcccagactgacgctgatatcaccattagcagagctggtcgatcactacggtcgtggcggttagtttcatgcgatcgatgccagagccggtccattggggaccggatgtgcttgtgcagagcggtgcagcgtattcgtacctggtagtaatccgttgaaggatcggggcgcagcaatctggtaagaatatggtaagaataatttaatatgagccagacagtcccagacaaacgacgacggatgagtggagggaatcaaatgccaggatagccgggctgacgatagtgaggggccagagatggatcgatggttggattatcccgggggatccggcagatggaggggctggtgacagcaaatatacgcctcaactttcaactctcgaattgacttcgaattgatcgaattgatcacattgaaggcctggtcgacgtctgacccaccgcgctggtttaaatgcacgagacatctttatcaaagaaaagagttttcacagagttcagaaccggaaacgtgatgaaaacgagcatggccggatccagagtctgacatctccggcttacggagtcctattctggttgctctacctagatggtctgtcccatcctgccgacggtgcattcctttgtttctatttgaggctttactgatggcttgggatggcctgggcatactgctggcttccacgattatttactactctttatctgacagacacaccctagcgagtggcgcaacggggtcggatgctacgcgcaaataggtcgttag

SEQ ID NO: 1915 - DNA, 3636 bp, Emericella nidulans
cgaggtatcccgcaatctcttccgccctctaccacaaattcagccttacaaccttcagtgttaatactagaagtcacaatggccaaaacaatcattgtcactggtgcctctcgaggtacgtttacctacatgctttcaagcttactccaattgcttgagctaacgattcaggcatcggcctcgccatcacaaaatacctcctctccgccccccaatcgcacaacgtcgtcgtgatcgcgcggagcgtcgagcccctccaggccctgaagaacgaatacaaggaccaagtcgccatcttaaacggcgatatttccgacttctcgctcgcgacgagagcagtcgagctcgcactgaagagcttcggacgcatcgacggtctggtcctgaaccatggtatcttgggacaggtgggcaaaattgcgaccgctaatattgaggagtggaagaagggctatgatgtgaatttcttcagccttgtctcgttcgtgcaagcggcactgccaaagttgcgggagagcaagggaaagattgtgtttacaagttccggagccgcggtctctgcgtaccgcggatggggactctacgggtccacgaaggccgcaatgaatcatttggctttgagcttgggtgaggaggagccagatgttacaagcatttttatccggccgggcatggtcgatacggaaatgcagagggaactgagggaggatcatgcgccgcccctcgagccgcaggtccattctaagtttacgacagtgcacaacgaagggaagttgctgaagcccgagcaaccagggcatgtcatggccaagttggtgcttgatgctcctaaagaactgagcgggaagtttctttcgtaagtttctgctcaaattgctacggatagtgctaatgggaggatcaggtggaacgatcaacaactcgcggccttccaggcgtgatactaaattactgtagacgagtcagcgagactcttattaaaacaagccatagaacaagacagcagaatagaattgatcagccgaaagatgaaaagcaggtacatttcttaagcattagatgcagcgcatcttcatacttagcatggaatgtagtttgttcatcacaaaaatagaagacagaaaaaaatgtcaatgccgtaccttttcatgctagctacggaatggctgctctgcttgctgatgagcaaggctgtcctaaatgcttcaaattatcagcaatgctcaagtaggtgctgagtggcataaatcatgaaattgtggtatcagtggtccgtttggcttggacagtgtacgtcaccatagaatggtctgataggggcgacaacgatgttcatcatggtaaaaaaggcaagcagagtcgattaaacataccttgtcagttagtcaagagcataatgctgaattgtagatatttctcaaagaacatcatattgagatttctctgtgggagatgaagaaaaataaagccgaaaaaaaatcgcagccgaagataaatagcctgagcggtgggtttctgcctcttggttaatccgttccgctcgtcgcatccatatttcgcgataaagagggtccgtcaggcttacgctcggacaaagaggcaacgtaaacaggtgactccatactgtcacggtataatctatcgccgctgcagaagacttgctcttgcgatccctttagacaaataccgaaatcatgtcagatagggagttcagctgtacgtctttcgcgtcttggcgcaacaatgatactagctaacacggccacagcaaatgacgacttgtcgcttcctaaaggtgtgaactaccttgcgatgtttcttcgcgagcctcggtgtgcttctaagtcgcggaactgtcgctaatagtcacagcgacggtccagaaaatcatcaccgagatccttcccccctcgtccggacaatccttctccaaagacgcgcgcgaccttctcatggaatgttgcgttgaattcatcaccctaatctcctccgaagcgaacgacatcagcgaaaaagaggccaagaagaccatagcgtgtgagcatgtggagcgggctctacgtgacctcgggtttggcgattacgtcccggatgtccttgcagttgcggaggagcacaaggagcagttgaaggtatgctttctttccccaggaatatgagacatttggggtgacttctaactgtgtctgcagtcgcgggaaaagaagcagagcaagatggagcagagcgggttgtcagaggaggagctgcttcgtcagcagcaggagctgttccgctcggcgacggagaagtatcatgctgcgccggagggtactgagtgaaggaatatggtttattcatgcagatcgtatacctaatgagggctcgtgctggtcatgacggacggagtttatacttaaagggttatggagttataggcttctatcatagtacacttgagggaaatatatttatgtcggtctcattaacccaaatcaccaatcgtgtatgttcccgtcccgggtttcatcttcattcaattcatgtagacttcaagggtaatatttcgatatattttgcttttgggcgaccccctggagagctccatagcagactgcacgaacaagtattagagattttgatttcgacagcagattccattagcacgaagagcacagttgtatacatatggaacaacattggaggtagagattaaggtcagatacaatgtcgtttcttacctgaaccgcactaaccgcatttggcgtcccgaacttcagcgcgcaatcgcagcaaacaccgcggaacttcaagactatcattgaaagcacagcctacccaaactaaaaatgccaccttttaaggatgagcatatcttggtatgctccctagatatttactgttttagtaggcgggagaaatgctaattctgccagatgattgcgccaggatcgcaagtgaccctggcgcaactcggcctccccgagtcgttcacacctgctcgatggcgcttcccgacgcgaatgttcccgggtgaaaagaagggcgaattcgaaccgtacaagatccgcgagaggcgacaagaagttaaaattgccaatggctcgaccgcccctggggagaaggaagacgtcgacatgaaagaccagcctccgcaagaagaaaggaaggagaatacagacgcgccgaagacggaaaaaaccgacgagaccaaggcagaaaacaccaataacaccgagaacaccgagaacacgggtgaagaagggggtgaggatggtgagaacggccagatcgtagaggaggttttctacgaagaagacgtcgcgtctgaagaaggggcgatctaccctatcgagaacggacgcatcgttgactggccgtgctttttcgctctcttgacgcatgtgtataacacgctcagcccgccattccatacgcctatcatgcttattgccgaaccggcttggtcattacgggatcgggagattatcactcaatttgtgtttgagaagttcaagacgcctgctttttgtctgacggactcagcgattaccgtgctcctacggatacggcgtcggcactgcaactgttgttgatgttgggaagaacaaggtggacgtcaccgcggttccaggctttgtggtcaaagaacatgga

SEQ ID NO: 1916 - DNA, 3107 bp, Emericella nidulans
cacaatgtatatgttatgacgggttatgttgtactaatggccattggtaaatacgcttagtgtcaataattaactgatacgatccttactacttgttcataattgcccacggagaagattagacttctgtacacgatagagtacaagtggtatatttgtgcaaggattgattcgaaactgccttgaaatcgtttcctgggctttgacgccctatgagctaaacaaagttctccgcttaacgagtctacacttgaatccaactggcgccagggtctcacttgttctttattatttttgagattcgcgctgggacaaatatagccttgatccataaacttgatttttcccgtatttgaaaaactgtatagaacagtgataaagtcacggacttaggcctgtgagacttcgtacaaattttctacatgttttaggaactgcatacagactaatcaagcacaagtcgatgcctgacagacagccgatatctatgaaatagatctgacttaggtatatggtctctgagaacccccttcgtgcgcccggtcagcaccatgtccaatgactataaggagattcacgttttctcagcgcgccataccttgtgtagtctatattctcgcataaagaaatttttggtgttgacaaagtcttacagaacgcacagaactctctatagtaggaagtagatggcttcgcggatacttgaaactctgccaaacacctacctaccggcttctatccatctagcaagcacagttgttgattatttccccattccgacacatctctacgcctgcattccctcccaaaatagtgaggtgaaactcaccctcaactgctggctcatcagcaccgaagatctccatcaatccgcacacaaataaaaaaaaggttgttgcaggatattcttgacgccattggtaattgactcatatttattcttgtcgagttatagatttgaatcgaacatagtgtggatatttgcggtctacgtccagtacggaaatactctcctaagtccaatatcccttctctagctataattctcagactgccgaatgcttctacgcaaattcagttacctcaaaaccaactctctcctcacctctttgaacgagcaattttttacactcatcccaacgtcatcatctccttgtcgtacccagtaacagcctccatacccacttatcaatcctttcaaaccactcccatgccaaaaaccctacatgcacaaaatccgcaaagtccagttcctgcacctcaaagtatacacttccccttgttgtttgttgtaacaaggcaacaactggctcatagcctcagccatatccctggaggtcctcttgtacctcaatctcactagacggtttcatttcctcgactgttttaccaagtttcgatccccaggtccgtacaaagtatttaccaccccggggtcgaggatagcgaggatacttgacaaaaggagcggaatgttcttttgtatcacagtggacatggcgtcattgacctgatcgcgagattgtggctttttgcgcctgctgggaagatggagggtccggggaagacttttcaaagttctgggcgatagggagagaacctatcaatgcgccatgcggattccttgtctgataccagcgacggatgcattatcacgggcagtgccggggggctcggtttgctgatgccgcttggtgcggctggaccgccaggaaagagaagagagtcgcgatgtatgggtacgaggtgtatgatcgtatgatcgcatgtatgggaagtgcttgtaatgtaggactggcggaacttggtgctgttcgccgatcaagatgttgaaggctgggggagcgcagaggcgaggtcgaagaggtgaaccgtcgtcgtgcttgatgtagtcattttgataggcgatttgaaaggcgagatcttggtcagaatggtaggacagattaaaattcttgaaatccgtttccagcgggcgaaccaagcgctgccgccgaacattcttatgtagtgtagcatggtctgacctggctattcatttataaccctgaaaaattcgtcgtattatccatcatataatagctccaagtacgcgcttaagattctatcaatggacaaatctccgccgtggttagtagatcggatagtctattctcccgttaatacaacagctcttcacccagaaggtcaaccaacttccttcttaattaaacacaagccttatagctgctatcaccttgcttgtactcatcaaagtgtctgttgcatattgagcgccagcactcggtccactcgttcaccttttgagtctttccctgggccattcttttggcaggagtgcacgtttgatatatggttaaatacattcatgttcaacatatccatactagtctcggtcgtatctcataaggacaagttaggcttcctaagaatatgaacgctggaactttatgataattcacgcttcgcggccgtccccaagaggcttctagcaggcagctctgtgaccgtccgctcatggcagtcaatagcctcatccacttgtaattgggtaaagtttgccaattactcggaagataagtagtttctttcaccgctgcaacgggattaggtattatccctaaagacaacataatcgacagattcgcaatgaagctagaacctaagaccatgtatcactacatgaggaaccatttttataatacatttcaatgtaatagaatttttccaactgtactggcggttctattggtgctaagctcgcggttctgaacttgagtgtatgtcgtagctgcaaggtgcctgcgcttggactaccctgcagggaacagaatcaattctatgagtgttgattcgtatgcatatacctatatttgcgaaatatatcctaactcaattccccatctctttgcaattgtaattagtccttcgtttgtccgtgtcctgtgcctgcgccatggggcggttccaagattgttaagaagccaagaggttctttatatatttatcaacgcgttccagcccaaaccgctggttctgccgcaacaaactgaacaagttataaaaagccatataatagcctacaatttacctctagagataaccaa

SEQ ID NO: 1917 - DNA, 2529 bp, Emericella nidulans
aaggcatatgtgcggcaggccttatagttatacgtcgtaacgatcactaggccacctgagtctctggacaagtcaacccgaaggataggacttagctctcttcgccctgtgccgcaggatcgagcatctgcgccatctccggccacgcctgataaaagattggtcgatgcccccggcaagtcagcaagggctttttttgtaagtaaaaaatccagggtttcccgagctaggaccgtcaggatctaaatgggtagacttcagaaggctgtgcaattcggttcccacataattttcattcgccttcacagaaggctaaggccattcatagagaagtgagtattgggtccgacttggcctgctatttgccatgatgcgcagacatatgtggcgcaaataacctgctccggaggagatacccctccgagggctgcgtgtcgaattgtctgactctcgagatgattccttccggtctctggcaatacaaagaccgagagaagcagggatatcttggggttgtagtgaagaatagattgaacccaactggggaggtcatgaagcctgactcagtcgcatccaagtcgggttagccctagacattggacctagatcattcaatatccttttatcgcgtccgacctcattactgcggtcaaacccagcctatttatcgactcgccttggtctcatttgccggatgcggcattactttggagggaatgagggattgtcctatgctgaaacggctctctggcagtagttctgagcgaaataagtctggcatctctttgacgccaccacctctgcacgtcaatggccagtatccctgtgacattgagagtgatttctgtagaagctgcaaggatcagtaatgtatggccacgacgctaaacatggatttgcctcccctgtaagagcctaaccaaaaggatggagtgtgtccgccattcccacgcagtttttgtgtcgatagcgtatcggtaagacattcccgaatcctcaaattttctagtttgcagtcgaggcttgcattggcggacagaagcatggtgtagctgcgcggacgacgcgttcctgacatcgacaatcgagcatgatccatccctgagtatgaggcgaggaaggctgcccattccccgcaatcccagggattgacgtttctcagacggcccttacttattctatcacatccccactatatggactctcacgatgcggagtcccacttgtttaacatctcttttaatctgtgttgtttgtccacaagaacacctgccgttacaatggcgactcccggcctcgatgttatcatgagctggacgccaaactatgaccatcctcatgagcccctggatgccgtcatatacggtgtcaacatcccactgatggttctaatgaccatattcgttgcgggcaggtttctatcgcggacattccttgtgcgcaacgcgcttggagtagatgactggatgatgcttgttgcctatgttggtgccagtgctggctttggacgtacatcgtgagctaactcttgctaaagatactggcaatgggtctgtcggcgtgtcagctagtcgagcccaggtatggtattggccgccacttgtatgacgtgagatatgattggtaccctgcactggggaaaaaaaggctctagagcccgagtgaacaattcaggtattaaccactgtgaagttgacaatcgcaatccaagcactgtttgcgccttgttctgcaataacgaagatatcgatatgtttgacataccttcgccttttcccgtcaaagacaaacagatggttcaactatatttcgatggtcattctggcgggatttggaatttcaacgaccgcaactatgcttttgcaatgcatgtgggtagtgcttgccatgccgtgacaccgtacgctgacgcaagcagaccgttgtccgatctctgggcagtcttcaagccgatgtcgcagaaacaatgcatcgaatcagaaaaattttacattgctgttgctgccatcaacagtataaccgatttcatggtttacctttggccgattcactacctctggaaagtaaaacttagcttggcgaagagagcaggtctaatcatctgtttcggcgtcggcgtcctgtaagaaagagacgactcttcccaatccattgatactgctaattccaatcaaggatttgtattgcgggtgtggttcgcattacctggcaggtcaagttcgccaattcgtgggaccaaacatgtgagttctcttcggcaatgagcctcatttgtgcacttattgatgtaactgtctagacaacggagccatcatctttgttattgtagcggtggagtgcaatcttggtgtcgtctgcgggtgtcttccaggggtcaggccgctgatgtccaagatcttcccaagtttgaccagctcaacttacaactcgggtcgaggcaagaacagtcacgttcaggtcagctttaacaatagacccggggggggataccacgacctgcattcgattcacgttagggaagaagtggac

SEQ ID NO: 1918 - DNA, 2503 bp, Emericella nidulans
  unsure (1)..(2503): unsure at all n locations
acgttgcaatatcttccctacagctgccacatttccacgttctctctttcgttcagacgcagctgctgccatatctttggatgcattctgcgcagcggatgccttcgccgcttgcctcgatgccacatttgcagcctgtttgcttgccgctttcacagcctccttcgtggatttgtcgcttcttgacttcttctccgtcttctcagcgttagccggcgagacttccttgtcaggtcgttggagaagctttttcgattgaaccttttcggatttagcttctctctctgatctctgtcttgatgatttgctcgcggcttctttagctttggttgcctttttctccttgatatactgtactagnggcgtggatggtactgtctactttttgacttctccctcggcagaagttttcgcgagggtaggttttgtaatggggtgagtgagactcttgagaaaatggataaattctgggtcctggtcaatggttcccaatcgagcatctttgcgaacacgacttccaggtattttggcgtacggtgcaaactccagatttggtgggcctaggagtaccgggtcgttcgcggtgttacgggcatccaagaatgatgtgctcctcaccttatcggagagaggggcaatgtgttcgcttgaaacgacgtagaggtatgctcgggaaggccgggagggtttagcaggactgtggttcccatgactgttagctacaacatttatggattagaaagtaggaactcactctttcgagacctttccaggcttatactgagcccagctcactctgcccgctccaagtttccattccgcgcccagcgcagtttcaaactcctcctgagttaggcctggaggtaaacgccgcacgagcagcttcagccgcggggctactggtttcggagccttcttaggtgctggtgcattcttttgagtcgcagacgcaggaatttgaaggacgccgccgcttgatttggacaggatctgagtcatgacggtttagaatcaaatgttactttgacccaaactccgatgggagcgttgaatccaagcagccgcagaggtcggctacggaggtatcgccagaaaagcactttctcaggctagaagtagaggatggcactagggcacaaagtagcaaaactgagcccttcagatgaccctcgattggaaaaggtgcgctgctgaaactccccgctgaccagacgacactgcttaaaggatccacgcacgtgactgcgaatcggcgataaccagcagggctctgcggggaagggagagagcacgtttatgtgtgcatcggctatgctgccaatttgagcttgattttgcctcttcaacctcgtcgtcccttgtacaaattttcactttctctgattcctatcatttttgccatgactgatagcaaggtccctcagccgggcccagcgaagctcaagcgcaatgcaggaccggacgagtggttagaggcagccaaggactgcaaatacctctcggagtcacatatgaagcagttatgtgagattgtgaaagagtatatgatggaaggtgcgttctgcgcgagctagctgaaactattttcagatgctgagatctgtgcgtctgcctagagtccaatattcagccagtatcgacccccgtcaccgtctgcggagatattcacggacaattctacgacctcttagaactatttcgcgtctccggtggtatgccagacgcgtcgctagctgaacctccgaagacttcttctgctgtgattacatcggacgacattgaaccgcccaccacgataacagatccagagttgagaaagaagttggggaagccagggacagcaggagatgatgatgatgacgatgatgataataatgagaatgctggtcaaaaagaaaagtcttcgagttcagggacttcggaaatagctgtcaaccgcaacttcgtgttcctcggcgactatgtggatagaggatatttcagtctggagaccctgacattattattgtgtttgaaagcgaagttcgtcatccagactgtttttgatatgggtgtagctgactattgaaggtatcctgaccgggtgacgctcgttcgtggcaatcacgagtctcggcagatcacacaggtatatggtttttacgaggagtgtttgcagaagtatggaaatgcttccgtctggaaggcctgctgtcaagtgtttgattttatgaccctgggtgctattattgatggtcgggtcctgtgcgtccatggaggactaagtccagaaattaggaccctggatcaagttcgagtcgtcgccagagctcaagagattcctcacgaaggtgcattctgtgacttggtctggtcagatccagacgatgtcgagacatgggcagtcagccctcgaggagccggtaagccagcaagtatgtgcaaactgtctccagtactgatactccttaggttggctatttggtgacatggtgccgacgagttctgcatgtaacatttgacc

SEQ ID NO: 1919 - DNA, 3258 bp, Emericella nidulans
ctgaatagaaggagaccacaaaaatgaagaacaacatatataggggtttaaagggttattggggtttgttaagttttaaggcaagaaaactttgggcttattaaaataaaggatatttagataaaaattagattcccatggcttgtaacaaaagcacagcattgtagtgggcaatttataattaagggccctacatagacgtaaagaaacagattggtaatgtgaacgaaacgacccgtctggctttcaggaaatgaaagattgttgttcatgaagcaaactcaagagatatgtggtaagtccaaaaagtaccgcgattccagagcttgtcgcatcgaagcggtttcctccagttttccacacccgcaatcactgtaggcgtcacgcagtgactttggccagcatttggaatccatttccaatattcatttactgatgatgtgtttttctgcttttaacttgcttccctctatctctcctctctcgcgtttgcagagcaaaggcgttgtgcccttcatcataactgaatatacgcacctcatgggtctgaaatgtcaatgtgaggttttcatggaattggtgtgtatctcaagaacgcatggaatcacacgggataggtcttgaggactatggcgttttctcgaggtcgacttaacagaccaggtggtgttctctctctttgctctctaccctgaaatatacccgggcgtttttacaaaccacccattattcattacgtcctcatgttcatgtactgttgcattgttttctatcctatttctggcattcaaccatgattcttcgtttacttgtaaacatttggttatagatgtaatctgtaactctgcttctagttttatcgtatcaagcataacgaccagttgtcctagatctcctgggtatcaaccttagcaagccctgtagatgtagccaagttttaactggttcacgtgaactccacgagctaatcgtagccctaggaaggtagcagcggcaccctgcatcaggcaacgcccttaatttgattaccgaacatctatggagtattaccccgaggtcatagccacatacgacgttgattaaaaagcgcatgctcgcttcatcgtttttaattttccaatcgttattggaggacgaccaatcatctgccttaggcgtaggtagttgaagcccttcgcacccaacgaagcttccgtgccctgacttcgcgaagtcaagacgataatagcctagtctacctcgaatgaatgagggagattcatcccagttcttcattgattgagtatcgtgctgtttcatggcctgttttcacgccgccctgagtcatagagcaagcgtccgtgctaacgtggtacgatataagccgcactgattcgtcctcagaggtcatcaactacgtggcgcctacttggaaacctagatgaactgaatgggagggtgggaaaagatgtcgctttgtaggcttttctagccgtgtgcgcccggaagacgtttataggcaggataggaccgagggagtcagcctggataggcgagatacctatcaaggaatcagccagctactgatccatccaacccatgtctgtgacttgccgatgactcacatttaggccggcgcgggcagcatggcttaggtatgtgactagctgggtcgcccgactagtgaggtcaactagagatgttggccagggttttatcacagagcgtgaaggggtgctgtagaggcagtgagacttatcttccattatgtcaccaattttttactactagtaggtaacaactcctgaccgtgtatacctgaaggtcatgtggcattaattagggctgtacaaatgttggcctggttttgtaggcaggagacataatgatgcctgaggttacggcagtatatagaccaagatcgagttaacaacctcgatggataacataatacttcagggcggcctaggcaacgtatgcacccgacctatgggcacgaccacggctgtagggcctcattgattttatatcctatgatatgacagcttgttgggagtgttctgttctacgtaggccagcagatgtcttatcctgggtacttttgaagtcttaaacatgtaacagccgtacaattgatttgaaaaagggccaatgtatcgtcagatcgaggtcgggtcgagttgggtgcccatgggcgagaagatcttgcaatatgcagctctcccgatgtgtatggcctatcaccatttagcaaatttcattcctcatcactaccatgactatcaccactatcatcactatcattactaaagagatccgtcactaaaaaggttcatttgccacggggatactgaatttgagttgtatgtgctagcagttatgcttgatagttatgctaggcatgcttatataacgtgtattcataactccacactccacacacaccgagttggccagttcacgtccaacgcctccgtattagactccgatcttcctattacttaacacttaaatcccaattcatgacaggcgccaaacattgagctgcgcaatctgtacattctctgaccactctatctttcagatccggccaggattagaaatatgtcccgcaacgcccaagtcgaagaagtctacgactcggacccagaagaagttgctccttctctggtcccaagccacgccaaaaatgactccattctctctggcgcctcaatttctacgtcgtcgatgcccattaaacccgtgccttgaacctaagcgagaaattccaaaaatccaccaatgtctggatcctgtgtacctttgaccagacgccaaccccctcatatggcccaaaagtttggacaaacttggcagggataatcctttgggagggcatttgtgatgctgtgcataatccttggatcgcatgtggtcttagacctataatttcccctccggactggccaatcccggcgagttctgtgcatttaaggtcatgatcgttaccgttattttacaaaatataactggcttctttttgctccctcatccccatggtttacataagtccctcctattgttcccctgagccctttttttctcttgcatcacttatcctcacatctaactcttcaatcttttttctcctttcgaacccctgtccccctctcttggaattttttcctctcactccctctcttgggtgtcattacacttttcaatcacttattactccttcctacgacgttttacctttctcttcatatctctactccttcttcctacttctattac

SEQ ID NO: 1920 - DNA, 1763 bp, Emericella nidulans
gggcgcgtcaaaacccgcagcgcgggctacacaaacgagcaaaaagaagactgctaccacagcgagcaccacgaaaattctcgaggacgtgctgcggctaccactaaaactaccgtgaaatcaacggcgacgcgcaaacttaccaaagcggacgaagtcggcgccacaaagaagacagccgcgccagctaaaaagcgcagagctgatgctgaagatgctgagactagtcgctccaccaagcgggctcgcgttgtaaagcctgctgctgcaaagccgaggccaaaagttgtcatcaacaatgcgccaaccgcaaagctgaacgtctatgtttgtggtgaaggtagctctggtgagcttggtctgggcgtcggaaagaacgtcattgatgtgaagcgaccacgtctcaacccgcacctgctgccagatgatgttggtgtcgtgcaggttgctgttggcgggatgcattgcgtcgctcttacgcatgacaataaggttcttacctggggtgtcaatgaccaaggtgccctcgggagagatacgacatgggagggtggatacaaagacatggacaaccgcgactcggactcggactcggactcggactcggatgacaatcctgatctgaaccctcatgagtgcaccccaactgccattccttccagcgcttttcctcatggcaccgttattgtcgaagtagctgctggtgacagctcaagtttcgccctcactgacgagggccaagtttatggctggggaacatttagagtacgtcatgttctcgcgagtattgaagacactgttaactttcccttagagcaacgatggtattctcggattcgacgccaagacaaaggttcaaactactccgaagttattgccggaccttaaaaaaataaagcacctggtatgcggagataaccatgtcctcgctctcaacgacaaaggtgctgttctgtcgtggggctcgggccagcaaaaccaactaggtcgccgtatcatcgagcgaaacaaactgaacgggcttcagccacgggaatttggtcttcccaaaggtatcgttcatattggtgctggcgctttccactcctttgccgtacaccagtccggcaaggttttcgcctggggcttgaacagctttggagagacgggaattcgtgaaaatgcgggcgatagtgaggctgccatcgtccaccccaccgtggtggactctttgtcaaagaagaacgtcacgcaaatctgcggtggtgcacaccactccatagctgccacccaggatggcgaatgtctagtctggggtcgactagatggatatcaaacaggcttaaaaattgatactctcccagacgatgcggtcatcaaggacgagcgtgaccgtcctcgtatcctcatcgagcctacggctgtccccgggataaaagccaaggctgttgcggcgggttccgatcactcaattgcaattgatactagcggccgtccctggtcttggggcttctctgctacttatcaaaccggccaaggcacacaagatgatgtggaggtcgcaactgtcattgagaatacagccgttcggggcaaaagtctcaattgggctggtggtggtggtcagttctcagtctttaccgaaccagttgagttgtgaaccacttagaggtagttttgagagttgcttcgtaaagattgtgggctatctgtctcaaggatggccttggaatatcgggctgatcttctaaaatgtgtttacaggacattgggtatgctgtttt

SEQ ID NO: 1921 - DNA, 3558 bp, Emericella nidulans
  unsure (1)..(3558): unsure at all n locations
cgtctaagatcaagcctttccgcgggaatacaatgtatcctagccctccgcatctaaagctgagtatcaggtaggccagatgccatgggccgaattctcgcttggtcaattggagaagtagcgacgtcttcgtgacgctcgttaacaggctatggttgtattggtgttttcgggctggcagtacaatatggctgcctggtagccttagcggcgataggccgtcttctaggctgcaacggaacggtggggaacggcggtcccctcaacagaataggccatgttatcgtggacggcgttgactggatgagtaggccaaggtcagctcagtaaaaacaaaaaaataaggaaaaataaaagggaatttactttaatcatatttgacgactctagccagattcagtcattgtagtgaccatagaacctagcctatccaactctaggtacgcacagcaagtatctacttcctcttccatttaagagaccccgacatctcctgccagaagctcaccgatggctcaaccacactgagctcctcctcgtacagatcaatctcaggcgcctcccagatcagatctgtctcaagcggtgtgacaaatctggtccgtttcaccaatttccagcccagaaacaggaccggcgcaagaaggaccatcgtgtagttggtgaagaaggtctctacactccagggggtgaaactctcgtagccgaaacagcagaccacggtaaacatccacgcaaagccgaggtagccgcagtacggctggaaccaaccagtgtaagggagcgtggagcggtcgaatccttgggcaacagtcgcacggtagaagaagatgtacgtaagggtgatgatgacgtagttgataagaccggcagccgtgatgatgtttgtgagccaggtgaggaccgtggaggaactgtcgcccatttggaggaaggacaaaaacgggaagatcattacaacaaggaagcagtagatagggacgccctgcttggtacacttgcggaggatgcgtggggctcggccttctagggctagggaatgcaggatacgggtcgctgtataggtgtaggtgtttccggcgctgaaaatggaggtgatcaggagggcgttgacgacatgcggtaggccttcgatagacatgtttttcatggctattacatagggcgaggcggcggcggtgccggagccttcaccgtcaccgaaatggatggcgcgtagggtgggatccgcataggagacgacaataccgcagcaaagggccgagcctatgaagaacacaatgaatcggaaatacacggtctggaaggccgctctaatgtatctgcgagggtgtttggcctccgctgccaccatggagatatactcgggtccgacgcaggcaaacccggcagaccagaggcaggcgaggaaaccctcaaaacgaccaaggttaccgtggctgaggtattcggcgaatgcgccgggcttgttccagttcctaaacccgtatacgtcgtgctgcgggttcccgccgaccatggtgacgaacgtaaacgcgaagagcatgaggatgaggatcacttttccgccggagagccagaactcggcttctccgtatgcccggacggcgaggatattcaaaagcctagccggtcagtctttcgtgagggactaccgcagggaccgtgcaaacgtacccatagattataacacatgctaaacaaatactccacacgggaatatcgtccctccagtaggtcaagaccacattgatggccgtaatctcgaacgggatcagcagcgcctcgtacaagaagaagttccagccagccatgaaaccccaggcatcatcgacccatttaccggccaagcggataaaccctccctcgaccggctggtatacggacatctccgtcaggcagttattgaccatcgccagaaaacagcagtggatgaaccaagagatcagaagagatcctgaaccgcccttggccaggccgccgccgatagagacgaaggtcgccgtaccgattgagcctccaatggcgattaattggatctggcggtttcccagtcgacgctgcaggccagagcccgttgcgaggatgggctcagcccgtacttctgagccatcgttagtgttactcttttcgaggtctggttttggattcatcgtgacagtcttgagaggcgtgaaaagcaagaaaaaaaaagggccaaaaaaaaaaagagaagagcgagggagggttgatttaaaagagacggtgctataggttacatcttctgggcatgaaattattgtcccgctctgaggatgggctgggataggacgaggactgcgctgaccagagattcacttctccgtcctgggcgagcaccactaggagcagaatgatgggctgggggcttgccgcaatggggataagcgggggactggcgccgtttggcatgactggggcactcgccaggaacaaatgggaggcccccatctgcttgtggcttagcgcgcctcgtgggcggcagcttggcgtccatgccatgatcttacagaggatgcaacgcatcttgaaattctgcgctaaagcagccgagcggtgtccgatcggcctcctattactcgtcaatacggtaccggtaccgagtaccggtggcactactgattgaaaaggtaaaatttcccaggacgaccggttaccaccaggatactggacacgcatgcccctttcgtgcttcttatcaactggaacagtatgctaaaccccataagcgagtgagtttgcgagtaagcaagtccgcgagtctatcagcgttatctcgcagacggattttcgttgcaaaacctagctttcttatcgctcctcgcagctcagaaatcgcgcaaatcgcgcattgaatgcagcctcgtattcagttcgcatggtagcatctcttttttgcttcttcattttttttcctcttttacttttctttttcgttttccctcttgttaatttaatttatttcgcacttttgtcccagacttgtgttagctgcgcgaagccaccgaagccacagatgacgtcggtggctcggcgcccgctttcccgtcacgagattcgatcaacgctgctctcgtgttaggggaccctagggcctgtcagccgcgcaagacgaacaggatcatgaacgatgcattagatgcgaaccgacggctctccacccttgacagaccaatatctccgcccctaacccgtcccctcactcgtacgggcaacgactcgctgtccgccctcgaagcggggaaagaggaggtcgacgaccccttggagcgaatctccgcacacctccacaaattcaccccagaccgagccgctacgcctcccgtggccggcggatcgtgcctgatcccattcgatgcctggaaatcgctctacacacgaaactgtcatgcatcaggaaccattttgtcattcacaacacgaccattcattgncggcccgactatgacttcgctacagatgncgcattcagttcgtcagctgagtggcatgtatgattgcccgggcccgatagtcgcgctgatcgaatgcgaccgaaca

SEQ ID NO: 1922 - DNA, 5150 bp, Emericella nidulans
aaccggcgaactcatctcaaagacacggggttaaagcggttatataggttttgcagcttctcacgaatgcattaatgggagacgtccgcctggcgcaaaaggaccaaaccagaaaatcatttacctgggatcgctacgaaatcagcagtctgaaggcaccgcgtccatatttttgtgccgtggggtctgggcctcgttgatcggcagtacaaaggaggagaacgggtatatataccatctactcgacaagaagtggaatggccgcaggagtgctgttttcaagcgtatgcggaagggtgataaacgtaagtagctgaaccccgtaccacatactcttgggctgacgcttcgaaggctcttgtcaccagttgctcgcgatgtcatgagcgtcatttgacaatatataatattgccatgccgcactcagattgccgagtcatacggctgatcgaccctataacgggcatcaatcggctccgtcacaatccaattaggctgatagattatttgataatgaattgcgaaaatcatcgacgaaatcattcgctatgttctctctctgccctgaatgtatccgaccagtgtattcccagacaacagccgcagccgatatatcaccacctacgagcattcaagaaaagggcaaacactcttattcgagtccgatatagtagcatgcagagctctaagaagtgcgaaagccagataagtgctatccccggtctccgacgccggcgccgaacccgagtccgggcccgcggacatcgaggccctgggacggcaatagtgcccgaataaaccccgaccagatcaccaggtgccagcattctacatatacataagcacgcagctcctttcctcactgaaattcattctatttcgctaagtaacttgaaacagcaatagcgaaatggtctccgaaacactcgaattctacacaaaagccctgggcgctatgtcgtccctgggcatcgcccgcgccagccaaaaactccagtctataccacaccacttcacataccaaacgacccctaatcccaaaaatgtcgtcattattggcggctcatatgccgggactcgacttgctcagcgtctcacagaaaccttaccgacggggtaccgcgcggtgctcattgaacgaaactcccacttcaaccacttctttgtgtttccgcgattcagtgtagtcaaggggaaagaggagaaggctttcattccttatgataatctggcgaagtccgcgccggcgggaattttcgagcatatccgggacaccgcgacagaaatcacaccgaaaactgtgaagctttcatcgggtgtcgaggtcgagtacgagtacctcaccctcgcgacggggtcatggcagccggcgccgagtaaatacgatgttttgacgaagactgaaggcgtcaacgcgttccgcgcgacgcagagggctgtagaagctgcgaataccattgccgttgttggcggtgggccggtgggcgtgcaaattgcgactgatatcaagagctattacccggcgaaggagataacactggttcactcaagagagaaggtgcttagtgcgttcggaccgaggctgcaaggggctgttatggatgcgctgaggaagatgggggtgggaatggtgatgggggagaggccggttatcaagaaagatgcaccagacggagccggggctggtatggtcggaccgggaagtcttacattcaaggatggaacgcaaaagtcgtacgatcttgtggtgagtatgcgccttgccccttgttatatacgttagactgatatgtatagctcccctgcaccggccagcggcccaactcgagcatcctcgcccatctcgcaccaggagcaatcgacccgcaaacgcggcagattctcgtgcacccaacgctccaaatcaatgatggctctacatccagctccgataaagaggtcaccatctctgagcggattttctccctcggcgatgtcgctaaaacaggcggcccgcgcttcgcccgtgccgctcgcgcacaggctgagattgtcacctccaatatcctgcacttgatcagggggcaaaaggacaagctgagcgagtaccatccggcaatgtacgagggggcgattaagctaaccctggggaaggtaggcgtggcacataagcccagcacttgttccggatggattccagtatgctaatgtttgatttcgcagtccgactaccttttctgcgggagaatgcctgacggtcgggagattgtgaagtttggcaagacgcagccgcagaatgagaatttcgaggtgcagtcggcctgggaggaactaggggctcgggaggactctgcagaaacggggttagctgctaggacagagaagttagagaagcacaaggagaagttcagtgcgtgctgggggcaagggtggggacagggctgggagaagaatcgcgaccagcagctgccgtggcagaggagggatgcatagatgactgtcatcaagggtggttgaccatgtccattaaccgatgaatatcattcaccttccgctattagagttctgagcacgagttccagccgtactggcctcgtttcaagtatatcgacccgatgatcgagtcttttgaatgattttgccggaatatggcgagtataattcatagcagtataaaggagttaaatgcagaaagtctgtattcgttatatttgtcacctggcagcagattggatcccgggatatacaaaaagaattgatattgatatatttactactgtccttgtaagaccgggtcaatggagaccagtttaaacctagtaccctatgtgtagcccaatctttatgacgtacaatctagactatgttgcctttatatcgattgttaagaacattcatttacattgagaagccgtcccatgctcagtcacagaacttgcggtatcattggcgtagtgactcattgctacgggtacaaagccctaaccgtcgatataccgatacccaatgccaatctatatatgacaaagtccaccattctatggcccgatctccggcattataggcgttaagcttagttacttctggcaggatgttaaggtattcctttgtatcaattcgacctattattccactgcttcaaggctcctagctgaacggtaacctcacatcattgagcttgggccagatctgccggagcgatgactatcccgagttacgagggctgaacacgaacataaataacttctgtgagttgtgcaactacaagtacattgggaggcacataggatactttggtcattaaggacagtcaatgtggaaatagtggctccgtgccaaacctacagctgcagagaagggagcacttacgagagtcgcgccaccactacagctcattatacctcgcaatcacaacgccaaaatgccctgttggcagctagggccacatcaacgatttcgactgcgttgacaaagtcgatgccggccatgcgcttgtgttgtaagcacatctttttgccagggaggcaagcttgaacggagttttgatcgtatatataaccactaggcttgatggtgaaggagattgatgcaagatactaccagtatggcaggatcagtccagttatatgcatacccttgtctaggtctctagggtgccgatgtcagcagcagattctcggtaaggctcgccctgctgtttatcttcccacatgctcagagtagttccaataaggcttagtatacgcactcaaacgatcatccgcattacacaagagccattggcgaaacagtcttcctcaagcaaagatgtaccccaggacaatatagtcttgcggaatggctagcatatataacccatgcggcttgacgacgcattatgtagcaaaggcacaagaataataatagatactatcactgttgtcgagcaaatagcctatcgattcgaggatagccagaataggctggggacaccgggagtacgggtacagcactgttttgctatatcctagactacaaccgaaaggatccacccttgcctttcggtttttaagtttatttattgaatcattaatcatttagtcaatctaatttattttaataatttattatatcgaacttaattctttactaatatattgtgttaatgcacaagagtataaaacatagaccactcccagtcttacgggtgccacaccagcaagtgccatatatctactcctgtttgtacatgacaaaaccacaatgccattgaaaccagtcccctatttgtttgctgaagctatctgtctcaagaaggcccagtattgccgatttgcagatacgcacaattggaccggtttccggggcatcttcctgaccagcataaaggccaccttccataaccccgacggctcgatcgtggtcgagaacaatgttccgttctcctttgactcgtctttattaagttcttcgccagcgcattcgagacgctgcaaacaatccataatgtcgggccgggagagttggagtttgccgatgctgccgcggggaatgaggatgtagggtgtagtgtttggccggtgactttttgaagctaatagctcattagtttaccttttggctagttctttcttcaatagttaaatttttgtagtcttcaagaagttcttactgatatattcatattattgtttctcacttttgattatttatttctatagtctattctcacttttatactcctcatttcttttactctgtatttcttattaaatcttatttaatcttagcacttatccttgtaataactactactctctacattcttatcatattcttccattacctgccttcaattacttctcctatctttattaatcttatttcctatttctatctttaatatcttcttctctatttatgtattatcttttttccttttcctcttatttttcttatctatattttttctgaactttatcattctatgtatcttcatccttattctacttttcactctttttttttcaatatctatttattttttattttcctcttttctcatctacttatctttctacttatatttgttctctctcattaatctatattttactttctttttttttttccacattcatatatctaccaatctatttttctttcatcctataattccatatctttcttct

SEQ ID NO: 1923 - DNA, 779 bp, Emericella nidulans
aaagaaggaagggtctagcagctaacattggagagtcagcccacagtcactaagctatggcacgaaggatgaaggctaaactgtgtatggcagactattgttctttgggaaggatatggggaaggaataagcactagaatagaatactctgaatgtcggggttcaaccgctagagtgtggagaccataagcctcagccctaagtgagaatatccgagcacgaccaatcacacccttctctatacgaggtgggcataatgatgataccaaaaataaacaccctccggacgacagcatgagtacgagccagacgcggctgagcaaggatagcagcggctgagccgcgctctcatagggccacgaccgcgataatccagagctaagatagcgacgtttcctggatgccagtgcacaattcggcgctgcactctgactgcacagctctgcagcggtggataagtataaactggcctctattggctgttcttgttggtaagactgcaggactaccgttgggagcggtccccataaggctgatggtactgcctgtcggtagacacgtgaaggggtttattcagtgctggtaattaggcttagctctaatcaaaaagcatgtagtagtttaagaaaaccttaatcgactctatccagtgcacctcatcattccccgtttaggcaattcttgatagatcatcatctcgtcaccgggcagcaccacgtagccccattacccactccagctagccatgggggctttaggtcatgctgctgccagatgat

SEQ ID NO: 1924 - DNA, 3134 bp, Emericella nidulans
aaaaaaaaaagaaagaaagaaaggtacgatagctatcgaaggctccttgccttgtctaggcctggttacgcaagtcacggcagtcacctggctttaggacaggaggacgactctgtccgcctacgtccctatttatccgacacctccctcacaatggaccccagtgttcctatccgattgaaagctctcctcctcgacttcacgtacttccgtacttccgtactcgacgtactttagcgttcctcgctgtcgaatttcgacgatcgccggtctatcttcactttccagtcttcgtccaagcgacggctgcaacttctaccagtaagcctgccattgcgattgagacggacgattgagacgagcgctagacgtgcaagacccatgtccgtacgatcatcagactaatcagaccactgagagtacttgaagagaggctgacaggcgacagtatccagtagagtgtccagtacagagtccagtcgtagctctgcgcatccagcttccccactttttccccgctgtggccggcctgcttgattcggaccgtaaccgtcgctgtgttcctggagagtctcgcttggagtacgagggacggagtattatcgcccagactcccctcgcgccacggtgcttgcgcaagcatataaagagcccagtcctggtctctcgagaacagtctcccatccgcaagctgtgatcgcgcccgtctcgtgctaccccaccatcccactcctaccatcctaccatcgcactgaactcgacgtcatacgcggaatccccagccgctgatcctgccacggttcgccatggcgcagagtgagttctcctctttgctgcattgcccgatcggttttgttccccagtctgcctgtcacccccacatcatgtctccatgatcatcgtcgcatcgtcgtgtcagatcgagggtcctccacaatcggatcgtgcgctaacggtccctagcaaaacacttcttctcagaccccacccatctggttcacacggcgctcaattcgctgacgctcactaacccgtcactcgcgttcgaccgcgagaataagatcatcttccgtcgtcccgatgtcgtgaggaaggggaaagtcgccatcatatcgggtggagggtctggtcacgaacccgcgttcgcggggttcgtcggccagggtctcctggatgcatcggcggcaggcaccatctttgcgtctccgaacgcagagcagattcgtatcgctgcaatggagcgtgttaacaatgaacaaggagtgctcatcattcctatgaactacaccggcgacgtcctcaatttcggtatggccgcggagaagtcgcgcgctgccggaatcaagaccgagttcttcgccatcaatgacgatgccggtgttggcaaaaccaagggcggcaaggttggtcgccgcggtattggaggcggtgtcctgatcctgaagatcgtcggcgcgctggcagaggctgggtaagttgtctcgttactcggaactgatgaaatcctgacaagttgtagtggctcgcttgaagaggtctacaagaccgctcagttggcaaatgagaatcttgcctcggtcggctcatcattggagcacgtccatgttcctggtcgagagccatcggatgaccacatcccagagggcgaggttgagatcggcatgggtatccataacgagccaggatctacccgcaccaagactactctcgtcgatctagttgcgacgatgctcctccagatcctggaccacaacgaccctgaccgatcatatatcacgcattcgccaggggacaaatttgtgctgctggttaacaaccttggtgggctcagcactctcgagctgtccggtatcaccgatgaggtctaccgccagctcggtaaatcgtatcagatcaagcccgagcgagttatccagggcaccttcctcaccagtctgaatggactcgggttcagcatctcactgctcaagctggcagacaccgggctgggccccggcaagtcgttccttgagctcctcgacgctcccgctgaggcggtcggctggtccgcgcctatcaagcctgcgacgtgggaataccgcaatgcccccggaattgaagtcaagagagccaagccagccgagcagcctcccagcaacgtcaagcgtacgtcccgtgcctccctttattgacacgtgctaacagtacacagtggatatcgcaaaggttcgcaaagtcctcggggccgctcttaagcgcatgatcgatgcggagccccagatcacccgctacgacaccatcgtcggcgacggcgactgcggcgtcgggctcaagcgcggcgcccaggctgttctcgacctcctcaacgacgcctctgcaaacctcaacgacgatatcgtccacacagttaatcgcatcgtcaccgtcgttgaaaacactatggacggcacctctggcgccatctacgccatcttccttaatgcccttgtccacggcctccgtgagcaagacaagggtaccgaaacgcctgctgataccgacgtctggggcactgcgttgaaatactctatctccgcgcttgggaagtacacccctgcccaggtcggtgaccgtaccatgattgacgccctcgtaccgtttgcgcaaactctagcggacaagcgggatgtgcatgctgctgccaaggccgcggaggagggcaccgaggccacaaagcacatgaaggcgtcgctggggcgggcggtgtatgttggaggcgagcaggaatgggttggcaaggtgccggatccaggcgcctacgggctcagtgagttctttactgggctggcgggcgctctatagcggcactatcactttatgggcactggccactggcatgtggttctacgtatatatctatatgtaattattcctgcttagcgggttgctctagtataatataatgatgacatgaagtataacgtctgcttaccagataatatcttgtctctctagggatcggctcactgtgtctttagccagtacttcccctgcttgtgggatttcctaattgtccattaggcagctagcggcgcttattcctgccgtattcaattatcgcggccgcagcctccaacatccgtttcagaaggctgaacggttttcaagggcttcag

SEQ ID NO: 1925 - DNA, 3002 bp, Emericella nidulans
cctggaatggcaggccatattcggtggctttccttgattatggcattctaggtcaccgagcactgttagcgacatatattcagtgtggcgcatgactatcgcaggtggagaaaacgtaccagatacggaagctcacccagtttcctcggatcgatatccgtactttttgcctgtcgtctcattgcttcatcaagctcctttcttaatttccgcaaaatctcaggactcttgagaacatgatatagagccgtaactagcgtcccacccgtggtgtccacgccggcatcgataaacgcgaaagcctcttcggctaggtagtctaatgtaggtggtttcccggtattttcaagccgatgaaaaatcaggagctcagcgacggacgcttctgttctacgggccatttcttttgtgggagtgttgaggagaggccgtgtgtggtctttgcatatctatactgttgctcagtgtctacccgcgaacgtatattgatcaggattaccttcttgaagcctgctactgctgaaggagtgaggtagttaacaacagatgatggtagaagcgagtttaatgtagcgaggtatgggaaaaatcggactaacgagaaatgttaggcgatatatgcaacaacaggggaattactgcctggaggcggaaaacgcacgagtaggaatcaaggcagaaagcccatcaatgtcctcaagcatatccagctttctagcctcgtaattaacccagtcgccgcaatctccaagaaacacgtccgccacccagtttatctattcacgataattctcccttttagccggcacttcgatataaactcaatcagaacagaaattgaagtcaacgaaccgcaacagcccgaaacaaatccgtaatgttgcacccctctccctttctcgactgtttcaccataaactgcaccaaatcctgcaatctagcttgaatttttggcgccgcaagttcggccgcctgtttcgagaacctcggagcgagcaccttccgtcgctcgcggtgatcgtcgcggtctgatagggagaagacagatccgtggttatcagcgcaggtgtagaaggattcatctttgtagaagtcggtgcccaggcggaagatactggtaaatcgctccgttgatccttcgtgatgtttcttgaagagaggtgaacttactgctcataagcttcaatattgttgatatggacgtggtttggtccgatgcggacaacgggtgagcctggaaaattttactgtataaaacagctattgacccagagaagtagaaaccgtactgtatcttttatgtagctcgggaaaagtcttgcaccactctccgtctcgccagatgttgtggtagaactcgtagaagccgaagatgcgggctgtccatgggccagggatacccaggagagggttgaagaggagtcggcgaattatcacccacgcaagaagggcaatggccagcaagggtatgtacgcaacgtaattcatccttctaagttgctactgaaaggtggtcctgtttgagagacgctatttcctgagcaattcgtatgggggttaaaacaaaccgggaaatgacttagggtgtgaatgtcaactaaccacactcatgatcatattgaaatggaggtgcatatataccgatgagaggtgtaataaacgatacgcctttcagctgcagtaacgtttggcacttgagcccgtggtcgcgtatgcatgagggaccgtcggctgggccagaagttgggcacctccgtagattttacgtatgtctacctcatttcagtaacaaaacgcagacagatcgattaaattcctgtattgcaaaatatcaaacccccatcacgtcggtgagcatgtgaaatcacattcaatattgtcccaagtcaggtacaaaacaaactgccgattacgtccaccatctgcatcaaccaaccctaccgctctacgatccatacttataacaaagatgataatcttccgtactcatcacctctctcaatgtgcgactctgatccagccatccaaacggcaactccgtatccaagttaacctcaggagttgtcggcgcattatggattgagcttgtgccattcaaggcccacctcctccttttaggatctttactctgccaaagcgtccagacccgatccacttgcgcatggtgcaggaagaaactgggatcctgcggcgctgtccaaaaatcatccattgttcgaccgagctgcatgtgcgccacagcatgcggacccatgatcccagcctttcggagttccggccagtcgctgaagtcgatattaatttgtaattccgtaattgagtgcgaattgagaagacgatcaacgtcgcgctggctggtgaacagctgggccatatgcgagttgaggtttcgggtgaaacagtgtggggagtagttgaatgcgctggcagggaattcggcgtcgccggcgaaagttagatcgggcaggttgagcgtcatgttcgcgaatggaccgtttgtgacgcaaccgccgccggaaccattggggatggtgatgttcgttgggacgagtttgaagaaggggtcttgggggatgggatcaccgtcaccggagagagaggtgggagagccatcgaagatggggctcgctgagatgttgtcggcggagagggcccagtcccagtaacttttggagttagtcgccatgcttgtagtgagaatggaattagtgtgcttacggctggtcacctcgatacccacactcctcctggagggccttctcccacaaatagacgaagtgcgatgccatccaaagaagatgccgctgaggtggatattcagggtgtaattgatgtgcgtcctgtatacgccgtcaaactgcgaacaccgtacattcagctggacagactcacgcagagaaatcgtccatacgatggcggacaccggggtactgatcccggggaagaattggaggtttgctctgcatacagtgaagagcatcaatgtaatcaaatctctcaga

SEQ ID NO: 1926 - DNA, 2864 bp, Emericella nidulans
gctgcttttcatcaaaatcacattggaaggggcgataacgatgtctatacagtgtgtcacgggtgtttcttaatgagctgaacacttatctaggtataaaacccgctatccccttttgggaccccgctcctcgtatccatgtagaggccttgactcaagcatccttacttctataaatctggaaaatgagccctcgaagttgtggatttggtcttttcagtccgtgccaaataaaaagactgtaaacaccaataaccaaatttatgtacaacggtgctcaataacaaagcacctgcatccagtggatatactcccctcgttgatattgggaccacggaaatctacgctgctctaagcgtcgaagcagtccatacactttcaaattgagttctcgaagttcgttatgacacattcaatcattgcaacctgcaaacagactcggtttcatattgatgacaaaccatcccgagaggtttgttccatacccaatttgtcaacatagagtataactcaagttttcaggttgatatagagggccttacagtcgcagtatcttcagtgccggagtctgtggaagatccctcaagaacaaaagcaaaggggaaatcgaagtctaaggccgaagcaagagagctcatttctgatgcgcacttgcgactcaaagccggcgtgcattatgggctgataggtcgcaatggcactggaaaatcgagtatgtgatttgacctcgggcgagacactagttaacgtggtgtgcatgcagcgttgttgcgggccgtggccgataaactggtaccgggcataccgcattcaacccgaatagccattctgcagcagacagatactgctagtgaagacggttatgcgcccttctatgatagaactgaagatcaaggagcaagtgagggaaagttcgttctggactatgtcatgagcagtgaccagttcaggaacgaagtcactcggaagatgaactgtaaggacacagcccttatctagatcatttctcatgagaatgcagttttgtcaaaatgtttcgagacggaagacccgctagagcctgtgagggggattcgaaggattcgccacgaagataccgagaagcagctgttcctggcccggaaaaatgccagtctaagaagtggtgcaaggggactgcaagcgcgaaaagagctgaaagccgtcgaagcaagattcgagctttcgagagagctgtaggttgtccctggatcttgcaccttctcgtaagctaagttttatagtctcgagcaggcgaaagaggatattgatgccgaaatcataaagcaagagacccaagcagcgatagaaacattgcaagatctgcaatcccaatttgaagcagtgagtagcgcctggctgacatcgaccccggggttgctgaacggtcactagatgaagcttgtcgacatagagcagcaggctagccaaattctaactggattaggattcaaagaggatgccttgagcaaaccattctcgacattgtcgggtggctggcgtatgcggtgcatgctggcgagcgtcctgattcagaaccctgacatcatgatcctggatgagccaaccaattttctagacctattaggagtgatctggctggaagaatatctgaagcagctcagagattcaacacagacgaccgtcgtcgttgtctcccacgatagggactttgtaaatgctgtctgcgaagaaattgtcatccttcgagaccaaaagctcacttattttaaagggaacctgtccgcatatgaacaggattttgaagaacagaaactatactggggccgcatgaaagaagcacaggagcgccagatagcccatatggaagcaaccgtccgtgagggcattaaagttgggaagaaaaccaacgacgaaaacaagctccgcatggccaagtcgcgacagaagaagctcgacaatagaatgggtgtccaggttaacgcacgcggagggaggttcaagctgaaccgagatctagctggctggcactcaagtgctcgggcggagattgaagtgccgcaggatgaaaagggagctctgattgccttgcctgaccctcccgagctgcgatttcccggcccgcttatatcactagaggggatcaccttcaagtataaaactgatgcatccccagtgttgaagggagttgatcttgtgatgcacttgggagatcgcgtgggtctcatgggccttaacgggtgtggaaaatcaactctgatccgtctggtggccggcatctccgtgccgactcagggaaaagtctcctcgcactcgcggctaagaatggggtactacgcccagcattctattgaggagctgaaaaccagggggctgggagaccctagcctgacggcgttagggctgatgacaaaggacgtggatggctcactcaatgaaggccagttgcgagggttgttatcgtctctaggtctccaggggaagatagtctccgacgttccgattcttcgactctctggaggacagcttgtaagaaatccgggaacagcttaagagctagtatcactgatatatgccacacaggttcgtctggccttggcgagaatcatctggaacgcaccgcatctactcgtcctcgacgagattaccacccatctcgactaccatacagtcacggccctcgcaaccgtattgtccactttcaaaggtgcaatactgctcgtttcccacgatcgattcatggttcgagctgtgattgaaggaaaacgcgacctagaccacaaactagacgatgactttgaaggcgtcgaagaggagtcagatatggagctaccacggcggcgagtcgtctacgtgatgaaagctggtactatgacggttcagga

SEQ ID NO: 1927 - DNA, 3386 bp, Emericella nidulans
cgaacattatgccacctctgcccttcaacgaatggctgcttcgcaagaactacacccgcgcctacttccgtcccaacttccagcctcccaagaccgaattcaaatccctcgaggagattaacgttcctgtccttcctcccatgacggttctggaacgtggtatggtaatttctccggccaacaaggaagatgccatgccttgcccaccgatcatcgacgtggatgtcgccgctgatcacgatattgacgagacggataagctgttgtttgggttggccacttctgcagaccgcttggaccgcttgcttccttctctgctatactcttatggaaacaccaaggccggtatcattgttctcgttccgaactccgacgacgacatcgctaagcaggagacatatttccgcaaccgcggtcttgatttgactttgatcaagtctcctctcgagttcactgctcgttacttcggtcttgtcagggccttctctgaacacatccgaacgaagcgtccccaaaccaagtgggttagcttcattgatgacgacacgttcttcctctccttgcctactatcgctcacgaattgaaccttttcgacgttaacaagaagcattatattggtgccctgtccgaggcaagctggcaggttgacacattcggccacattgcttttggaggagctggcgtgttcgtgtccaagcctttgctcgataccctcgactactactacgatgaatgccagtcatggggtgagcagcccggtgaccagaagcttggccagtgcattcagcgatttggcgatactcctctgaccctctggccgtctttgtaccagatggacatgaagggcgaggttgatggtgtgtacgaatccggtcgcaagattgaatctctccaccactggaacagttggtataccaaggacgtcgttaagatgacctctgcttctgctgcggctggccgccgctctgtcctccgccgctgggttttcgaccaggaggaaatcgtgaacaacgccaccggaaagtcaatccgaaccttctgggtcttcaccaacggatactcgcttgtcaagtacacctacgatgagaacacacctgacgatgccatcaactttgaccacgccgaaaagacctgggaagaagaccctcgcggctatgaagcgcgcctagggccccttcgccctcgcgaccaggagggtgttaccaaggacaggtggctccttcgggaatctttcgtggttggcgataatgttcatcaatggtatgtgcgtgaggaagatgagggccacagtgtgattgagattgtgtggctcggtcctaagggtggcggtggtgctggtgttagggattttgcggtcaacatccactaaataaccatgctctactgcgcgattccaaggccggaccttggaatcggggcccttcgcttcttgcacattatttacattcattgcactttctctttttgacacctcttttcttttctacctacaacgaagacggacgagatctacgaagtggcaggaaatggaaggcctcttcgaaccactaccgaagctggacgcacattttcaatcggctattactcggcgttgttctggcgaaataagacggcgcagtcggagatcgtttttcagctgttccgagctataagagcgacctttctgtgtctctgccgtttttctggggaggattgctttcaatgcacatgtaaaaatagagttttgtttccttggtcattggcgcatgtcattatccaagaatatgatgagttaagtctagatcttactgcagtcaggataccgctgctattatcactaatatgataacaaattattcaccttcttgtctttgagtaagcgagagtcgaatgtttcagccatgcgtttcacttttattgttgaagacatgccgctgacgccgttggtatttaatcgcgcacagatctctaaatgaatcatagtggaaatcgtgatgtggctgggataagtatattgatctcttaagatatagctgtcttggaacgtagggcgatattccaaaactcttctcgtatacagagactcccaacaagcatcgcagaaggatgagtgcctgcggctatgctcaaaccccatgcaagccaggagacaaccaaattcgtcaattatccccaaccgtaagccgaaaggtttactgttgtcgtttcgtctaatatctcgaacccattgccggcacgacgagcgatcgaacaatgctgatagacaactctgcccagggtcacccctgccaatgtacggtgtgcagaataccattgaatctgtacagccctgaaatatactgcagcccattattggtggatattggtatggctaaaattattggcgggactatcgccttctatatcctttggtgctgggatcgatttgatacaatcaaggctccaactgtcggctgtcgacacgaagagattatcgtcaagtattagtctactgaactccaagatgatgcgtcagtgaaatggtaagagagtagcaactgtcaccgtactgtagtagtccgtaccaccggttcatcagcgccctagccaacggctacggccaacaactgaacctaatcacggagtacggagtcctgtgccgcaggactccggtccctctgtaagaggattgaagcaaggtacttctggccggctattgtgactgagatgtgttgtccaggacgggtggtagtctgcattccttgggcactagatacccactgatcacctctgttcgtggccgtcaattgagctagagatgcgcgattccgagtcgtggaactggactcgaggaggttggtatgcttgtctccaccgagtcactgtttactgttttgcttgacatggccaccggagccttattttgaactccagctcgagcggtgtatctacaactgacttgaaagagtccagcgctcagggctcaaaactgtgggcgtgaataatgggggtctcgtgggacggagtactaccggtaatattacgtggtattagcggggagtgactttctagagtcgaccaatcatacagctcgccaagagcgctgaatggtctggacaaacttagtcccggccgatgccagtcgcctatctcgcttttgaccttgaacagcttcaggaagaatgtgtaaatgctcattaaggccgtaaaggtgatataacatgatgttttaagcttctggtccttgagatgaaaggtgagttctaaatgattgtcttccaagcgaagagtataagaagttgactggagctgtggggcgtcccataccgtaagcgcacgatgagccaccgccttcccatctgaaacgacacttatccattacgagctacatcccagctcctccccgttggcctgtttctctcaacaa

SEQ ID NO: 1928 - DNA, 1153 bp, Emericella nidulans
ccgctgtgttataacatcccttggaattgtccaaatttccattccccgggcaggaagccctttccctttcaagtggttccggtggatgcatcatcgcgcattgtaaggaaggaaaccactgccaacccgttttccgtcggaattaggggcaaccttaagggaagcttgggtgccaaaccgaatgttcctttttacccctccaaccaagccagtagggttgtatcccactggcgttttacgagtacgtcttcgagtcttcatagcagtgccatccgctagtacggctgtgaggttgatcacccaatccttgatagtcccgtaccgcacagcatttgtaccgctgcagtttgtgccaatcataccgccaatcatggcagatggacctggatcgaccggaaagaagagcccagtgtctttgattttctcgttgagatccatccactggatagacggttgtaccacaacgtccatgtctgcttcatgtaggtccagaattttgttcatgtatgcaaagtcaatcgtcaagccgccataggcagctgaaaagtttgcttccagactggaaccaccggagtacggaaccattggcatcttgtatttgttgcagatttttgcaatctccgaaacgtcctctgtactggatgggtaggcaatggcgaccggtaagcgctgcgcattgacgcttgaccactccgagaagccatgtcgttgtaggtcgtcttcatccgtgctaatcgcatcttctcccaatttaacctgaagctcagcgatggcctaaacgacaaaggcgatcgttagcaacatttcacaatagccgtactgggtccttgtttgtaccttttcgaaatcttttgcggttccataccgtggggtgccagcgtccttgggctccaacagttggtccgagttgccaattccgtagccgattccagcagctagcgacgcgacaacagccatccggcccaaggaccaggaattcgccgagtttccggcagatgagctcgagctcgagttgtgactactcttctgatcattctcaccacgtctggatgttgagctcgtcaaccgaacggcgctggcaaaagggatgggccgagaacctgcccgacacagcatgcggggatttgcggggaatccccgagatatcagggac

SEQ ID NO: 1929 - DNA, 992 bp, Emericella nidulans
ctcctcgtagccaccatcttctatgccgtgattgccgagatccttgaaacaccgttacgttgtcttggaaagcgttgacgtttgatgagaaattcttggaatcacattgtttgcgttggtgcccaacactacagagttcttggtatgtgtgttcacccaatgtagatggagctagccagttgaccgatgattatagaatgctatctcgtttgccatgaacggaaatattgcgctctccatggagatcggatccgcctatgccctgcaggtttgtctcttgcaaatacctgctcttgtcttgtttagtgccttctacgcccgtgttcttgacccagaacatttgattacacactccttcaggtacgtcagctatctctcgtattgtgtcaatccttgagatcgatatgattttgaagaaggctaattaatgggtttaacagcctcattttcgcgcaatgggatatgattacagtcatcctttgcgtttttctcctctcttatgtctacggtgaaggtaaaagcaattatttcaagggctcaatcctcgtcctgacctaccttgtcgtcgtgattgggttcttcctctctggttacagtaacatggacaccatgggtgttgatcgcttcaacaccttggccctgaacattgaatctaggcccgagaaattctacacaattggcaggtcgaaaagcggagttgcctatcagcgtgttcactgattaggcaccttgaggtgtcaatggcggctttcgctctttgttctctgaatactttctgacctagagacttcttgagcgcacgattcatgtgtacttcgcaggccatgtttttggttagtagttagattctgccttcttctgtcagaatgaatgccggcaagtatagtccccaaagtgatctctgactctttactttgtaaaatgggacaaaaaaggtgtagcttggaaaaggcaagttattgcgctatacaaaccatgcccgggaaggtatt

SEQ ID NO: 1930 - DNA, 1689 bp, Emericella nidulans
ctcagtaaggggccgagagggagagtaagggatagagagcgcgcaaagaacaaggcaaagctgtaatatgttcagtatatcatgtttggcttcgtcctctgggatgctaggatatgggacacttaccatacccctagcggagggcccgttgtgtcagttgctcggtatcgtatttattcatcttactgttgcttagcgttcactttaggatactctagagatataatacatctttattggcgttgtagcagacactaccaatcagttttcttatttcgcttaacaactactatttgggttgagtggtgagtacagtcgattatggcatgcatatgcacgctaccttgccctagaatagtgcgtgctaactagacaaaaaccacaccaacctgtaattttgagtcccatggctttgacatcagagcattatggattagctaccatgataccgatgcagaaatagttcctccagtatcgttcgcaagtcttggacctttctttatcactcgagtagcagtactggagatatctgtttcaagcacaaaagcactagccagttcccttcgctgtaggtttcttcaggttctcaatccaggacgtccaacagaagaaatacctcagtcacgcagtgcatcaccaacccgcctcattccgaaccctaaacacagtcagactcattcagtcgcaccaccaccgaaaacgatctctctaaccgagaagtctgatattatcgcattggcgtgatcattaaagacggagcagagatgggttcctgcaatttgcagtttgtacacagaccgggttaggaagacggagttagtctcaggtttctagttttggtttagctaatggagtagggactgaagacctggaagaggcctaaacgagtacgagatcagatctcgagatgaaggtcaacgtaccgtgtgttgaatgaaggcttccctcagctgggactgcgatactgagtgccatgacggagtctatatcatttgatgtgactgagaggtcgtaaagagagtggtgtaagaggctgatagaatgacagcgataatagcggtggagtatcatggtatttggatactcgctggcaaggagaatagccacaagctcactcaagaggtaggacctagggccgtcagacacgtcatcacgctccaagtcaacaaacctaacagttatcctcggagaagagtcaaatcaaactgatacagtcacctatcatggctgcacatgctggcaagatcgtcataaccattatcctccgattggtctcggagaagtatggccatgaccattttgctccggatgtatcccatccatcgcctgaagctcaagctccgcagctcttgatttctaattattctactatctctccaggcttggaataaagtgtccgacgtctatttgagctcttttgggagcggctcttgcgtacttccaccaaagctcaatagctcgagccacgatcccgcgattccacagagggccgctgcttcgagccgaacatttcatcccaagaccatggggcatccaagttagcgaatcgatggcaccctcagcttctccagctccagccgcatccatgacaagcacagaatggaccgtcttgccgggcatctgcaccccccgccggctcgtccatggctcgcacccctgctcaatgcagtcctcaccatctagccccag

SEQ ID NO: 1931 - DNA, 4419 bp, Emericella nidulans
acctgcgcgtagatgagttttaggtcggctacctgcccaataaccgcgcctggcttgagccaccgcgggcgggtcaattgctcctgtgtgtccgttttccacccataactatccggcgggagagtcgactccggcacactggcacagccggcatcgtctgtcaggttatgaaaacactctttgcttgcggagaaaatcacgcgctgcgagtacttctggtgtgtttccacgccatccttgcggaatggtcgatccaccgtaaccataccgtacctctcacgtaacttcgcattcatttcccgtagcaattcctgataccgcctgactagaacctctggcggcacgtggaagaaaatgtcgaagccgtccacaaccaaaacaatgtcatgatcctggaggcgcggggtgtacgccaaaaagttatatatcccagtaattctgtcaaccatgtaatcatgtccggccgatcccgctggaagttctctcccatagcgcaccagcgttggcggcggataatttagaatcatggccgaagtcaaggtacggcataggcctgggttgctgcgggtcgcgggcaggacgagatgaaacgatgcattcgtcttctgcagattattcgacagtataaaggtatcattgtgatcgtaggcaatccggggggttatgatcgtggcgtcttcaggtcgaccgtggaaagggtggtacgaggggtattgaagccagtgattgacctccggctgaagaatcgtcagtccttagcagtcccacatttgccatttcagagggcttacctcgcccggagaccgcatgaaaagaaatatcaaaaagaagcatcctgcgactgcgagaagcaaccgcgtcggtcgcggccgtgggcgaggatagtaagtctgctgcaggaaccgcgtggcggacaatcgccaggaattgtactggtcagcccagggaccaggcaagtggttgtccaggccgctcaggaacccgcgcaaggccatctggaaactcagctgtgcgttgctgggagcaaagggaaattgtcgatttcaatcgtggaagagaaggttgaagataaacattccggcgcggatttagtcaccgcaggcgcagggaatgggatgataacgactccttcgtactctgaggggcctagagaaaggacagatgagcttaagaagaaaggaaaagatcaacggcaagaagaggccatgttgcagaagatttgcactgctgtgatgacgcagctgtcgcctgcgacagccccgacccggcacttagtttcagatctgtcaatgtcaatcgatgtggcacataatttgtctacagagacctggaatctttgacatgcttgtttatctatacccaaccgactgattgattcttatatccagtatgaattgcctatgtttctttctgcgagccgaatatcttgggtttaaccttccgttcatgctcgggccaattctccctagtagtggccgcgtaatccgacccaaccctgccgtttcatattgacaggccgatcccaggccctggcagcattagtgcacaagagttctcgctaataaaccatgatctattggtagtgcagctatgatcaactgctgctgttgagtttgccgctgtcatttgtggagtacccaggcaataatcagtcattagatgtacaacaaagccggtcgcaagtggaaaccagtggctaaatagcaagtcagatgcagtgcgaaggtatatataaacaaacccccaaacgccagtatgtatgtctatcctgcaatcaacatggaataaacggacaactcattccaagtaaatctcctctcgtaaccgttgcagattgcggaagatcccgcccccaggcccctcactctcctgtctttgatgccccctcgaccccgagatttgtgtctgttgactctgtgacggagcctcaactgccctcctccgctcctcgacgagctttgctaatccgtccacaaacctcacccgcgccttctcctccgctgtccccttccacaccaaagatagtgtccgtagagcctccaccctgcgcgctgcagcttcaagcccaccatcgctatccagaagctcattgatctcaccacgtagcttctttgcagcttcctgtcctttctcctcacgcgtctgactgtccgggcctaaatctggtgcggaaacagagatgaacgaggacgttatcgaagtctcagacggtggaagcggccactccattgcgtcgccgaaggtctgaacgacttcttccaagcgcgcccggacctgattcagggtgcgaaggttgctgatatactccggttcgctctttttcctctcgtgttctcctcgctctgtgggatctgattcgtcttcgggtttctcctccggaattgtcggcgtagtagtaaacctcgcaatctcctctgccagcccctccgtcagcaagtccgagagtgcgatcgcctcaccgcgaagaacctcgacttcgtacgcgagccggttgccgctgcggatgatttcatccgtaagagaagtaagcgtgcttgagtggcggatgttctgggcattggtttgtgacaggatagattggacgcgagtggagaggtcggtgagattgacggcacgcgggtttgattgggattgaaactgtgaagattggagactcagtggcgggagagtgtcgttgaggaagtcgacggggtcgaaagatggatttgcgtaatcaggattgactgtcaatgttgacgcggatgttgggggcggagctggactgggcgtcttagacggcgtcattgcgcttggggtattatggaaaatgggaactgtgtttctatgactgagttggcatctttgaagcagtaatttgtccagcgggactgatggataccgtgcctgggctagatcgaccccacaatgacttctggggtggttcaccgcctgccattgtttacattgtatacagtggattgcttacagaaattatttcactttgctttagtatctcaagtagagtctataaacagtacgttgcgcggttgggtagtatgtgcatctactttgttgccacgacaaatggaaggcttcataaagatagtcatcttgaattcagataatacatattaaaggcgggtatcgtgatattaaaccaaaaagcaaagccacaagatcaatcaaaccccaatcccaaatactactgttgttcatgccatcgtcaatctcgggtttaaatgtcctccaccacacggcgttaatcgcatgctgaacccatctcctccctggggcggcgcgtagcgctaggcccttcgccagcattctccgccgccgctagttgctgctgtacggtttggtttggcgccggaaggaagatgaccttgctgttggccgtcttagccatagcttgcatcgcctcgagatatcgaatctgcatagcaggagcagaagaaaggatatcggcggcctgacttgattagcttagatcgcgggacaatggcttagcacatacctgacgcataagtttggcagactcgacttcagcacgagcggcaatgaccttgctctctccgatacgtttagactgcgctgccatggacagcgagtcctggaggtcatcactgaagataatgtctttgatgagcatagactcgacgttgacaccccatcctgaagccacttcctcaatgatctccgacgttgactgagcaatctcctcacgtcgttcgatcacgtcttggagaacacgcgcaccaatgacatgacgcaatgtggtctgggtacgctctacgagtgcttgcttgatgttggaaataccaaacgccgccttgtgaggcgagacgacttggtagtagatgacggaagtcaagttcagggtcacgttatccttggtcatgcaaatctggcgaggaacctcgacgatctggatctttacgtcgattgtgataagacgctcactcagcgggttgaccttgacgagaccagggtctactgcgcgctcgaatctatgttatgttagctgcgcgtttttcgttgtttttgttattttcgcaggtcactggagtgcacgaaccggccgaatcgcgtcaccaagccgacttcaccttgttggacgggcctgaaggggttcgggcatgggcagcaaggaataactcccagtcctccgatacattcaccgatggtatgctctatagaaatcgcttggttagctctctcgaaacttgactcccttcttagggctcgacatactaaacgacgcgtaccagccgtgcgcttctgggttgctatcatcgtgctcgattgtggatgcgtaccgcggctgcagatcggacagacgaggaggctgtacctcgacaaggccataaaattactgcgtggccttgccattcacgccagtgttgcagcagtgttagagcggtgcttgaacggcagacatgt

SEQ ID NO: 1932 - DNA, 2857 bp, Emericella nidulans
cactccatccctctcgacaactgtccttctcgtttaccttacaacgctcaatatgtttttcaagtccgcactctctcgccttccacgggcaaagtttttttcgaacagccccggcgtcacggtcgaacaagtgagacagatcgcccaagcctgcgaagatgccttccgcacttacaggaaactgtccctcgatcagcgcaaagctatcgtcgttaaggcgctggaaatcatcgatgccaacaaagagactcttgcgcatgagttgactacacagatgggtcgtccgatttcatataccgccggtgaggtagataccatgcgcaagcgagccaactaccttatcgatcaggcggaggatgccctcaaaacgatcccgggacaagaggagaacggtttcaagaggttcgtcaagaaggcgccagttggtcctgttcttcttgcaaccgcatggaatgtaagttgccccaggctttccgaagggttggaagctaaccggtcagtatccttacttgatcaccatcaacgcactcgtccccgcgctccttgccggaaacaccgtgatccttcgtccttcacctcagactcctcttgttggcgatcggctctctgaatactttgagaaagctggtcttcctaagaatgtgctgcaggtggtgcatctgggttcgtgggacgttctagatgaggtcgtcaagattccccagatcaagcttgtttctttcgtcggttctactcagggtggtctccgtctccgccaggcgaccgccggccgaatcttgccactgaacttggagcttggaggcaatgacccggcttacgtccgtgccgatgcggatctcgcgtacactgccgcgcaggttgtggacggcgcagtctttaactctggccagagctgctgctcaatcgagcggatttatgtgcatgcagatgtgcacgacgctttcgtagccgaggttcgaaaggagctagcaacgtacgtctctcaccctgaatcaagaacatcattaacgaatgtagatacaaactcggcgaccctctcgacaaggctactaccactggccccgtgatctcccatcaagctgtcaagaacattcaagcccacattgacgacgcattgtcacgcggtgctgtggactcgacccccgagaaccctactttcgcgaaaattcccagtgaaggaagcttcatcgccccacgcgtcctcactaatgtatcgcacgacatgcgcgtcatgcgcgaagagacttttggccctgttgttcctattatgaaggtgcagagcgacgatgaggcagtggcgcttatgaatgacagtgactatggtctgactgctagcgtctggaccaaggatatcaaggcaggagaggacttgattgagcgtatcgaggcgggaaccgtcttcatcaatcgttgtgattatccttctccggttcgtggcaaaacccactatgcatcgaatatgatactaactgcaaatcaggacctcgcatggattggctggaagagctctggcttgggctgctcgctcggtccgcaagcgtttgacgcattctacaagctgaagagcttccacatccgtacaacccacggttaaatatagttctgttgatctcatagatatatacataaacatacattaattctcacgtcgctgtttataacttttatctcctattaaagcaagatatcttttacgaggacttgcgtgcgccactggtctcgttcgtcttcccgaaccctgtgacatacctctcgtgcctcccacccttaagtgtgcgactgtactcgatgcccacactgttaccggtcttcacatcaaaaggcacgggactggtgtagtcatgcgtagcggtcaacccggcgtaggtcttcctgaccacgtccaggatcccataaccaccggaacactgaccctcggtcgcaggaatcggccactcgtaggtcttctgagagtattcacccgcagccatgggtccgttatacgaaacattcaggtacaggttgctcgtatcgacttcatagttcgtgtacccgaccttctcagcaaggaaagaaagcaggtttgcgccgcagtcccagcggcctaaactgggaaggccgaagttggcagacaaagacgagatgatactgtagtgagtgtagaaggtgtcgtcttccttcccgatgaggtccttagggacagcaccaccaagcaggaaagagaaaatcttattgcctagctcgtaggtgtcgttctcgtcgaaagttaagaggatcagcgtgtcgttggtgaagtactcgttgtccagcaggtcaatcaggaactcccacgtccacctaccggagaaagagatgtccgtgtcgtgtccatcgttcgtcatgttcggtgtgatgaaactgtactgaggcagacggtgggtcttaaggtcctcgtagaacgaggtgaagttcttgatttggcgcaggcgcgtggggtcctctgttattgagtcgtagaggatagcgggattgtgcttacgaacgtagtcgttgtctcccgaagtgggataacggaagccctggtagccggggtagggcatgtgttcttggtactcgccccaggagatgttcttagtgtcgaacatatccgcaatggtggagatattggccggaatctggttgaagtcgtcattatccataccgaatgtatcgcctccttgggaagcgcagtagtttggctcggagggatgagtgacggcccaaaagttggtgagggtgaggcccttctttgcgagccgggccagatgcttctcgctggcggcaacgtcgtaatccttggtaagtggttattactttgtcgggtttgagggatgacagcagaacagagcgtacagtattt

SEQ ID NO: 1933 - DNA, 1597 bp, Emericella nidulans
tcgaagagtcgaccaaggtcacaggccccccgaggtagagtgaaagtgatataaaatggcgaccacggcggtccgagacatttggtaagggcccatgagatatggtgtattcaatggccgcctcgatttcttaacctgacgttgaggtttgatatcggaaattagagtaataaggtaaactttgaccttggcggctccggtaaacgaggtaccttaagcgcgcggtaagtagcgggcggtaagatcgagcttggctggggacaaacaacactcggtggagtcgggttggaccagcgaacaatttatgattttttgacatacctccaagtctctttgtcttgacgagccggcccttgggaaggctacaccaccaatcggcctctatcaatttcactctcttttgtctctcgactacgcctgcgccaaaaataatcccgatcattgatccttgctttcagaatgttttcctcgaaacccgcaaccccgtcaaccgggctctctatcaacacgaactccgccaattctctcttgtaagagcattgcctttttcagctaactcgtgtcctaacatacctatcgttgaaatagtggtggcaatacgaatcaatccgcaaatacgccggctacgacaagttccggggggggtctattcgggacggccgcgacgcaatcaaagccagctggtagcttattcggcaacactgggatgggtactacacaacaaactcagtcttcagggtcaagcttgttttcagggctgggtggccagcaaaatagcacgtctggtagcggattgttcggcaacaccacagctaccaccacacaacagcagccaggcggtcttttctccggcactactggcaccaacaatcaagcgaacagttctggagggctttttgggaacacggcatcgggtgccacgagtcaagcccagtcgaaacccacgttcggtcttggggctacgtctacgaccaataatatcttgtaagaactctcttgaacgagcagtctgtgtgatgagatggctaatattaattagtggtacaaatccgggtgccggtcagcaacagcaacaacagcagcaacagcaggctcaaaaaccgacactatcgctcttcggaactcaaaacaccacttcgcagcagcccacacagcaaacaccggcagcgggatctaacacggtcatccaaggtgtcaaggtggatatcactaaccttctgccgaccaccaagtacgaaagctgcgcggatgaggttaaggcagagcttgaacggttcgataccttcattgttaatcagataaatatgtgcaacgaagtcgccagtatccttcctctggttgcgtctcaaggtagcactataccgaatgacgtggagtatgtccaaggcaagctagaaacgatgcagcatgctttggaaaatgatgccagcgatatcgatcagctgcgtagcctcgtatctcgggatgcagcggaggctcaggtcgccttccgtgctattgacaccctcaagctacctttgcagtaccagtcaactcgggggttcctgggtggtggtccgctcaagatcacaaaggtgtcggattctcagtccttgcg

SEQ ID NO: 1934 - DNA, 2105 bp, Emericella nidulans
  unsure (1)..(2105): unsure at all n locations
cttgctgcatattagaccatacacaaacatgtcagcaaatcgatcttagcagttgtaccgaagtcagtagtggttttaagcggatcaaccgaccttgtcaaagttcttcaagaggttgactatccggccctcaacctcttccttcttaagaccggcaggggcggaatagaagcggacagccggcaaggcaaagcgaggagccaattgagctggacgagcaacgggagagctacggatttggagagcagcctgaggcttgacggcacgaggcacagaggccctcaatgaacggacgacagcggaacggaacatgatgacggtagaagggcgcggtgaaaagtgcctacacccgagttagaaaaagtcgacaaatagatgaaggcatacgatagagattacctgagcagaaaaatggaaagatggacagcaaaagggaccgataggagctttgtctgatgctggagaggtgaacctgaatttggcgttgcgaacttgcggcttcggggaaagcaaaatcccttgcaccgaccaatcaccgcgcggcagaaaccagtgacataagccgcctgcaaaaccgctcccagcaacgaccggccttcgagatcctccagctgctccagttcgaccccctcccccaattgatcttcccctcactcgtctttcatacgacgtccgtctgtcgacatccccatacacagatggctacctccagatctgtggcgagactgctcgccttccgacggcctgtgccctccattgtgccttcgtatctcttcgtcccgaccgcaaacttctcttcctcggtgagccgggctgctacaccgtttggacctcctccatcgggattccgccttcctccccccaagcgatgggatcaggaccccgagtcctctttggacaaggctagcaagtacttcctcatggcggagattttccggggaatgtacgttgttttggagcaattcttccgaccaccgtaagtcttcctcgcaatcggcattggatcctgtcgagagagggtgtgcgacgccaccagctcgattgaacgcactatcttcaagagtcccaaatatactgtgctaatgcggcttgctcagttacacgatctttctaccccttcgagaaggggccaatctcccctcggttccgttggtgaacacgcccctacgacgnctatcctactggcgaagagcgctgcattgcgtgcaagctctgtgaagctgtctgccctgcgcaggccatcaccattgaagctgaagagcgtgtggatggaagtcgccggacgacccgatatgacattgatatgaccaagtgtatctactgtggctactgccaggagagttgccccgtcgatgccatcgttgagagtacgttttccacatcttattgttactggactgtctgctgacaagtaatccagccgccaacgcagagtatgctactgagacccgcgaggaactgctatacaataaggagaagctcctcgccaatggtgacaaatgggagcctgagattgcagctgctgccagagccgatgcgccttaccgataaattattcagtgtctttatcggacgatatcaatgaatggaaaaattcgtcaaagaaaagcctgtattgccaccaactgattaccaggatgctttgccgcattcaatttatttccttcccaccctgtacataactcatgccgtcgctcacactcttcctcctttagtactgctatgtattttgacggattcgtagggatatctgatacctacctagtttccgctcggttgtcttttctgtacctgtgatagaagagatttgtgttttaatattgttagggatcaattgagctatttcctttgttgcattcaggcgtcacgaagatcaagccaaagaggctcttagttaaataaggttgactactataagtcatcaagtcaatacacagaacagcattgaacaaaatgcctttattgtatcaacaaatcgctaccaaatgcatatgtgcacaagatgacggaatcccattataaaacaaattccaaaacacctgtctccagagcccactctgacatctgttgatactgcgccacagaaagtcctaacggaaacaggc

SEQ ID NO: 1935 - DNA, 2308 bp, Emericella nidulans
  unsure (1)..(2308): unsure at all n locations
ccacaaagttgaccggtggcggcgcatgagtgactgacaaggttcgtagtttcgtcgaggtttggtcttgcggatgccgccaatctatggcttcgtattgcgtaaaatagtcgctatcagcttgtccataaatgtggtctctccagacctatagcggaagttcccgactggagtcctggagatgccggagtacacatcgagcctatcgccgctatcaccgcaaatcgcttccgcgaagaagagttggactcgcagtggtccctccacctccccgtcccattggagcttgcctgagggaccttggggatgcattctgcgcacccatgagtccgggtcccacatttcctctttgctcgaaccgcgggtcgagtagtcaacaacttgccgcataaagcttagatcaaaataattgccttgctaaaagcgggaccagagcccagacgaggctagcagcagttttagccctcgtgctagttcctcggaccgaatccaccgctgcgctactaaagggctggactaaatggaatccacgggcctctctgcgtcttttgtgtggttgcagtggctagttccaccgataatccttctccaactgggatgcacgtgtgatatctggccgccttggctattcccatgctttgcgatcgacctctgcagacgtcgaaaggacagttcgaggagggagaccaggcgttgaaacttcgagtccaaatccaatagcttccggggtgagacgatccattccttgcctcaggcccacgaggttgcacgataccttccttaataggcaaatgaacgttacgtccacgggtccgctaaggaatcatcgtttaccccaggattggcatcgagacagtcgtccatcccgcttccagtaagtctcattctagccagcaagggtagccaggaatgcaagtcgcgaccggcttgagcttgtgtatccgcaacgacctactaagtgttcagtaggcctatcactggatggtgattttcatccctcattgcccaacctctcgtccttcggttcgcatacaacgcagtggatatcggatttgtcaggacacttctaaacgctattattagcgccaccggctcttcagactgttagccgacacaatacggaccttgaactactcagataggcgcgaccagggagatactgaagttccattttgatgggtcggcattattctggaacgtgaaagcgggttcctgaacggggccaaggatttggaattcaacggcagcaccgagagtcggtggcaatgacgagcctgaacatcaaatggtaatagtgacgcatgatagacccaaagcagcggtaatggaaggttcttggaatactccaaagccactatccaaagcctattccgactctattgacagacggtcgtctcgatggttgttgcagggtgacctgagtggtcgacggcggacgcggtggaggcgcggagatgagggcgatagcgcgtttcagactgttgtagctggtcaagtgttaactcaattgacaatttcgagcttgcttctcgctttcaatttctaactttgctcacaaagaatcacgactcattgctctccaccaaattatcggcttggcttatgagagtttgtgagttacgaagcactcactggctggcaacccgtaagaccatcgcactctgtccccattccccgtacatgccctctcctaaacccaatatcgcgtatttcctgtagccccagatagctcgtcggattcttattatcgtatctttggtacggtcggatccttccgcccggatgtctgtgattatgcaggtcaggtcccatcacggtggtttctccgccattatcctcacaaacataatgagactctcgaattgggccctggaaatcgctcgtagacccgcaaatctgatctcgactgttctacttgaattgtgaagggatgaggcgtcgggagaacggggaaggtctggcaacgctctctcaaaatcagtatcagatagcagatgatacagcgacttgctcggcatttcgtaacgtctttttttttctttgcttttttgttatcttcaatcagaatctttcgactagacccgtgctcgccggacggtcacaccagtcaagtgcaacgcgcccagtaatcgccattttgctgggttcgtgtcaaaagcatctcactctcataagaactttctttgacggagcgacggcggaccaaaccccgacaggacagttgaacggggattatcctggatgaagagaagacnagaggtgnagagaagcctggcctgatctgagcgtcgaaaggccccagcaaatg

SEQ ID NO: 1936 - DNA, 2687 bp, Emericella nidulans
ggatccgaaagcaagggatctaccctgagccaagctgacctgaaactgagcgagctgtcagagctcaggaccaggaccgtggatgagatccaacagcacacttatactgctcacgcagtctgacgttggtacaagggtatgtacggtaaggctacgagggcacagccgcaggttaccaaggctcgttgtacagataccacaataaacttgcgggttgcaaatcactgcagagttttcctggttgccactcacaggcaatacattgtttgtgggacgcaaacttgatgcactgcgctgcctgcactgcatgattgtgaattccagatgcatgagaatgcattatgttaagggccagagaaatcggacgctgctgcctagacgcttggctaagtgtaaagaagttcaataatgaagtttcaagggtcagctggagccctacaagtctctcgcacttgcctgctccagaagcactgcacagtgcactcaccataactgtatttttggagagcgcgggccaaagcgaccagtccagccagacggtcgacagaccccggggaggtctggtccctgggacctcggcttgctgtcagtggtggggatgatgtcgcaaaagggttacataaacacggaagttcggcgcttcttattggaaggtcgcaacactaaagataggccggaccccacttcccatctcattggtgcttttgacaccaggtacttttttgacatgacggttcgcgcgggacgagggctggggataggacggacgatgcatgaaaagtgagcactttaggtctttgaaattcggataagcctgagacggcacggagatggtaaggataccaagggtgtcaaactggtgaatcttggatatccaattcgtggtactttctcttcggctcggccctacctgctccccaaattgagaatggctagaggttcgacattattggagcttgcagtaatgagaagcctaccgacggccgttagtccggatgtatgttatccacttcttatattaaaaaccaggctttgacccttcgacatcgtaccatgcagaagctacgccgagctagaataatgctagctgctccagacgcagagctagaaggcttcgagaagaaaacggcctactttcctgaagaattccagttccacctttttgatgaaggctcggagatataccaggccgctgtcactactgtaaggtcccgttccattactgggtccatctcataccgtcgctgcgactgtcgcgcaggtcacggcaagtcatattaggttctccataatcatatggttcaaacccgatgattatgaagctagaaggcttccagaaggacacggcgtgacatccttcatcccctagctctagctttacctaggatcttggccgacactattgctacccactctttctaattgaaatggtaggcactccgagaatacgtaccgatagagccgacatcgagccatgctctgtacgactacggagctggaagctccattactgacgctagaaggcttccagaaggaaatggcgccattctctctacataccgctagcgagccgaacggagtcgaagtagcaagtcaattacgtacttgccttccagttggtggcaatgtcgcactacctgcttatttcgacaggcggtgattgggactagggcctcagaatcaggccaggcgccatgctgcgcttctcagactcgagctcgagacctcgaacgtttgatgcctccactacaatgatgcgccggtgtatcgccgagatttgtttttgtagccttgtaaggtaaaatagacgaggggtaacctaacagcattgacggcaactcgaatagtagtgtcaacgttcggctgcgggaaccgaagagtgagagttgattaaccatcgacgacctgaacactcaagattcaccgtcatttcttagcgcccaacgccaagaggaaaaccgttgtggcacagacgttagagaatatgaccggtcagcagaatatccttgtcgtcagggtctgcatcagactgcagtttgcctggtcagagaacgataagtgatagataagcgctaacactcaaaagtaggagtaatggcttagccggctgattgcgcgtatctgacgacaacaacggttatctatcatgataggattgggtgagctcgaatctgacagtcgcacccgcgctgaggtggaaaattgtcgctctaccgcaggtaccgacgccgtaccgcgatgatcgacgccgtcaagccgccttgcatgaatacggtatgacaggacggctcgcgctcatcgtcagcacctgattttcgagtcccgcggtgcggatgagatgacatgacaggtcacagaatctccactcacggcggataaactaacaaaagaggatatcaaaccttcccaaaaatgcagtcgggatcgcaatccgcgtgtagcgataactggcgagggactttggccttgaatgttggcattttctggtgatctgatactcgtcgcgcgcacgaggttcccttcgggccagtgatagtacgcgaatatgacagctgccttcccgcacaagtgggtgcccgagacccgccgggtcccttacatccgtttcactttgctttgggccttttcgacgctcaggatcaggccagggcttcttcttcacctcttgttcttcttcttcatccagg

SEQ ID NO: 1937 - DNA, 1589 bp, Emericella nidulans
accacgtgttctcttttatctttcctttgcagaaggcggcctatgtacttctatttggattcatcaacatctggaccgttatgattcacgatggtgaatacgtcgccaacagccccgttatcaatggagccgcctgtcacactatgcatcatctttacttcaattacaattacggtcaattcaccactttatgggatcgcatgggtggcagctaccgaaagcctaacgaagagctcttccgccgtgagacaaagatgggcgaggaagagtggaagcgacagaccaaggagatggaaactattctcaaagatgttgaaggtgatgatgaccgcaaatatctcgctgaggaagatagcaaaaagaacctgtgaatttcctcttggtctgagacctacagggttcggcagtcaatgtctcaatgcacctgacatggttctgtaatgtcactccaacggaactcgtttcaagtcgcaaaggctggctctcttacttgtggctcacgaggttgacgtttttcttacccttgcctgcttccttctattcctgcattcttatctgcacataaaccctattaatgtcacactgtacagcaccggtaccagtattatactaatcattctgtcaacactttttctgatatgtcagcggatgccgtggtaaaccaccactttcgattatcatcacagcggcgtagttgggtttaaactttatttatggccttggttttcgaatgtacatagctgaatacaagcaacattttaagtaaaatatttcaccgtgctactctgaccacttggcactcggaactgcaggaccgactcagctaagaagcagcttagtgaaggcaagttctatgtacacaacgggtcagttcgccttgcttgtaaagtacctgagatgaacttaggatttgcctctcataggttgtataataactttctgtttttgctcagagtcttacaagaggcatttgtttgcaattaccgctatacatatttaaattcagaataaaaggtacaagcgacaaggatcagataccagccgtcctatccgcatccgcatcggcaatatccatatcaccatcgcccgctccatccccagggacacttccatcagcagcagccggaggtggggtcggggctttcgtcccgacaggtgttgcgctggacatagcctggctaatgaaggcttcctcgacgccggccttgcgacgaaacgcgcgaagccagcgtttaccccactcacgaatgatttcgtcctcgggcaaatcgccgctgccgtcaccacgttccatgagctggtcgttgctacctccggccacagaaacgacggagtcttcaatgacctggaaaagggcgtgcatatccttcttctcacggttaagagtttcatcaagtacacttagctgaggctcatagagacctggctggatgcgagccgcgacgatctggcgaaggcggttggtgactttgccgacagtagcagagatcatttcgaagatgtgggtttttgcgagaatagtgcctgcgtccaagtggtcgaccagcgaacaaacaatgacggaaaggggtgttaggattgtgtgttca

SEQ ID NO: 1938 - DNA, 1592 bp, Emericella nidulans
acagcggatgcccgaaaatggcgctctcatccccacgcgccttccagagcacattcaaagtgacactccccgacagacaggtccaaaccccttaccacgcacggcgcgctcacaagaagtcgaggaatggctgtcttgtctgtaaaggccggcgggttaaagtgaatatcttgcctcctgcattatttagccagcggcgttctgacatattggaactagtgtgatgaacgcaaaccgacatgcctgaggtgtgagaactatggagcagcgtgcgtctacgcttcgtctcaagctacatcatcatcatcgtcatcgtcgccgtcgtcgtctaggtccagcagtattctgcgtagtgcgactgcaagcacaagcaaatctacgccaccaaacaacacactaacgtctctgtccatctccgacatggtcaatcgcgtccgggacaccctaggcaacgatctagccttggctcctcggacaattgggaatcgcgatgaggcactggatctcgcagtcgactcgttccggttcttcttgacttgttcagtaaacagcatttcgactccgcagatctatcaggttatgaagcgcgaggtggttcatgtcgcgtttgatgtgcgtccttctttaaaaagcccctcgttttctcccatttggctagattcttacgtatcttactgtagaatccgtatttgatgtacacactcctcggctgcggggtcctgcacatgaaccgtgtatcaccaggcaacgaatctcgggagctcggcgaggcgtacttctggcagcgcgcagtgcaactatactccgcagcactgcagcaccccatcaaccagcagaacatttccgggctgatatcagccagcattctcatcggcgtgacctcgctcgccccgctcaagttcgagatgcaagactcctgggtctttactgggcgaggcagcgacctgaactggctcgctattcaaggcggtttggcgtgcatccttaaacatgcgggacaatacgttcctgggagtatatggggcgtgccattcagccagagtcacgagatagagagtcaactcttccgctatgagatcacgaaggggcgggagggcttacgtccggacctagctgatctatgtggtatcaccgatgagactgacgagcagacaagtctgtattgggccccgatcaaactgctatcaccctttatggaacttgaggtcaacgcacagattgcatcgcagtgcacgacctggatgggaaggcttgaaccgtcgttcgtgaatctgtgtcgagagcgcgaccctcgcgccctagtaatatttgcgtattggatggggctcatgtgttcgatgtcacagtgggttccctgggtggagggaaggataaggaaggagtgtattgctgtttgcatttatttagagagtcttggcgatccagttatacggccattcttggagtttccggcggctgcggcgggctataccttgatctccttatgatcaatgttgatacaggctttaacaagatatgagaaattgttgacgacgtgcctaattgacatactagctagcaacagcttagagaatagattctgatcacctaca

SEQ ID NO: 1939 - DNA, 2886 bp, Emericella nidulans
ttaacgttcccaatgccctccaccgtaataacgtgtttcccatcgacagcaaccagcggcgcaatgcaggcgttgatggaggcatggtaaagcttcttggtagtcggattgatttgcgaaacgacctatctaatgtcagtgaaactgatagaacattatccaccaacaacttacaaccgtgcaagcaccacaaccaccttctgcacaccctagttttgtccctgtcaagccaatacccctcaggtattccagcaatgtgatttcggggtcaacagagtccaagataaccttggtgccattaagatagaagcgaatggtatcgtcccattcttcagtgagttgcaataacgaggccgcagctttcggcggggaagctgcctcaagctccgattgcgacggttgtaataagacaccgggagccatgatggtgtcgtatatgattgctccagaataacgtacctgaaatcaacatcaggaaggtggggagaggaagagtttaatatggccgagtgcctgataagtaagggtctagatggagcgcggggatcgccacagtccgatggaaaccgccacactctgaggtcatccacccaatcgtggtcggcggaatgcggcgtttgtaatgtctactccaaatagtactttcatgaataccacgttatcagtcttacgctgtaggtatgttgactatgcgttaaacattaaaaacacctgtcttagacgtcctggtaccttatctactcctgccttgcagcctgaggctatagagtatttatcatgtgaccagaatatactccgcatccggcaactggagcggacatcacgatcgacgaaacaagcttgaaagaggtcgtgggctttcatcatggagctgctgttctcagtagcatgctcactgctttctgatttctcagtccaacccccgtaatgggttgattagtctcgatcatcgccccctccgctcccctcctcatcccgtccgatcaatcactccctctaagatcaaaattccgtttacgctttttttgggatcattccagtgtctgagccctatcatgattgctcgacgcagtacatccctccttgcgattgttttcttcgtcgcggttatattagtgattttctcgtcttccccaaagccggttccggaagccgtcagtgaagagatatcagcagccgccaaatatgtcccgaaattcccttcgttgaacgatctgcacctgccgacctttcagccgccggcgcataaaccccccgagctacagcaagacagttcaagcggtgattcaaagtggttcagtcactgggaatggctcaaccccttctcgtcctccattacccttgacgagaatcggtccgtactccctccgcttcccaatcggccgtatatatttacatactataacccgaagaagggcagtgatagagaggaggagaatgccgatgcccaacttctttttgcctggcgtcgtgcttggtacgctcagggcttccgacctgtggttcttggtcgtgcggaggctatggccaatccattatatgagtcaacgaagcaattggatttgagccttgagctagaagaggatcttctcaaatggcttgcttggggtcatatgggagatggtctgcttgccgatcggctttgctttccaatggcgagatacgacgatgcaacactctctcacctgcgtcgcggtgcggattcagatttcatcacccgattcgacaagatacataatgccctgctctttgggaagaaatctgttattaacgccgtcattgaaaaggcaagcaaggagtttgacaaggcaacaaaggctttgacggacttgataccagatgatctgttaaagtccgaacagaccaactctctagcactttatgactcggctaccattgcggcgtattaccacgagcttactgcagaggctataccctctccgtcggtccgccggcatgccctagtagatctcatcaattcccatctgcagaatacatttgtgaactcgttcccgggaggaatagccgtcctgaaaccttatgctgagcacaccactgcgttggttgaaccagccttaagacttgcgaaggctcttggccaatgtcccgactctgttgcacccacttcttgccctccaaatctgcgaaactgccacccgtgcaacacacacaaaccaatgaaaatcagccaacccgccacatacaagaataccacccaggtcttcacaataggcatcttgccgcacccatacaccttcgtcagcttactacaaaactcttcggaagttacaacgcggtacattcgacgcgaaacttcccgcgatgcctggctcaaagaggtgaccggcgaccaaatgggccgccaactaggcggtggggcgagggccgtcttattcaagaaagtcgtcgctgacgagccagctatcggcacatcgctatggatgacggtcgagtcactccccgctgaggccggccaggccctaccaagcgaactcttggacgagtttgaatggcagtttggattccggatcccacgtgacagcaatgtagacgccaagaacgaaggcgatgccaaggaatcaatgcagcatgccaacccgagcaaaaagggtgttgagagagagtataccatcatccaaggagctagggatatgctaaagagaaagaccgactccaaccgggtcaatatccgcggtgtggccgaggcgtggaacatggccgatactgaggtctggcgatttgtcaaggcgtacagagcgcgaagtatcgtcgaacgtaagaagtgggaggaggaagagaagagcttctttggagcgcgtccgaagatataagacactagaatgcggtataaaaacgctagtataggaaaataatgacttggcattt

SEQ ID NO: 1940 - DNA, 1472 bp, Emericella nidulans
gatcggtggggcttaaatggctttactccttaagtcggccttaaaatgctagacttgtccttcggtctgccaacgggcccgattaagtcatgtgaccgagtttcggcattatttgatcagtccgattctatgatgtaaatagacgatgatattaggcagtaagcggtacaggactattcttcgctcctatggtagttagaagtcagtgacatatattattgaatctcggttatttaggtatgatccgcaacgctgatcaaaatgaatgttatatacttggagcccgatgcctataattcgatttatacctgtcactggcgtcgagattccaatctggctgactatattgaacctaatgaattgggtggtacatcacatgcagggccaatgcttgccatgaatcctatgtgtccttccgtcaagttgttattatcatcatctgagctgtataaacaaaaggaatgaagatctcaagacgcagtgaaacaaggtgactaggcattcaatcagtgtatctaggcccgtgtttgagttgctacagtgctacgtacggtagtggagatttgtgttttgggataggatggttctactggcggtagggaaagaaatggctcgttgacatggaaggcttgtatttcagtcgcactgttattactgccatctctcgaacctaaacccacatcattcttcgtcatcgtagttttcacgctcctcaaacttcataaaatcttctggagaggctgcatctcccattatgacggaccaagcatccttgaccaagtcaatcgtagaatcatcgaatgcaaggtctaggctaggcgcagggaaccggatgacattgtccaatacgacgttggcgggacgggtagcacccttaacggcccgtccaagctgtgtgtaacgaagtgaccacaataccctcgcattgggcccggcgctggacttcagtagtctatctatagcatccgcgatcaaggattgcccttgcacgccagcaatactgacactgccgtataaaacacctattgcacaaacatcagtacgcaatgacgtcgaaagtaaggcgagtaatggataaagaggtgtgccattatcagttcgtagaattctcaacaatgcaaattcaggcaatgtagataagttttgggaaaagtcatcatagaaaggcgaggcgcggagataaaaagaaatgaagatgggaacctactctgacctgtcggacactcggcagtctcactagagtgcacggatatatagaccggcggcgactcgtcagtaagcccgagtgaggcggctgggaatactacaacagccccggcagggactggaccaccctctgccgtaacgggaaacaggtcatcaagaggcgatgacacaatcgtaattgaccgtgagactttgtcacaatcacacagggtgtttggcggggaaggaagatccagtcggaaccgccacatatgtactgctgatga

SEQ ID NO: 1941 - DNA, 2993 bp, Emericella nidulans
atttggacctggtgggggtcgtggggacgccgcacatggttccgcacattatccatccaaggggtgcgcgatgcactgtgctccgtcaatctcgaatggtctggactccgagacagactcgcaacagccggtctctcaacaagagcctcaccggcgcgaccgccgaacagctcagcctctgaggttcggccacttcgggtccgaatgcagatcatccactagtgcgtgacacaatctgcttaataagcaagacatacattaggcgcgttttaagggggagctaatgtatcactatttatgctgcgctctgcctggttccagttgccgaactcgcccgccatgggtccgtatttttccaatcgattggctgctggagtgctatcaggtacaactattcttatgtagacgtcttgggagttctctggaaactctatttcatagcctgtccataccctatcagggcccatgtccaagctttgtgaagtccatctctttgcgaaaatcaagcgtatatatacagatgtcagtctatcaatgaggtacgtaaagtgaccattctacctccgaaaatacctactcaggtagatcttactccatgaggttcttcgacaagaatgagtctgataaaagcggtacagaacggatatgattgacatgaaagcaactgccagccgagaagtattcagctgaatctctggagggtaaatattccggtcttcgcactgaaatatctctatttgaattcagccgcgatactgcccatgtgccagcgtctcggcacccttcttatcaatacctctatgccgcttgacgtaaagtggctgggtaattctgtgtatagctgcatgtatatggccccaatagtgggaaaatacagcgctaagtagccacaacgcgcagttgagtcgctaggcggaggagagaaaaagaaatgttatgcgttaatgaacaatttgcgcatacaagtgactgggactgcaatgagctcttttaggaaataatgaagaaatccgccgcttcgaatgcggtcccatggtcttgtggtgcttggtgagtggagatcgcgtagtgcattcgaagttggttgtagagcgccagataggcagggcagtagatggatgaaggataccaaggggccagtgtatcatatcgggttctcaagcataatgcttgaatttctgaaattttcgccagttattcagaatgaatggatcatcccggaaccctgcccctctccggatggtgtgcatgccaaatgggggatttagtgtggtcgtgatgtcgataccctgcggtctttctactaccagcaaaacgaggttgcgaagaaagaaaccggaatcggttccagcgttgctggaaggcaaggccccgaccactctcattacagtcaagcaattcgccaggaagatggcaaagcattttgcgaattgatctggattccctatcttcaatctccgtctggtttatacctgggcactccatgtagcccgtcccctgagaggtagctgcgtcgcatcagttggaatcgccgattcgatttcagtgaagtagtccagccgattccgcgtaaatagcgtgggtcatcgtccgcttacttcttctgctcttggtgtccagcttgctagcttagtgttggtggttagttaggtcgaaccttgacaatggaacgaagctcatcttgcctatttcctggctgacggacactgtcccattgccagattcgggagattaggcagccgaagaatcccaatacacaccaggtacgatatctcccttgatctgcttccatagcgatcgaattgcgttggggttttagttaacagatgtccaacagcagttaatgagagattgtttcatgtcccacggccgtcgagctctctcgcccagcaaaatgggattgtacaagtccctgtagttttatagggagaaagctcagagtgtcggagggaggtgaagggtgagagatggcgccttgatttctgttcagaaattgtgcgactcgtaccgaggcagattgctgaggcagtcagtccatcttcagtccattcagacgaagctgtgcctccaggcatctgcggctcctagtgtaggaacaggcccaagatgctacttactgagtggacaaaagcatgattttgtaagatcatttgtacacagatgtgattcatagcggaattgcctacagcacgtgagggcgcaaactgaaggcgcacctgagagagcttgcggacctcggagcggttatttcctcttcaccacctttcgttctttataaccatcccaccctggtcactctttactcatagtctaattgactctagctttagcagttgcttattttattcttaaaggagagtttggccctgtagacgagatcccaattcgcgtctgctactccaaatctccagcctattcgtcgctcacacagcctcgctatctgacatcctcggtctttgtgcactgtgcccgtctttcaacatgacggcgtctcccaatggaacagactacttggcatcatacaccaagctttcctcctgcatctatgttcatgaaccagaccactcagccgacgacgttggcgactatccccggacaatcgtcattgcattctggatgaacgccttctccagatcgctagccaaatatattgttggataccgacagctggctcctcgagccagaatcatctttattcgaacgtcctctgcagaatttattctgcgtcccacaaagcgggcccagtatgctcgtcttgcacctgctgttgaagacctgctagctcttcctgccgacagccctgtgcttatccacatgttctcaaatggaggtgtatttgccataacacaccttctcgaagcctatcaacaagccacagggcatccgctccgcatctcgtccacaatcattgatagtgcacccggaacagctacacttaccgccagtttcaaggcgttttcttttgtgcttcccaggacatggattctccgcct

SEQ ID NO: 1942 - DNA, 3877 bp, Emericella nidulans
tgtgtttctcatactccagcgtggactggttttatccatgatatctaacgagacgatccgagataagttctaatacgtatacttgtgccactctactacggggcctgatttagacctggctagcggttatttttaggttatgcgacgcagagtgccgccgagtcttctcctgaaatatatccaagtgacaagatgcccgactgcaggccacaacttaccattgaagatgaaacgaaatagtccgagctacaacgttaccgaggcttctaaacccaggatggaataaggaagcttcgaatggcgtaactctggttgccatgccctttccttccataagtacgagctctttccatcctggctccagagttaggccctttgcgttgctcgattcgtcagcagttatggcgaattccacgtccagcctgaagatatttccttacattcacgggtgcctaggcggagtatattgtctagcctgcatatttaccttgacagcagatggatgtcccgaacgtcaatccgacaaacgctttcggggcccctcctcccgctgccgtgcaaactgacaatatggataccattgaagcgaagactgtcctcatatcctcagaaaaaatatctccattgacctatcctgattgtgatgatgatagagagcaagatattgacgacctcatcgacgaacttgagtctcaggatggactccatgataatcctagtcgaaagagtatggactctggaagccggattcctggtatggaggcgcagtttgacaccgacataacgactggtctcacttctgtcgaagcggcacagcgccgcaaaaagtacggacccaaccagttgaaagaggagaaggagaatatgttaaagaagttcttgtccttctttgttggcccggttcaattcgtgatggaggtcagtaacagagctcattttgcccgacttccatcatcgctgacgctgattggtcatagggtgctgcaatcctagctattgggcttcgagactgggtggactttggcgtgatatgtgctctccttcttcttaacgccactgttggcttcatccaggaataccaagcaggatcaatagtggaggaactcaaaaagtcgttagctctcaaagctattgtggtccgcgacggtcgagtaactgacattgacgccactgaagttgtaccgggtgatgttctgaagatcgatgaggtattacccatattgtggctgattgaagacggcgaaggctgactcctagcagggcacgatcgttcccgccgacggccgtgttaagacgaaccatttactgcaaattgaccaatcctcagttaccggcgagtctctagccgttaacaaatgcaagggcgaagtttgctacgcttcatctgtggtgaagcgtggccatgcgtatctcgttgttacggctaccggtgattacacatttatgggaaagacagccgccctggtcaagtctgcgtcgtcgaattctggccattttacagaggtactcaaccgcattggtgctactcttcttgtgttggttgtactcaccttgatcgtcgtctgggtgtcgtctttctaccgttcaaacgagaccgttacgattctcgaattcacactggccatcactatgattggagtacctgttggcctgcccgccgtcgttaccacaacaatggctgtaggcgctgcctatcttgccaaacgacaggcaatcgtacaaagactctccgccatagaatcgttggctggggtagaggttctctgctctgacaaaaccggaaccctaaccaagaacaaactaaccctctcagatccctacacagtcgctggcgtggatcctaatgacctcatgttgaccgcttgtttagcagcttcaaggaagctgaagggcatggatgctattgataaggcattcattaaagcacttccaaactatccgcgcgctaaagaggctctctctcattacaagattcagcaatttcacccatttgacccggtctccaaaaaggtcaccgccgtggtgttatctccagaaggccaggagatcatctgcgttaagggggcgcctttgtgggttctcaagacggtttcggaggagcagcagatcccagagagtgtcgagaaaggatattctgacaagatggacgagttcgcccagcgtggctttcggtcccttggtgttgctcggaaacctgcgggtggggaatgggagattcttgggatagtgccatgctctgaccctccacgcgatgacactgcggcgaccattaatgaagcgaagacgctcggactatcgataaagatgctcactggggacgctgtacccattgcgcgcgagacttcacgtgagttagggttgggaaccaacgtctataattcggataaactcggtcttggaggcggcggtgacctgactgggtctgaactttacaattatgttgaagccgcagatggatttgcggaggtttggccccagcataagtataatgtcgtggatatcctgcagcaacgaggatacttggtggcaatgacaggggatggtgttaatgatgcaccatcgctcaagaaggctgatactggaattgccgtcgaaggcgcatcagacgctgctcggtctgctgctgatatcgttttcctcgcgcctggcctatcagcgattatcgacgctctgaagacttcccgtcaaatattccaccgcatgcatgcatatgtgatctatcgcatcgcgttatctctgcatctcgagatattccttgggctctggattgcgataatgaacgaaagcctgaacctgcagcttgtggtcttcattgcaattttcgcagacattgcaactctggcaatagcttacgacaatgcaccgtactcgaagacgccggtgaagtggaatctcccaaagttatggggcctgtccgtcatactgggtattgttctagccgtggggacatggattgcactgaccactatgatgaacgcgggcgaacatgccgggatcgtacaaaattacgggaaacgcgacgaagttctcttccttgagatatctctcacggagaattggttaatatttatcactagagccaatggcccgttttggtcttctctgccgtcatggcagttggcggcggccatttttgttgttgatctcgttgcaagtttcttttgctacttcggctggttcgttggtggacagacttcgattgtcgccattgttcgtatctgggtattttctctcggcgtattctgcgttatgggaggtgtctacttcctgctgcagcgttcccagacttttgacgacattatgcacttcaactttctccagaaaagggactctgtatctcagcgtgttcttgatgatcttggtaagcttctccaaacagcccttctaagggtccgtgctaaatatgattctagtcgtggctttgcaacgacgatcagaacagcatgagcagagttcgagaacagccgagagggaggacataggattatggaagatggacaaactccgtaaagaacgcgcacagtgttgatgatagatgagtactatgtatggcgtattctattgttatgcatctcgtacatcgagacctcgaaacttgatgataggaacactggcatctgtaagtcagggtactaaaatatagaatatccgcactatggaactataatcattaagcgcgcaatgttcatgtccataaattgctcttccgcaacctgctttgctcaataaatgcttgacctcagcgacatgtactcgagcatgtactacactgctcgtcacacgtcaacaagcagttataggtattggtttgattatgactaaccgccagacactccagcgttcttgcggtctcgtagcccgatcctatattacatct

SEQ ID NO: 1943 - DNA, 2380 bp, Emericella nidulans
acgccccgtggcgtacatggcacattccctttttcggctgcgtgcgcgattccgatctgtgcaaagtattcattttcacccagccgaatacgtggtgcatgctactactacagcccgtctatagatggaatgttctaacttccgagggaattaaactgacagttttcctgttggttggccgtcttcagatgaacatcgaatttctgacagcgcacctgctccgtcctttgtcgtctatcaagctagcgggagctgatcagcataatcgactcttcacctttcaaggtttgacttctgaccggcctatgagacgggcgaaccagatgtgagtctgtgacccatcacactgtcaggttcgactgtcaacggttttgacgtgtgacgaaatagcctactactatggagcagatgctggggctaagcacggaatatctgcccagcctccagaatgcgcccggcgcccgttttgctcgatcgcgcctgtcagcccaaaccaacccctcgattaccataacttccattgttcactgaactgtccactgaatgctcgtgggcgtcgagagatcgtgttagatgtttagtaagaagaaaaagtgacggacaaaatcgatgctggaatataaagttttggcacggtcctgcgtatttcccgcggccaatctcctcgggatcgggtgtgcctttctgcaaaagtttggctgacggcatgtcgctcggcgccactttcctgcattctatggagtacggagcaggctcagacacttctgactagtgcctacttctactaggatatggtcccagatcgtcgaatcgtccagatgtcgacgctgcagcctcccagtcagcaatggatattaactcctgtgccgatcgtctgcctccaacaagcaacggcagtattagtctgcgcatcggaaagtgacttatgagatgcagactgcccgcgaaccgactaccaagagcgcacgaagtttccatctccaccatatattacaccgtatacagtatgccataatggatttccatgtggggggaggtcatggcactgggtaacacgcttgtcagatctcgcggcgacaacggcgcaagctgtacgacccggttggggctaagtccaacagcacgcgttcatcacaactcgcaattctcacaaatctgatatattcgaggattgtcaagccttcaaagatgctcttcccattcggccgaggtccagaatagcgtcagtgatagccttggaactcggacgactaacctaagatggccgaccatacatgccattatattaacagtaacaccgggcgatctagctcctatactttctagtccctggactctggcagctttcaacccctttcatattgaacaaagaataggcaccggggaaataggtttcgttctacgacagcactaatcgctacgggaactgcgatagcatgtgatcgtcgaatcagagccacgactctactccctttttcacacggagattcccattcttcctacgccatagtaaggagctggcttcctgaaccatccagagccctcggagcatagtaatcttgaatcaggacattggcattccgacggcatggcgccagctgagtcggagcttcttctgtctcccggacgcaaaaagtgcacagacagcatggacctaggcaggcttcacagtagtctcgatctaacggtctctccaaacgtgactgggccaattagacttttgtgacttgtgagaaacgttttccgtcaagatcttaccgaatcaaacgttacacagatactgattaggttgagttccggcgccagacccagtccatcacatcctacgtatctcgtagccgccgggggtccccgagtgtgatcgatgcagcacttctcatgttggacgtgcgggtagtgggtgaaacctaggatagagactcaggcaatcgatcgtttgcaagctaggagactcggcagccgcaccgtccagacttaggtgcacttaaccttcgatgactgagcaaagctttaccccactgcggcgatgctgcccgtgtgccaaggacccgtgccataagccatctgacaggtccagctaaacacctatgaattgacatggtttgatgtgatgaactcggggtgcggttgcagcagtcccaacagggccgcgataatatctgatttctgactctgctagcacattaccgcccaggtcccgtccaaagaatagcacttctctccccataaggtgtgatgacttttgagtatattttccctcaacaacatacgcgtattcaattgagccgtccgcctagtcgcccgcccgggtttggtctaatggtgagagacaaagaaaagaagtttgaccttttcagcccattccttccagagccccgcg

SEQ ID NO: 1944 - DNA, 4000 bp, Emericella nidulans
atcagcccgcggggtttgtaggtcgcgcgaggcggtcatcagcctaggaccgggccgtccctgggatgcatacggtttccttggagcagccgataataaatcacgggttgtcgagaccggagacttcgcgagtatcctggctgttgaggaccgcgcgaccccgggggcccgcccatgagagacagatgattccaggtacggcgccgattcatcctctagcccaatctcttcaaaattcccaatatctgtaaacaccccatccggactggacatgcgcgaggacgatcgataagaggaggacttggacgacttggacccggatagttcaggaggcgagttcggtgcagtcagaacggccgccatttcgtcggtcaaccacggtaggcgtgctgtagttaaatagttgaatagaatatggtgtagtaaaataagcgatcaatcgcgtcggtgtagacaagaagagtgcggaccggcagcaatagaaaagaaggactagcggggactcgatggccccaaccacgctgtactaatattccacaaggaggcacagggccattaatttaccagtcaataaccaggactgatatctagggcaggccagacagcggtgcacagtgcgttatgacgccagtggaacgaaaagtgaacaggggttcggtcaacttaagaggtgagactcgagacggaaagggaggagcgagtgggatgggataggtagaagatgtgaagtagaaaagaagaaagaaagatcgacgcaagcgaaggaagggcagttggaggagttatcgacggaagagcgagtgaaaaaagcaaggaaagacgaaaagagtgaagatatgaagctgggacgattccatcaccgactgcgttggaggcgcgaattccaggttctctgccgaacgcagtcaaaagggtctagtccggccaccgatatgagcgcctgaggcagagattattgcaaatcgcccaatggcgcttgagaaacgttggtattcaggcttatatccggtccagactcctcatttcattcgctgcaagcggcgatcaacatcaaaccggtttagggacaaggcactgcggagtcgcgacgtcttccgtcgtcgagatgaaggagcgagcggctgttccaaggcacgccaccaatgatccacaggtgtggctttgaggtttgtcgtgaaataaaagaccaccaccgcaacaacagtaatgaggtctaaaatgtttacaaggtctaaaaggcctaaagtggaagaatgtagcagcaaaattgtttgtttgttgatattgataaagagattgccaccccctgtctgctcgaccactgtggttgtcgtccgcttaaacctgatccgtgggaatgtctgctcagaccacacactgaccatggataggtataatcccatatgattatggttattggaaggaccacaactggtgctcttgggggaagaccgagtccatcccgccctgctgtatggtaaatgctacgctgtagataccgaccccttggctcccttcattgagttggccattccgccggccctgcaatgtctgcaatgcctgcatagtcggacatttttcaattttaatttctctcaagctgtaaggagcaaggtcaaaaccgccactctctatacgtccgattccctttctgcaccgcttgtgccagcaaaacactgttgccaacgctctgccgtgcttccgccagcgtcccgtccagccaacgcagcacgcccgcatactgtgtctgtttccgccccaacacaaattgaaacgccgccccccctaaatactgcagctgaggatgcgtgaccctgcacagaccatgccggccacggatcagtcggtatcccaactgcgttgcatcgtggattgtgcggaccacaacctcgggtcgaggtcgcgcccggcccggcagtgaccgagtgtatcggtacatcttcatcgcggccgtgacaaaggacttataaacgttcagtagtaccgcgggcagtgagttgtgcgtcgagtctaggtacattgggtgcatggattgctttatcgatgcaagaactttccggtagaaggaccgtccgggggttcgcgtggagtcaatcgacagggaatcgctgagagcgacactcgcagaatccgccccctcgagcattcgatcctggtctctgaagatttccagagttcgcgtgtcgatgagactgccgcaataagggaagagtggcgtgtcaacaagtcgcgggatttgcgccccgtctacaaccgccgcgaaattcactaggctcttcgctgggttgacagaaatgccataatctggctgtcctcggaccatgactcgaaggaaatccattgcgaggccagaatccaaagttaccagcaggaagtcgtctaacaaacgaaggagcagggcgtcgtccgtttgtaagaaaccaagcacgtcccgctccatttcagcgtacagcaaactgcacaaaagactagacagcacagaaccctgtgggatacctttgcgctgtcggaaatacttcttgcctatcttgacgagattgttccggatgtgctcgttgagaatgtcaagcaggccttcaccattgtactccttctgcgcgattgtgtcgaccaagacggtgttccttcgtcccactacgcttccattggcgatagcatccgccaaattctctggcctgccaactgggccaactctttggaggtactttgaccatgttctgcgctgctgcggttttcgcagcggccacatgttgtcaaattcgcttgcaagtctcatttccacatatttcatccaatggtagttttcctctgagaccagcttctcgaccagacgcactatcttcgcctgcggtatagtatcaaaacaggactggatatccagcttcacgaaatagagccgttttcgctgatcccagcccctgctcatcagagactctttgaatttcttcagcctggaatgcatatctccaacagagaacatgcttgaaccaagcaggtcgtttcgtcgccctctctcataattcagcatgctgtagacaggcgcgatggccgaattcacgctctgtgctgggtgataccggtttttcccagcgtatatacttctaaccaaggtccgccgtctcaggttaagaattggacgaattcccgtcgtcttcggcagcagccgtagggagccgtatcctatcgattttttaccagacagtagtttctccgccgtttctggtgccaactcctcaaatatggaagccctaagatgcgccaagggctgcgcagtaaggcggcgccaaacgtcatgtcgaaaatagaataagcgataccggtggacttgtgattcggtcacatagaaacttccgcgtataagtggaagaagtatggagtcaaacaggtagtacaaaaattcatggaataactctctgcgcttttgcaagtcagacgctgagatattgttctctgacggagcctgacgtaagctctcaggctccagccaaggtatcagggtgatctgacattttagactaatattcgtaccaagcaagagacggtgcgctaacctttatcccttcgcaaacctcatgtagactcagactttcaaatctacgcatgcggataaatctatccacatggccgaggatcatcttctggtgggtgatgccctgttcaccaaccccgaagaactctaaaggtatcaaatttcgaatgacggctcggcaaaaagctgaaacagacgctgcgggagtggcgtgatccgtcagattttccttgggcttagttgcacctgatcccttgctgaagcctttggcatatgacgttgggcgcagctcgcgttgcatgtcctgatgtgcgagagatggctgggttaccaggcctcttgcgctcggagtagagggccctctgtggttttaagctttaactgtgtcccaagttcccggggccccgaaacaaatagaattgcccttctttcctacctctcaagccgggcaccatccccgtccgggccaat

SEQ ID NO: 1945 - DNA, 4406 bp, Emericella nidulans
atcggcccatcgtcggacgacagtgctatcgtcgtttttcccagacctcgttccttcagccatcctccattctttctgcagtacagtttccgataatcagataccgataaataggtatcttgataagcggctcctattgcctgtcgctcgacgccgaaacgcgacaatccgatcgcacacttccccacggggctctgccgaccaccgatcgcacggattcctaagagctcatggcactctcctttcagacagaaattgtcgcatacaccatccaccccaatatcttcgtcctcgatcgatgagcgtgtctgataagagccgaacatccgcaagtcgcctcaagggtatcggctaaagctggctacatactacaacaatacaagaacataggagtacaaacacaggagaccctgaaagcagtccaactcggctcaggatggcctttgcggtgacgcccgtggctcctctcagtcagggcacgcgacccgatacagaagtgggatctgaaagcccggatgtccctgaggccaacggtcctccgcgcaaaaggaagaggactcgcaaagtccaagtggaccgtaaattcgactgctcgtacgaagggtgtggcaagagctattcgcgcgcggaacatctataccgccatcaattaaaccgtatgctcatgcctttctcccaacccactagcatggatactgatccttggctgccctagacgcccccaagcaaatctaccggtgcgattttcccgagtgctaccgttccttcgtccgacaagacctctgcgtccgtcaccgcgaacgtcacaccacccaaggctcgcagctgcagaaacgtgaccactttgcacaggctgcttctacgagtaccggcgggatcgcgaaatctcagatcgtccatactgcggtccagttaccgcaaaatgcacctcccgtcctatctccgccagactctaaacgaggctcgacaggtccggatcaacctatcgctgcgtcgagcattcccgtttcttcgccgacatctaggggcttcaaccggttcagctaccagcccgccgctcaacagcatgctccgactgcagaggttccttactcccaaccatgcgatttaccgaacactcctatcacgaccacgacattcaattccccgccactgcagcgtccgttgcaagttggttccaatacccgtcatgccctgaatggctcgcctaccaacgagctgggtcctgcacgatcggcagcgttggatgagccgctcgtctccaacaggtctcaagatctcggggccagttacgcggtatcagctgatctgaccgggtctttggtaagcccgtccgcatacactgatcaagcgggcttacaaatccctgtcgatggatactccgacatcaacatggcgccagtaacctcatcggcgtctgctccgctcgatcaaacaaatggcctaacccttgactctatggcgggaatggcagtaggagatatgcaatttgacgggctcaattcttgtgtctatccggtctttggcggtgaaagcaatagatctcctttccatatgggcgatgacttcacggcgtggctgttcaatgaaccggtgcctgggtcatcgatggctccgccggcaaatatggtgcccggctttatggacgcgcagatgcaaaaccagtttttgatgagtgacccatcatacggaaactttctgaacagtgtcatcccagctcatccgatgagtgtgaccagcatccttgatcccgggtccccgcgggccatcatgtctgaggagaagcgtcaggagctgcttgatctcatgtccacccggttcaatgaggctgcatattcggcagtggccaagcgcaaggatgccttgatggacggtgatatggacgaagaccgccacgtccttagtttgtcgaagatgcaaacctacattgggtcttactggtatcacttccatgcccagttgccaatcctgcatcggccgacctttgtagctgataaagcgccgaatctgctgctgctcgccgtcatagcgattggggcagcaacgctggacagtattcacggacaggaagtcaccgaggcagcatcggagctagccgactttatcatgtggcatttgcggtgggagatttttatggaaggagatttccggccgccagccaaactctgggtctttcaagcgctgctgctcttggaggtctatgagaagatgtactctactcgtgcactccacgagcgagcgcacatccaccacgacaccacgttaacgttgatgcggcgcggtacgtccttgattggccgccattcgttcgactctcctgcaagcctgagagatgaccggcagcacgctcgaccacagggtcaacgatgactccggactttgcggcagacgactcatgggcgcattggatcaaaactgaggccactaggcgagttgcctttgcggcatttgtcttagattccacccacgctacgatgtttggacactctgcgaagatggtcgcgcatgaacttcgtctaccactgccgtgcgacgaggccttgtggtctgctactagtgcttcagaagtggctcgggtgcaggcgagtctacatgccaacggagtcaggccggtgatgtttctagacgggctcaaaaggacactcaacggacagcgggtgcgaacaaacgcatttggaagaacaattcttatggctgggcttcttagcgtgagttggcatatgaatcagcgcgacctgcaagtcagctctcttggggtcgcacatgccctaggaggtcgagacaaatggaggtctgctctactgcgggccttcgacaactggcgacgcgattttgacgaggcactacaaccaggcatggcctcgtaccctaacggatatcgcggtcggtacgcgctcgacgaagacaacgtgtttgagtcccgtgacgtgctgcacgggctggcccatatggcttcgcacgttgatatcgtagattgccagatcttcgccggagctcgtcgactgatgggacgtgctatcaccccgcgggattacaacgccgcacgcgagaagatggtcgagcgctgggctaccaaagcatccgcccgcgacgccaccttttatgctctcaagttcctcgctgaatgtcttttggaccaccaaggggcccattatgaaggagagttgtattgcggtcgggaagattaccttctgaatcgaccgtgggtgatttatgtggctgccctcgtagtctggtgctatggatacgccttggaaggtccgattgcgggcgccccggcgctgtcaacggtcgcggagcagaggcaagatatgcaggcattcttgcgccgtgtgggcggttgtcgggagccgagcgaccttgagaccatgaaaggacgaaatcagtgccttggactattgattattttgcgggatgggttcaccaacgcccgatgggagctattggctgaagctgcaaacctgctgggcagttgcattgataaattgagggaagtctctcaataagataaaaactgatactgtacacgatataccctgagttcgcggttgcacttgtatatggctttgttatgaatatgggtatgaacatggatatggacaaggagtacggagaatatggcggatcattgtttacctttctactttacctatttagggcccaccatcaacggtttcactagacataaaacaattgcatagatttatcgtcatccatctactacaagtagctagacacctttgcggcttaattcttgcctgaaagctacggctagcaaagcggagctcctttggttaccacaacaacgagcccagcccgccgcccaatctctctaacgtcaaaaccatccctctcctgcattccaccaacagcctcagattctcagacaatttgtttttccaaggttgagaaccaaatctagctacgcagtgaactttcgttaccagagacattccatagctttccaaaacacacggaatattcaccatggtacgttgcctcatccgatcactggtttctcttttatcccctgcatggaatgaagtgagggacgatctgtattagctaggcagagcaccctcgttggagaaccctttctagccctgcaccgcgcctcttgttttggctcggttgttattgagctgttcagctagctagcctcaaattcagccgtggttggcgcacggcggttccgaccatcctatcccatccctctcacccaaacaccctgactttcaattcaacccctgcatcaactccaatatccatcacatcttaccccgtttatccttctcattgaaacaacttgtcttgtctgcaaacaaaatgtccacccgctcaccagatcttcaccacgagcaggcctcgacaaactacaaggaagccttctcgctcttcgacaagcg

SEQ ID NO: 1946 - DNA, 5512 bp, Emericella nidulans
tccggagaacgctgcttctaccaccaagcctactgttgcagtttcctgagaacccactgagaaggtcgagccagctgagaagtccaaagcgcctgaaaccggctcagagtcaaagcccccaccatccgaagcgaaagcgccagttgaggagaaaaaaagcgaagagtggcggtccaaaaatactgtccaacagttgttaaaggatgcggaagccaccggcgttcctctcaaagaactcttagccgagcgcacttgccctgtacaagtgttgctttcgcagcttcatatatcgggcgctctggatctcaacaatcatgctttgttcaacccgtccaaccttaatcagcgctttgacatgaaatgcacttcggacgattatgaagacctcaagcagccgattgagctgaccgagcagcaccgtaaagcactactgcgcggagaccagtgcggctgggctcggattctccctcgctgaaacatagatgccttatcagcccccgcggttgcgtcctccaccatttatctcccgaagaggaagaccgctacctcgccctagagaagagcatctcctggaccatcgactccttccaagaataccccgccatccccgtcaccgaaccggatgccacaaaccgcggcggcgtcgtggacgcccttttcgccacgcctgagaacttcaacctctgctgggttgacgaaacttccactggaggcatttccgcacaatctcccatctccgttcactccaccactgaaggaggcaccctaacgtcaatccctcccaacgttctctccgccatggaagcagacagcacacgcaaccacaactgggcaatttccaacgccgccgagctcatgaatgcaacagcgacgtcggtccgctcgtttgctgccgccactgcaaaacacatgcttggtgctgctggcgtggttattgggaatattcctgaccttgacgatgttgtcggtatgacagatgaggagctgcgttcgttcgcggttaagagccagaaagaacttgaggcgtcgaggaaggagctcgatgcaattgacaagaagctcggagcgttggtgaaaaggaacaggaagctcgcgcagcaggctttagctacttagcgcacgtgctttgtttgcatggtatcacgaaccttacatttgtacatttatgtcttcagcgtgcacttggttgtattacttgtacatttgttttcagttttacagttttctctgtccttttaaacatcttagacatgatgcctattacggtatacttacctctagactacctgggacatatgatcgaataaacatcatatcacaaccggtatattatgcatatcacaatgtctaaccttggctttgccgacgtaaaatgtggaaaacagtccgtgtaagtctatacgcaaactaagcacgacgacactgctacgagtccagtcctttgactcctccttcaaacgagcgaaggtcatactcttccggatactcctccagaattctcctcaactccttcatctgctccctcgcctcctccgtaacctcatcatatacatcctcaaacgcaaatcgaatagccggcttcttcgccctctccgcctccccaaactctctcagtacttcctttcgaatactctccctagcctgccgctccatatcctcattccaaatcccctcattttcaagccacttccggagcctgatgattggattatctcttctcttccaatcctcaacttctacgcgcgcacggtacgcaaagctatcgtcggacgtgctatggtgcgagacacggtaagacatcgcctcaataagtaccggttttcctccttgagaaagggccagagttcgagcagccttcatagcctcgtaaacagcgaagatatcatttccgtcgacgcggatcgtgtcgatcccatagcccaccccgcggctggcaattccgtctccccgatactgctctaatgtgggcgtagaaatggcgtacccgttatttcgacagatgaagaccactgggcaggatcttgtagcggcgatattgagaccagcgtggaagtcgccttcactggcggcgccttcaccaaaatagcatgcgacaatgcgtggtggcgtgtcgggattctgtagagcttggagtttcagtgcgtaggcagcgcctgaggcctgtggtatctgggtcgctagggtggaggagattgtatgctgggtcaatttgtcagtgtgaacttcatcaaagggaggagggatagaagtacggttttcggatactcgcacccgtagtgaacaggcatattccttcctcgaccgttatcattcgcattggcgaagagctggctcatgaagttctttagcgcaaagcctcgctgctgaaaaacgccggtttcgcgatactgtgcaaagacgacatcgtccggtgttagagctgctgcggagccaacgctgatgccttcttcaccggctgagacctttcgagaatgtatctcatcagcaaaaactgcccttctaaggctaggaagaggtctcgtaccatataaaagcttaatctcccctgccgttgtgcctcgaacatgatcacgtccataatgctcactgtatatcgcatacccattaatgctgaaaatagacttataggaatgtacacccaaaacccacccgttaacatattcctataccacgccaacgcctcttcattcgaaacactgagctcgctacgacttttatcgatcagcacaccgtcggaatccataacgcggtacgttggaatcccaggtttatccattgggttgatgaaggccatctccgttgtgaatttgctgttgactgcgccgggaaatcggactctacacattgcatgatagttgattagctttctcgacctactctatattgtagaaggtggggacttaccgatctgaccccggacgctgggagagggatgtgctccatcgcttgtggagggagagtgggtatgaggaccgaaagggatgttgaagcggagatttgagaagggaacagcgcacggcgtgcgctgaccgtactcggcccggtagatatattagaggagtcatggctgtgttctttaaatgatttgagtcctcaaaagaaaaggagtgggaatgggaggtttttttgtacgattgaattccccagactgaggccctgggagagtgcggagaagcggttggcgtcggagggttaaacgtcacggcccgccagtagccgaagctcccttatcgactcgggccatttatatctgggcattactgtattgtgttttattataatagcctcgtcgggttgatctttcttagggttgaggacctaaaagtcaactagctggttgggccttgtatagaaacagttactacgcgctctctcagatggactatcaaacccaattatacacatatgacttcgaaatgacatataaagaagccggcgacaggtagacattcatggtgaacatgttccgtcgcttctcttctgcatatgccgccggtcatcatcgacaagattaggaggcaggtttgggttatcgccacctggcttgggcacaggaaaatcgtccagaatgccggactctaacatctcgtacacactggggtgaattgtcgcaccacatggaatatccctcgaagctccaaaatttggtgggagtcgtcgcggaacccacttacccttctctagctcgagacgagttgccaaggggaggacctctgttgtgagagacgtcattacggaagaacaggtgaactggaaaattgggagacgaacctaggatccaccatagcataacagacacatgcgttccgccatgtccaaagcgcagcttatcgtgcggcttgtttgtcttctgtgctatttgatacgctgcagtgccgggctcctcatccctacataaagagtgagtcgcaacccgtttcatgttttctacattttccgacatgaattccagcttgctgtccgagccaggcaggtttaacacttcctgtatcatccagtgaagagcgatatctgataggaggtgcttctgtcccttgcttagaggccacccgccgccgacatcgccatggtttccagcaaaccaaacttctttcaaatctatcgagtctttgtcctttgggtcaatatgaaataacgcaggtttgaactttagccggcgctcgtgtatcgaaacagcgtgacgaatatgccgtgccgaagggctggcgatgtaccggtatgacttgcggaagaacggtatctcgaactgaccaacgctgtttacgcagtcaaaaagaccgaggaaatgcacgccgacgtctggacggcaaaatgtcgtcttgaacttatgcatataccgcgctaactcgcggtcttcttcagtctgtggcacgttcccccgagagctctgatagcgactgaacgtgtcccaggcgaatgggaccatttcttcattaccgcgtgagaggaggccaatgttatggatcatctcggctaggaatcgggctgtgtatgcgccgcgcgagaaaccgaagatatagatatggtcgccagtggagtaatagcgcatgatgaacctgtagcccgcgataaggtggctggcaaacgatacgcctattccttgatctagcagggcgctgacgcgcgctctgaatctcgtccaccagctaaacccgctggtctggcgcgaggaacctctaacataggtcaaggtcccaatcccggctgtatgcgcactagttagttttttcgttttgaagtggtattggtagtcagcttacgctgataataggcatattggccgggtttatgccgctcaagcgactcatagattttgacgatatttgtgtcctcctcggttcccatgtactgattccccgtgccatcgaagcaaagaacaagccgacgaggctgcggtaccgaatcatgggccgactcgggaccgccgaacgggccattatggggcggaggaggcataattgactcgcttgacgctggtgccaaagtatccctccaggttcgaccgagtccaaagtgaatttataacttcacggactgaggtgagatagcaaggtgtcatagcagctgggctgggctgagccgaacaccatgtaagatattgcgtcttgtccctgcgggctctatccaccacgaagcctgattcgaatggcgatcgtcggctgcccagaccagccgttccttcgtggcatggtggctggaggattagtgggcgtgaacagttcatcaagcggtcgagtaaatggtgccaaggtgatcatgtatgctaattgcaactctgcccatcctttggacctttcacgcgggtttaattcgctggaagattcagaattgcagtttgaggcctttgccgtggtgcaggagtgcagaaagttcgcagatcttggctcaaggctcgagtctcgcgaacatcagcgacttgataggcgagaattgtgcccacctgaccgagagtacaaagatcagcattcagatcggtcagtaagctgcaaaacaccctttgacgccctacctc

SEQ ID NO: 1947 - DNA, 3818 bp, Emericella nidulans
attgaatatttaaataaagatggtatgagaaaattataattaaaaaaatatatcataatatgagatatattaatatatatatagataagtgatgaatagtagtagaattgaaatagaaaatacaaaaaataaaagtataaaataattagaaaaatataacagaatatagataatgaaataaaattagattataacatccaataatataagataacacaaaaatagtaacaagtaggtacataataataacgagaaaagagtggtacttataaaaaataaatcaaacagccaatttatggtaataacaaagcacaataaattaatattccccacagaatatacccactatttttaaaatagaaaaatttataaaatgtcttaactatgctgttatacatattatatgttaatattaaatgaaagtaggatacaagactcgtctatttaacaagttagtaacagtgaactaggctcccaaagaatcgtgcaaggaatatgcaaagtcgtgtctctttagcgcatgctgaactggtaaaactccctatccatacgtcacgatctgtatactccagccggggtatgtacagtagcgcatgcgctaatccaggttgggcccgtctggaggagcatcccaacctctccgtcgataataataggtaagactcgggtttagtgacctcatccaaagactctagaaggcgtcttgtcgttgatagaagccgttgatttggcagcgaggatggaaatgtctcagtcgacttggctacgctgcccaggtgcccaggcgcaggtgccaaccccgcctttcctctctggcctcaacagtaatttccggtttccttcattcatccgtccacccatccagtcttcaaggacagggatcaactccatctctcagagttctgctagtctcatttcagccaaagttctgccacccgacgttcgcaaatgtgtctttgttttaatctattttgacagctccgttcagccagggtgccattgacgaatgcgatgtcgagcaggtggcacaacattatcagcctaatgtgacgatacgtcttcaggccttcaccgtctgctccaactgatcgcccatgatcgtcgtgagcatatctatcgtatgtacatgtacgggaggcggctgctgttgtgcttcggaccagccgatgcttcgattcggccacgatatttaaatccaagtggctgggagaaccatggtgccgtcttatcgcagtcaggccatcctcgcgcgccccccgccaatgccaccgttgtccagggtccttgaatgctcccttatccacataacgagcccgaaccggacaatggctggaacttgatctatcagacccagcccccaatgcactgtcggactctacgtccgcactagggctttgattgtccagttattgtttctttcagggtccactcgatgttgaagttgcgtgcctagtcacgacggggaagacctagactaccaacaaaggctgccattatgttgagagcgaacttaccgttaatgatgacaaggcattgacggcatgattgcagttaaccgaaatgacgcatcggcattgtcttccctacccatgccggggcagggtcaaaggataagaaggacatggcttgccatcgcttctaggatgttttctcttcgagcgagcttctctccacaagagcctctgcaactcacggtcgtttctccggtgtttcattgctgcactagtagtgcttgttcttgatattgctctttctttatcttcctcaaactataatatccgcacgctcttgacagtctctcgttcatacctgttccgcaatgagggtcaaccctttgctcctggccaccaccctgggtgtcatgagcggtgtccttgcggcacctgtcccgccctagttcagcgtggtgtagagttatctgggtcctttggcggtgaccatgactgggactggggccacggtggaggtggtcacggtggtcacggcggtcacggcggtcatggcggtcatgacgatgatgacgatgatgatcacgactgggagcctcccacaaccactccctgtgagacagagacggaaactcctccgccagagaccactccatgcgagacggaaactgagacgcctcctccagagaccactccatgtgagactgaaacggagactccttcaacggagtctcctccgccagagaccactccatgcgagacagagacacctcctccttcaactgagactcctcctccagagaccactccatgcgagacagagacgcctcctccttcaactgagactcctcctccagagaccactccatgtgagactgaaacggagactcctccttcgaccgaaactcctccacctgagactactccatgcgagacagagacgcctcctccttcaactgagactcctcccccagagacaactccatgcgagacagagacgcctcctccttccacagaaacaccccctccagagaccactccatgtgagacggaaacagagacgcctccaccagagaccgaaactcctccacctgagactaccccatgtgagacggaaacggagacgcctcccccagagaccgaaactcctccggaggaaactccggccccggctcccccgagtaccagctcctggaccacatctacatctgtcacgattcctcctgatgagacaaccacttcgattcccaccggaacatcacctgagcagcctacttcaactggcacaaccccagctgctccggtctttactggtgccgctagtgtggaccgttttggctcccctctcgctggtgtgatggccattgctgcaattgttcttgctttctgatgaattgataataattgggggaaataatgacattagggttaagttacgttcatggtttatcattaatttatgtaatgtgctatgtttagtagctagtctagtatagagccttcccaggctcgtttgaacttaattactttcttttagatagcctataatcaagattccaacagctgagtgacaaaagtagtcattcgtggtctctgacacagccacagtattatatagttcatcggctgtggctgaaactgtccacttatcttatctatcccgtcaaaggaccgaccttcagtactgagtggcgcggtgagccaactacgccacaacgattttccgcggcagttccaaccttccttcggtttcatttttgtgaactatctcaaacaatttgagggttgtgtgtcaccctcggagctactacacagacactactatacacggactcatcgatctgattctcctttccgcctgtgtcactcctaacatcacagcaaaatggatgaccttcaatcactcgaacacctctccctcatatcgcgcataacaaacgagcttcaaaatcacctgggagtaagcgataaagttctcgccgagtacatcatagagcaacatttaaaatgttcttcgtttgccgaattcaagagcgcgctagaggcgatgggaggtgacctattcccgatgagtttaatggaaagcgtggatcgattagtgcttacgatgcatccgagatataaaaacaaaaataagaaagacaggggtgatgaacacgttgaaaatggggcaagcgatgatatggatgcgttaaatgccttggagaagaaggcgcgtgtcttcaagggcttggcggttccggaccaggagccgggatgggcggaggaggagtatatggaggttgggaataagaacggattgggagttgatgagcacgatgcgaaggatagtgcgatggatgatacattcgcgatgctggaggggttggc

SEQ ID NO: 1948 - DNA, 1363 bp, Emericella nidulans
ctttgctggtttgcagaaatggcgtgatgggttcccatgatagagtgattttgtatgcccagtgcgtgatcgcaacccatggagctggcgtagatcacctcggctgctctgttcagatcgcaatttgtccgtcctctattctaaatctgagcagaatccttacttttgaggccacctaattagttgagaccagctgccaggtgcgctcggccgagttgcagtgcagtgcaccatctcgtccatcacgccatcccggcccactttgatgctatacaagtacaaataccggcgccgcatgcccgcggggtacgaaagctatgagcgcatgcgattgcgtttccaagaaaggtgggggaggggtcctataagtagcaggcgtcgcgcggagtcgcgagcgatgcgggattgttgttgatactatacaataagtatatagattcaattgagaaaggcaccaagcaggcctatctaccacacaacgcaatatgtctacacagcagcaacagccggaccgaccgcgcaagtcgctcattctcaatgcctttgttgagatgtgtattgtctccctactttgccttcctcggcagaatgggccaattccatgctaacggcttacaggcagtggccaccaatcgccaggtctctgggtacaccccgaagacgaatcccatcgctttaatgatatcgaccactggatcgagctcgcgcagctgcttgagtccgcgaagttccacggcatctttattgctgatgttctcggtagctcacctgatgcaccacgcccaccacttactcaccactcgtccaatcccctttcaccattgaaaaaatgaataataagctaatcattgtggcggcaaacaggcggttacgacgtctacaaagggcctcgcaatctcgaaccggccatcacatccggggcgcagtggcccgtgaatgagccgttggcagtcgtgccggccatggcggccgcgacaaagaatatcggatttggggtaacagtgacgacgacgtacgagcagccgtatcatctggcgaggcggttgtcaacggtggaccatttgaccaaggggcggtatgttctcccttgaacctggatgtgggagcgtgctgatgctgatcgtgtactgcaggatcggatggaatgtaagtgctatcgatctacctacttacatattcagcaaccctgctggggaagataaggcccatactgactagatagattgtcaccggctatcttgactcagcagcacgaaacctcggtcacgcagagcagccgcaggtatgtcttcttcgtctcaataccagaaaacaccagttctgagaaatgccagcacgatgaccgctacgccattgcagaaga

SEQ ID NO: 1949 - DNA, 1415 bp, Emericella nidulans
ttgatacactcctccaaccacccgtcatcactatgtctgtctcgtttacgcggtcctttcctagggccttcataaggtcatatggcaccgtccagtcgtcgcccacggccgcttcctttgcgagcagaatccccccggctctccaggaggctgttgcagccactgccccgcgcaccaattggactcgcgatgaagtccagcagatttacgagaccccgttgaatcaattaacctacgctgctgtatgtttccgatttgaccgctgcttataaattattctgtaacgcggatatttgaatgaattgttcgttggaccgaatgttgactcatgctgaataggccgctgtccaccgccgctttcatgacccgtccgcaatccaaatgtgcacgttgatgaacatcaagaccggtggatgcagtgaagattgctcctactgtgcacagtcttctcggtacagcactggcctcaaggccaccaaaatgagccccgtcgacgacgtcctcgagaaggcgaggattgccaaagcgaacgggagcacgcgtttctgtatgggagcggcgtggcgtgatatgcggggtcgtaagacgagtttgaagaatgtcaagcagatggtatctggcgttcgggaaatgggaatggaagtctgcgtcacactaggcatgattgatgctgatcaggctaaggagctgaaagatgccggcctgacagcctacaaccacaacctcgatacttcgcgcgaattctaccccacaatcatcacaacccgatcgtacgacgaacgactaaagaccttgtctcatgtccgtgatgcgggcattaacgtctgctctggtggtattctaggtcttggtgaggctgactctgaccgcatcggcctcatccacacggtttcgtcacttccctcgcacccggagtcttttcccgtcaacgccttggttccaatcaagggtaccccgttgggtgacaggaaaatgatctctttcgataagctcctccgcactgtcgcgactgcacggatcgtccttcccgcaaccatcgtccgcctcgccgccggccgcatttctctcacagaggagcagcaggttgcctgcttcatggctggtgcaaacgctgtcttcactggagagaagatgttgactactgactgcaacggctgggacgaggaccgcgccatgtttgaccgatggggcttctaccccatgcgcagctttgagaaagagactaacgctgccaccccccagcagcatgttgactctgttgctcacgagtccgagaagaacacccgtgcgccggccgcagaagccctatgatagggctctaaaactaccccacccccccagcctgatacgcttttctccctgtccgtgattggtagggaagcgctagagtcctgctagtctcagtacaactacat

SEQ ID NO: 1950 - DNA, 1053 bp, Emericella nidulans
gaagggacaaggcgctaagggccggggcaaacaaaatgcagctgtgcggaccaaaatccaatacggtaacgacgaagtaacgacgaatgcgggagtcagatacgccattcagcagcgtcaataaagtttaaaaaaaggtttataagttagggaaaatgccagaaatgacagaaatgacaaaggaaagactcgacgggaatgggaaatgaagggattaaagtgagggagaaatataaaacaggacaagggactgtagggaagagaaggatgggagggaaagagaggggaagtaataagagaataagtataggaagtgatgccagttggacaacgagacgagaacgctcgttgggcgggggacgaagaggaaaggaagggaaggggagagcgcgacgaggagcagaagacgagtgctggagcctgagaagctaggcagggcaccgaggcagggctgatgggggctgaagcatcgacattagtacactaactagtctatggggaatgggccatttaatcgatctgatacacaggaaatacgcaacaagacatgaaacaaggaagcagttcatagcaatcagcgttatatggcagtctaaacagtctaacatgatctcaggtgcagctaaacaatggaaccaaaataaggttcacggttactgggcgtcaatccatgctggacgcaaagcctgaaagcctgaagacgcgagtcaggctccaggtttgcggatcgagatgatcacgtggtctatgatcccgctgtgtggtctcccaggtctccttttgcttggtcttttagtaccccttaagtaaggtttggtttggtttggtttggttttattatttaacgtcactcggcggatcacggggcccacgtgatctgcggcctcccagggggcatctggacgtgctacctaaacagaactgcctaggaactagctagatacaggtttgaagcagcaactatggacaatatatgttggaaataagcggaggaagcacccgcgctgccctggccaggtcttcgcaggcagatgcccgttttgactacctata

SEQ ID NO: 1951 - DNA, 4469 bp, Emericella nidulans
gggggcggccctcgtgttagatagaatcctggaccctgtgaaatgttgtgctcgcgacgcacgaactgaaacacggggggagcttttaaaacaggattggggttgtggcaacatacctggtccagatggcgctggttggcgatactatacgcctctgctgcgttcagactagcacgagcgctggcgagcgatggggcgtatgagacgctatgggacgaggattgctggaggggcggatgctaggagagcggcagctcctcgtccgccttgagcttcttgctcttcgggggcgtgacggtcttgtagaaggattcgagtgtgcgtttggccatgactgatctgtatacttgagatactgaccagtaagagttcgagcgatcatcgtcggtctaggtgtctgagctgtgaatgttgatggatgatgtcactgcaacgtcctcgaaattcgtgctagaccaagaattatctgaaatatctcgagtttgattctatgcatgttttggactcaggggccgaagtgactgttgtcagtgtcagctatatatagtttatataggttgaggctagaagctggcagttggaagcgaaacctaacagcctgtgcacaatatgggcatacatagcaggcacatgggttatgacatttatgacctttatgatcgttgcttaccatttatgcaggcattctccatcgaagtgaaccacggattggtagccggctctcacaccattctattacccgtatgaacacaacgattcccctagttcgtacctctagttcgtacctctagttcgatgcctttagtgtttcaggttgagattcagtaagctaaaatatcagctgaggttaagcagtcagcactactcagcactgccgcatatcggctaccgcaatgttggatggcatcagcgacaatgagtttcgcagctgcccgtcagtttggtaacgagtatacattgctgggtgtcgtataagcatcacgggtcgtatgttaagatcgtcgcttgacctgatatgaaacagattgtgggcaattcagagcgtggctgttcgttgggcgagaccacgtgcaatgaggctgaatcggtcccttctgggaactcccactgtggccagcaccaactccacttcatctcctctcactcatcgcccactccaggcacttttcttttctggcgccttgtcctgtccttgttccggtgtttatttttgatcgatcgtattcttttctttatcttcttcttgtccctcgctctgtcggggtttctgccaatccgtttatctgccgccctattgttaagacatgagccagcctgttcccgaccggatcccccagaattgacggtcgcactcaccgcgccctctctctcccgaacctcaccctccatctcgatgttcgcttcccaccatggcgaactatcacaatggcaacccgccttacggccagtcgggaaaccagccgcactatgatgcctacacccctccgtcgaccgacccgccgcttcgacgtatgcccagctacagtgcgggggacgactccagtctcttcgctccccaatccagccagtcgagagttgcggagagccaccgctatccgaatcgtgcgagcgtgggcgagtattcagggtcgtttggccagcgcgataactacgccgatcccagatatgcccatcttccctcggcagcttcgccgcgggcccgcgcccagtcccagtcgagctatcaataccagtacggctcactaggaccgatgtcgcctacacagccctcgtacaatccccagcagtatgccgcgcccccgacgacgtcacaacagcataccgggtacagcccgttgtcgtatacctcatcgaattcgtacggcaacggtaacaacaatatatcgcccactcatcagccgtacaacccggccgcttaccaagcggccagtcttggaaatcttgggtctcccacaatccagcgccagtcgagcatgcttttcgctcaaacgccgctctctcccaacccgtatggatcgccgcactcttccttacctccgccgcctccaccccgtggccctgaccatccctacggcgggcgaccctcagtggcatatcccagcacatcacctggagctcagtatggattttcacaacactcatccaccgcttcgacctatagtcttgcctctcccaccacgccgggcacagcctacgcgtccggcagcggatctctgtccagcatgacatcgttcaactcgcggccgtaccgcggagttccgattccatcgcacatcttccatccgtctcgcctttccgatcctagccggacgccgtccgtagacgaggagccgcctgagcctccagcgcacctttcttcgggcgatacttacgacaagtcatatggtgaggtgcgcataccagcgcgatcccttccgacgccgccggtacaccagccccagtcgccgctgtcgccccaaagaacggacacactgacgcgacatccccaggcgcggccgcttcccgggcccccagtggagactgaatatgggcatatgaacggcacagcacagcccgctgaccatacccctggttatgatgacttggtccgagaagtcgacgccgctatcccagacaaacaatgggcctcttaccagattgataggccactccatattgacgggcattcccaggattctgttgaccggctgaacttaccggactcgcgccagccgtcttcagattcggttatcgcccatctttcccctgatgagagacacacacatacaaacggaagtatggccacaggcacctggcagtatgtgaactacgatgcctacagcgatgagagcgaagctgaagccgaggcggggctggcaatgctgcggatggccgatgaggaggagcgggcccaggccgagcggttgcaggagcgggagcgtcgggaaacgaatgcctcgacgaccagttcgcttgcaaaacgcccgtcagttacggctgcatcgccgatccaagccacccgtgcagattggtatcccacccatagtggaaataattcgctaggacattctccgtacgatgatactgctctaggcgcacccccgtacggcaatgaagccgactattctggccatcatcaggttgcgacttcgggctcccggcacagctccaatgcttcacgcgaggatcgggcggagtactccgatgaatatgactatccccccattgaagacgattacgcgtttcatccgttccctcagctgccttcaaccgcacgagttgacgccggaggcacaggcggtctatcggagcccagcgcatataaccgccggatgagttttgattatggtgaggaaaccgatggctccttaccgcatcgcaggcaatcgcaccactcaggaagtgaaggttcttttgaagaacctggggatctgttcttccatcctggaatgcgaccacttcctccacctccggaggagcctgcggataacgcgaaactactaccgcacctgctgccagccggcacataccgacaattggagccggactattcatccccatatgttccggctccttctccagatgtgtacgcaacggccgcacccagccctacccaattctcgcggtctacatctttgacgagtcatcccattgcgcctcgtgctgaccctcctatcagatccaagaccgatgcagataagttaaaatacaagcagcaacaggagatgctgctgcggcagggagccctgaagcttgattcacctatggatgctggggccgctgcaattcccctcgatctacctgtaatccccgccggtcgccgcaagaagttccatccgtcgaaactgtcatccgaggatttccgacgttgcgctgaaccatgggcgctcagcgctgttctaacctggatccgggatctatctgaagaggagaatgacctgaaaacccacgccgtagtcgatgctatcgtcgccttgtttactcacaaagttccgacgatgaatattgccgatgctgagacccttgcggcgcgagtcgtggagaacatgtttgaccaaggagctctcattaaggacgaggaatgggtcaagttcggcaatggacagatttctggtgtactgtttcagattacgggcaccggctgctactcgcctgtgttacatgagcaagagacggatgccgaagttgttggacgctgctactcgcatcactgcatgcggacgctaaggaaggtgaatcttagggcgcaggacatggagccgcagaagaaggcggaggattgggtgacattctacaaagtttcaaaagaagtattggaaaagcaccctaagaaagagatcgaccggcagaacaatctgcacgagattgtcactaccgaagattctttcatcagccagcttgatgttttgcgagactgctatcgcgatcgactggcaaattctgaaccctccatcatcccgccgaaacgcgcaacgaagttcctcaatgac

SEQ ID NO: 1952 - DNA, 3784 bp, Emericella nidulans
gacgaaccggcttctggagctactaggctccaaagggttcacgcgggatatgtgcgagcagctgaagcggagtaacatcactgagctctgcgggcagggacacctctaccgggtgccgctgctacatcacgccaggatggacagccgcctggtcctacaacacagcctggagtcgtggaaaatgcccagactaagaacccgaatggctccactgagaacaatgacgacgacgatgaaggtgttttggatgttgcggctattgttagcggcaacaccagcgagttccttgccgcgcgggagaaagagaagggaaataaaaaaggcgctgatcagggcgcgaaacctgttcgtcttcccaactctaagaaggagaaggccacgttccagtaccaggagttcgtcaagttagagccagagaagcatgcgcctagcggtccttcacgcttcatccgccagactagggatattgaagttggcgttgagcggttctttgctgcaacaccgaagcaagatactggagacagattgtctagcagtattcttgaggatatagcaactcagatccatcacaccatcctggccgtgccggatgcgacaaagcgcagtgagctatgggattcactgatcgttgttggtaacggtagtaaagtaaaaggttagtctttctctctcgaagcattcctcgtcccagtttatttactaaatattgcaggcttcactcaagccctcatcagcacaatcactcagaagtttgtcctctcgccgtccggcacaatctttacttcagaaattccatccaacttctccactccccttcccaccggcggaacaaatacccccgccccgggcttccctggtcaaatgcaccatcccggcggacaaggtgtaaacccccttcttgtcgccgccactcactccggcaatcctatgcctccgggaaccccttcaatggaccctctctcccatcaccgctccactggccactcgcagactccgacctctgttcgcaccgtaaaaccaccagagtacttccccgagtggaaggagcaaacagcaacccagcagcctgcccagaatcaaccaggtctcaatgggcccggcggtccggcatctagtggcagccaccgtggtatggaagaagcagttttccttggagcgcaggttgcctccaaggtggtttttgtgatcgatcagggcctcagtaagggttttatgagccgtgttgagtataatgagaatggcccgtcggcgattcatgagtatgttatgtgagcttcggctaaaccgattatatggatgccaatccactttcgcctcatctgtcattcgacgtcgagctttttacttctcctcttcagtgcttttatgtatcgtggtttttacgaggcgtggtctgttatttcagaaaagcaatctgttaggatcatggtaggataggcggagttagtcaagtagtagatatcaatgtattcgtttaataactatgggatcttatagctttcacctcttgacgcgagtacctacatctcgaaatggaagcacgtgatactgacacgtgactctgacggataatcagcttatcgatcaccgccactagcctccgctcaacttctcattgacctaaactccgtacattttgcgcttgtcaaggatattgatctgttatcgcaaaaatgccgcgcgctgaagctggaagcacgaaagcgctcagtaacaagctgaaggccgtacgttttcttctgttccagacataccttttcacagaatgaagagctaacatcgtgcagaaaggtctaggtcgtctgcgatggtactgccaagcttgcgagcgacaaatgcgcgatgaaaacggtttcaaatggtgagttagtcgcatcctatagatgaaagtaattttataacagatgtactaatggttttcctagtcacgtccaaagcgaaagtcacgtccgacaagttctgcttatcggcgaggatccgaaacgatacattgaggatttcagcaggcagtttatcaagaatttcctggatctgctgcggactacccacggagagaagaaggtgcacatcaatcagttttatcagcaggttatcgctgataaagaggttagttttaacccatgctttatacttgtaaaaagagttgttgctgacctgttttgctgtagcacattcatatgaacgcgacgaaatggaagagtcttacccagtttgcagcgcaccaaggacgtgaggggctgtgccatgttgaggagacggagaagggcctgtttgtttcgtatattgatcggagtccagaagcgatgcgacggagagaggcgatcatgaagaaggaacggcaggatcgagtagacgaggagcgggagcagcggttaatacaggagcaagtggagcgggcgagagcaaaggaaaagcaggaggagattggtccggaggcgaggaatctgcagcgtaaggaaggtgagaaggtcaagttaaatattggattcggtgcgaaagccacgccgccagcatcgaccgagcagtcgagaacacagtctcccgatgagaaagagaaggacaaggataaggaatcctcctctgcaacgcccgaatcatcagccactgcctctcccgcaccatctcaaaaccctcaggccgcaccgaaagtgtctatgtcgctaggtggtggaaatagcaaacccaaaaacgtgtttgcatccgcggcgaagaagaacccgctggctgggaaaaaagctactgtcgtggcccctccgaagaagatgtctgaacaggagcggatcatgaaacaggagatggaggccatggagcggaagcgcttgggaggaggcggaatgccaaattctaagcggcctaaagtgtcatgaagcgacattgtttcgtcccttatcaaggagccctaagaggaggtctcctcaaccccccgcagctctgcaggctccatcgacccctcgttcttggctggtccagcgagtataatggttggtcgcttactctggagaatttcaaacaatgcacggtaatgactgaaggagctgaaggacaagaataccagaaccatttctcccggtccctgacgtgctttgtccggagtccagaccattgataatggagcagttcatgtcagacgggtgctggcatccgccacactcttcatccctgtatctattcgccgatttgggattattagcgtcaaaataagattatgacggcggcatcacttaatcctggcaggtcagcacgatcggtgccaccagccacaatcaacctagaccctacgtgaccgcattcttcaattcccaatggctcttccactttagaataatagtctttagttgattaatctagcctccccagtgcccgccggagttggagtttccgcttacgaaagacggtgacccgtttaaggggcggtttcagcgcatcggtgaaacgcaattccaccatccagcgctcaacctcattttaacatcgttatctaaaacaacgtcgtctggtgattggagtctcgacaagcctggaccaccgtgcaatatgctggtatctttaccttttcgccctacggggatggtataatagcgtcatctctcccggacctgcagctcaagtggaagatcatctagcttgtcgttccttttggtgtttccattcgctacttcatatcgccggtcgatatacttccgttcattccgaaaatgaagatttttcttttaggcgcggtgctctgtgcggcgcagagcgtcaccgctgccctcgatgcgtcgctccttgaaacctatgttga

SEQ ID NO: 1953 - DNA, 3992 bp, Emericella nidulans
tgtttttgatatagaaatcttccaaatgccaagcaagggcctcttcgtatttgattcgagttcgagcaatctcttctggcgtcatgtccgtattagtcacctgttgtgttttctgtttgggcacgttcgttcgccttggaaccgatccgacagatggggctatttgagcaagattatctgctcgttctttctcgcgcgcaatctttctggcctccatctcttctcgttcaatatcatcgacttgattgctcgtctcagaagattgccttaatccagcttgccctttctccgtgttcaactcatgctgacgtgtccgcggatcccggcgctggagcctaacgggccttgtgaactgagactcattgcggggatccaccgccttcttagaggcgaatctcgcgatgtgatgctttaaaccctccttgattgcccgcttcgtagttacgagaggataatccacgtaagtctcggatactaagggcccgctaaatccactagcagcgaagtcgcttttcgctgcgggtatgtttggtttctcggatggcgcattagacggtgctggtcgtgtaggaaacgacctaagcgcttgcgtgttggctgaagagccctttgctgtagtcctcttttttgggcgtacaagcgggtcagctaccctaggtcgccgaatgcgcataggtggtgcgccagatatcaccgttggagcctgcggggtcgaactgtttgaaggcgtagtagtcatgatgtctgctgctcgttgtccgaacgcaaagacagtacgataatcccgagacaattggagacacgcgcaacatctgacgtccgattagtttcagattggagctcgagtaatatgcattcgcttgactcagtaaccaggggacaatccaaatggagaaagctgacaccctgcataagatgaagagagttccgatacggagagtatgtccgtaagcaacatatcattgcttatgtaataaacagtttgaggaccacttaactctcagaatttggagagccaaagccagcctgaacttccttcaataaattgacgagaattacttcatacattcttaattcgcagtttaaaattctcacatagaaagtaggatacattctttccttctagtaaccgcgcataatggtctacgcagttcagtcgactcacgctttggaagcaatgaggaacaggcccattgtatgtacatttagcatgtacatttagcagccacagggctggcagatgccatgcaaatgccataatacagtacaatcaacataactgctccacctcatccgtgaactctctggtataggtcggcataagctttctatcggatgtatataaatatcatgcattggcaccatgaagcgaaggaactagaacaattccacgacctttctatcatcatcctgattctgccctgccgatgagtttccttcatcctcttcgtctcgcataatgacctggacccatctatcacaggcctcacgaacgccgtcgtcgtcaacacggaggtgacattctcggataacgggatagacgttcactgcccttagtttatcgcgtccttcccgggtagttgtcaacaataaaagcgtctcaagatgagtaacgataattccattatcgctttctctcttcttgtcggggggcagcaactggaggtctgggagcatatttgcagtatcctcttcactatactcttccggccccataattggcagaagtatgtaaggcagaagattcgcctcgtcttcagagaagagggtcggatgaaatggtatttcaaatgcaacattctttatggtcgatgcaacacccctcctccggaccgtgctctcatgctccgtgaaaacggtgagttttgtcacaggcacgactccatcataatcctgtctcgttgtgaaatatttgcggccctcctctagcttcgacaagtcggcaaatagataagatagatagtcgtagttcgcgtgttggttgagtgcgccgtcggcgcctttcacgaaacaatccatcaactggtcaattgcatactcggagtttgagacaggattggccgttcgacgtttaagcgtcaatagctcttttatattctcggattttccaagattggcaaacagcatacagatcccatcggcatttccctctttgttattctgccaactggcttgttagtggaccgatgcagtgagtaaagatcaaaataaccgaggtaacagagagagtgaatgggatagccttggtcgaaccaaatgttgcagaaacctacagtcactttgttgaggagtgtttccataaaagcatcatcagtagcaagtttatctaggatctccttatcaccagaaaggttgacgagaattgttaacgcatcgctcgcaataggctatccagcaggtcagttccatgaagaaggggcagaatgaaatcccatatgttcaattcaaaaaggggcatgctcactgactgtatagtctcgaacaagaagttttaagtcttggataggcaaaagctggtgacgtttgaagatttccggcctcgacaccgaatatccaactaatgttgcgcaggctggatagtgttatcatcaattcagactgtgtttctaagctgcatttaccaatctgtctgatctgagtgtttccatgatggagaaattcaaccaactggaaacgcaggaacaagttagttagggataagcttatgcaatgagataccatacttcgtccagttctgtcttcatactcaggtttttcaggttatttatagtgatttgaccgtcagagcagcagagcaggagttcaagtgagttggaggaaaatacttcagctaactttctcagaagcggggcagttcttatcgataagggcgtggggcaaacaatgaattgaagtcagtccatgaccagcttagacaatcaatggtctaaagaaatattgggcgccctagaacgttaatatttgaatatctacttctcttgttttactagagggcatctggaaaggtcttttgggagacagctcagtgatgataacttagcaggtgcgtctctcgtccattgacatttggaaagggcgtggcccattctgacaacccaaatatcaatatcagtaaactcgatgaggacattttgacaactaccagcgatgccgagcgtggcgtccttgcagctcagcttgttttgaatcgcagatttccggcgtattcgtacatgtccatcgattcgctatcgcaagttacgatttccaagggaatccggaaagctgcctggattcttcgaggcctgcctcgacacagtcgggtgaccatatcaattacaattaggggaattctcagatgttctggctaacattctctgctatgccaaccgccggagctggacctcccgggctgtcttcgcagagatactctgggtctgaggagcttggcccgaagtgggcatctactagatgctgcacgactggccagccgtaggcatttgtgaacatacgccgaacgattatgttgttgtgagcgtcaggttctaaacgaacaaggacctttcgccacgagagtcctcggtggtaagcccgagcgattttttcctccactttgagccccgcgttatttgaaaagtccttcgcgatatcgtaacctgcagcagtatccctaacctgggatgtacgtgccgctacactgcgccggttcacaatgggagggggaatgtccttagggtggtaaacacggtcgtgcaagatcgtacgtggccttgattcgggattgactatgtagtcgactgggggaaggggtggcataaggatgtcaccagctgattcaaatacagttgttcttgggggcgcggtgaagccagtatcataagaatcatggtcaaagtagggtccatcttgctgtctcagatcttgggttatcgaaggagcgatcgtttgactgcgtgtaaggattttagcttgcttgcgcccatgctcctttggcctgaacaaagagaacaggc

SEQ ID NO: 1954 - DNA, 1048 bp, Emericella nidulans
ctttatataatgctgtaaaggaataagaactgtaccaagtaacaaaggtaaattgagccaggattaaagctggtctttcatatcaagcgctgtaatggtcgttaaaagcgggatttaactaatgaaaatccaagactattacctcccttaagctaagaaatggaaacttgtgttggcacgccttaaatgccaatacgtgtttccaatcagtctatccattaagtttgtttgtttttgccgggttgcatgagggttactatcaaacctctttgccagtctgagcctagattcaagggggggcgggctgtccactggatacaggtatggcgtgggctggagtttgcttttctatcagccagccagccagatagctagaagtaggtggctgatttatataattggagaatatatcctctgcaggcatttgacgctcctctgatctgtgtcattgttagtggaagacccaactggtttttacacacagatggaaaggtgaagaggttctccagatgggaaagtacggtgtatacgaataatgatctagacatcaaacccgctggaaacacaccgtacaaaccccctgtccttcctgtccaccgaacctgaaccggggatactgcacttttccccacacaacgagcttcccactcccattgatctggatttcagcagaagtaaaccacttcacaatctcctcctcggtccaattacaacttgtcacaaccaagaatccgcccttgcgcacaaggcttcccgcaatccccggataccgctcacactcgctcttttcgaccatcaaactcacagcatcaaacgttcccttgtcaagcacgatatcgaagccacccttgtcatacgggaaccagggaaccttcttgctctgcaggtcctctcgacaatttagaatgtcacattcttcgaatcgaatttcatgccattcttcttcgccttcgtcttccgccttggtctcgcctccatcatcagaccatgaaccttcgtcatcctcctcatcagaatcacttagataagcctcgtgacgcttggtgat

SEQ ID NO: 1955 - DNA, 2695 bp, Emericella nidulans
tgaccgactaccaaacaagctagctctatacctcactacgcttggggtaataccttagttcatggttgctctttgttttgaaaaatcaaaatgggctttggtcgcaaacctcgctgttttgaaggctgggggcgcggttgtccctattcgagctgatcccattcagcgtgtgcaaaacatcttgcaacagactggcattacaacgatcctcgcctctgagggctttgcctcggcgcttgaaggtttagtgcctaatgtaataactataggcgatgatctgatccagtcgctcccaagccctgtcacgcagcccatctcaaccgttacaccttccaatgctgcgttcgtcatcttcacttccgggtcgactggaaaccccaagggtgtcgtcgttgagcatggcgctatgtcaaccagcatgcaggcacatggcaagaagttcggcatgaactcagagacccgcgccttcaatttcgcccactttacgttcgacatctcgctccatgacattatatcaacgctgcaattcggcggctgtgtttgcatgccatcagaaagagagcgagtaaataacatggccgatgcaatgaatcgtatgggagttaactactcgttccttcctccacgtgttatacataccatcaagccgtctgacgtgccgggcctcaagaccttagtggtaggtggtgaagcggtgcaaccagaatacctggaaccctggctaaatggtgttcgtgtattcaatgcctacggccccgcggaatgtagtatcgccgccacctgcaatgaggttgccaataaagcggatgtgccgaatatcggccgtgcgatagcaggtggcctctgggtggtggatgagaacaactacaaccgacttctacctcttggggcagtgggtgagcttctgatcgagggtcctctactcgctcgaggctacttgaacgaccctattaagacagccaatgcatttatttgcaatcctgcctggatctcccggtactctgaacacgaccattgttcacagcgccgcgagcggcgcatgtatcgcactggtgatctggtacgtcagatggaagacggatcacttatctatgtcggacgacgcgatggtcaagtcaaaattcgcggccaacgagtcgaaatcggggaaattgagcaccatgtcaccgagcatccttctgtggtagagaatgtgatagtttaccctcactgtggcccagcccagttgcagctcgttgggatattgacattgcatggattcatttcttctgacgcagatgagggaatccaaaccacgcccctcgaccagcttccccatgccctgcagcaagcttcatccgtccgtgatcacctacactcttgtattcccgagtatatggttcccaactcctggatatcacttgcagcaatgccgcacaacagttccgacaagattgatcgtcgccgactcacgcaatggctggagaccatggaggtggaacattttaaaatcctcacgcaaagctacacggagggtacgacaactccaagcacatccgaagagaaaaacatccaagctgtctgggccgatgtactccacgcttcgattggaaaggtccctatgagtcgcccgttcttggctgtggatggtgactcagttactgctatgcaagtcgtgtcaaagtgtcgcagccaatattccatctatgttactgttcgcgatgtgctgcaatgcgaatcaatctctcaactggcgaagaaggctgtgattaagaccacgagtcccaacactgacactcagctctctacctcttcaatcgatcaagctccagccgctacaagcgcaccaacggcctttgatatcaacgccagcgacttgtctaagcttgagaccgacgtgcttccgcggaccggcgtcgagaacctttctgcaattgagagcatttactattgctcccctatccaacaaggcatcttgatgagccagatcaaggaccacacaacatatcaagtgcgccaggccggagagattcgtgccgctgattcttcaccggtcgacatgaaccgactcctacgcgcgtggcagttggttgtgcagcgacatgctattctacgtacattctttgtccctagtccatcgggacgggaactcttttatcaagttgtactcaaaagatacactccaacaataccagtgctgcagtcttgcagtagtgatgatttccttgctcaattcgaaggactcgaacgtccggagtacgcccccgggcagccgccttaccagctcaccctagcccaagcttctacagggcaagtttacgcccaggttgatgtcaaccacgttctaatggacgcctcatccatggatctaattctcaatgatctcattctggcatatgataatatgcttccagactcgcctgctccatcatatggcatctatgtctcgttcctgcaacagaccttcgctttcgactccctgaactactggacgaatcaccttgctggtgcagagccgtcatgccttcctgcctcttctaatctagactccggaaagcgctccttgagaacggtttctctcgaagtagataacataaaacctctgcaagatttcagagacacgcatggagttacgattgcaaacatcacacagctcgcctgggccacggttttatctcggtatcttggttcccgcgatgtcagctttggctatatt

SEQ ID NO: 1956 - DNA, 1164 bp, Emericella nidulans
atgtgtgaaagctccggcacctgcggcagcttcagctcttcaccatcggataggtatgctgctcgacagaaactcgacagatttcacttcctggcagacaagtggtaggccatactcggtttctttgtccgcctgggacaaaactggtgaagattagatttgtatactcgacagcctggcgtgaacaggtcagctggctagatctctatctcgaccacctttattgcgttcgagcatgctgcactcgttggaccgtgtctagggcgtgattcggtttgttgaagaccttcctcaaacgggttcctttcatgctggatttggtgagtctctaccttagctacatccgacagtccccttccaagccaacagtatctggttcagagcatccatgaagacgagaatgtcttcgaagtgccagaggtagtggatataattgactggccagtttggctgagatagcagccaatactgaagcaattgggaggaagcaaacgagcgagccacggcatggtccttgaagggcgttctcgttggttggcattttactcaggtcaaggagcgttccgtatatcctggctgctggtaatcaagaccagcttgccttctatacccagaagttgtcttacctgggatctgcaggattcagatgcgctagacgtttgtcaggttctcgtgcgtagtgtaggggttgaggttgcaagggatattgatgggcagaacttgagcaggtcttagggttaaggacaagaacaaatggacgagttgaaggcgttctcagactaagtggataggtgaggttcacggcttctttatgcttgttacgcgccctctatagctgaattgggggattccgtcctttctatagtagctacactggcaggcttagctgtgtgaatagtactgcttgcggactataccattcaaaataggacgatgtttgatgactcgtttctcatgtctatcactatgtacaaattctatatctaaataacatgtaacaagctcagcatccttcattaaagcggtttattagatattagaagccaacaacacgcggcttctcaaatggctctgcaggccatccctgcatggtgacggcatcgtcgacgcagtctcctgacaagacaagcgtatgctccagcaaacaggcgtccttgcccattg

SEQ ID NO: 1957 - DNA, 3186 bp, Emericella nidulans
aaaggttgttgataaggaagggctcgcctaggtggagtattggtggccgatggaatgataagatctatgcccgtcatacccctgggttcgaagcgacagtttctggacctgagcagaaggcacaattggtttggcaggctcatccccgtccgactggaattccgttcaatctgacgccattcgtcataaccttaaatgcgcttactgacagcctccgaccgcaactgccacccactgatacccgccttcgtcccgatcaacgcgcaatggaggaaggcgaatacgactttgccgctaccgaaaaacatagggtcgaagaaaagcagcgtgctaagcgaagggaaagggaagctaatggtgaggagtataagcccaaatggttcagcaaggccaagtgtccaatcacgggtgaagaatactgggctcacaccggtgattactggggttgtagggctaggcaagattggagcaagtgcgaagatatcttctgatagtacaagtcagttatatttttataatactatcagtatatacaagcttttgactacgtctgtgcgagctgcttctatcaggtgtctctctaccggataaatacctagaccgtggcttgtccgcaagccggttaaattcaagcgcctaatgaagattccctgcgcaaaccccgcagccccgccagtggacaaagctgtggcagctccaagcaacctgactgctcgattgacccatttgtcctgtgggccatagcggggagtatctggtcccatgaccgccttctctgagattatttcctgatggacttagataattaactgacaatccacgccatggtataaattccggccactctcttcgcctaagcatgcttttgtcaattatctatactcaatccacacaatgagctcacagaccccaacagctcaggtatgtgctactctaattgggttgacttgtataaactaatataagtagaacctctccttcgtcctcgaaggcattcatcgggtcaaattcgaggatcgccccatcccaaagctcaaaagccctcatgatgtcatcgtgaacgttaaatacacaggcatctgcggcagcgatgtatgtacatgaccacaaacgaccgggacaatcgggctaacacaccaggttcactactgggatcacggagctattgggcaatttgtagtcaaggaacccatggtcctcggccatgaatcttccggaatagtcacacaaattggatcagccgtcactagtctaaaagtgggcgaccacgttgcaatggagcctggtattccctgccgacggtgcgagccctgcaaagcgggcaagtacaacctctgtgagaaaatggcttttgccgcaaccccgccgtatgacggtactttggccaagtactacacgctgcccgaagacttctgttacaaactgcccgagtcgatcagcctgcccgagggtgcactcatggagcccctgggagtcgccgtacacatagtgagacaagcgaatgttactccgggtcaaaccgttgtagtctttggagctggtccagtgggtctattgtgctgtgcggtagccaaagctttcggtgcgatcagaatcatagccgttgatatccaaaagccaagattggattttgcaaaaaaattcgccgcaacagccacattcgagccgtcgaaggcccccgcgaccgaaaacgctacccgcatgattgcagagaatgaccttgggaggggtgctgatgtcgcgattgatgcttcgggtgttgagccgtcagttcacacgggtatccatgttctccgccccggtggcacctatgtacaaggtggcatgggtcggagtgagatgaatttccccatcatggcggcttgcactaaggaactgaatatcaagggaagcttccgatatggtagtggtgattataagctggcagtacaactcgtggcttctgggcagatcaacgtcaaggaactgattactggcattgtcaaatttgaagacgccgagcaagcttttaaggacgttaaaaccggaaaaggcattaaaacgcttattgctggccctggcgccgcataagcgcttgatgccgcgtacatagtgaatctgatataaccattttcaatttactaatttacactatatgatttacatactaagctttaaacgtcgcctcatatctatgaactcattagccatcagcaaccttgaataggacaaagatcatacctcttccctctgaacgcccacaaaccccagttgccacaagaaatgtcatgtgggtcaaggtcattaagatcccaccgcagactacggaatatattctcaccgggctcgagtagaatgtcaaattcgccggcacacttctcacgcacccagttgatatctctctccatatcccactgtgtatagccagtggtgatgattggaaccttggtctccagcagcagaggcaatgtttcctcccactcgtgggagctggcagggtgtccaagaccggggtggaagagcacaatgcagtccaggtaggggtcgaaaggctgaaagtattgtgccttatacatcgtgtggaaataatccacatatgttgttattttcatctgaccacctagtctgtcttcaacaattcctccgaaagggttctcaggcgtgcgctcgggcaggggaaactcctcgtcgcggttcgccatgctctcagggccgatgaagatgagatggatgagagaccgtgggaaaatatggctgagttgaagccacacatcgcgaggtagagatgattcagcgcgcgctcctaggataaagatccgcacaggaggtgcttttactcgcaggccctggatatcgacgccctccccggtcctaggcggatgtagggagtatcgaagggctaacagtgattagcggtgtcaaaaattagtaccagaaagcttaccgctcacactcttaagaccctcggttgtaagtctctgattttttctgatgctataagggctcagttcatgcaatacacttccgattgtgagcgggtatgtcagcatccgcgtcacctgccgcatactccggtcatcattaatcgcatcaaactctcttgtgtaaagaaaagtatcccagttcgtcatgtttatgacgaagttttcatcttgcaggccgggcattacaaactccgggaaaaaacgcccagagcgcagatcatgg

SEQ ID NO: 1958 - DNA, 4128 bp, Emericella nidulans
atccagctagattgctcctcctggtattgtagaacctaaacgtcctccgctttcgacttagaaagccatcaacatcaatacttaacacaagaagtcggaaagaaacggattaagtacacaaatgcaaacaatcagcgtcatgaagcgagaactagcctccagcaggactcgacaactcagttgccaccatgattcgctgtcgaacgttttcgtgaccgtataatatcgtaacatcgtgatcctcatcatcgctgctgtaagtactgtgcgagaaggtacatcactgaagaggaaaagagcgtagttttgataaatgacaaacatatgcttcgggctgaacatgcgagacacgaaagggaaataccggttcccagaacaaaataaggaaaaacgtaggacagttgaggaatgaccgagacaatcaaatgtaggtgacagagaaagagcttcaatgcgagtctcataatcataaatgcttgcatatctcgtcgtgcttttcgtatcgcttagttgccgagccatatatatgtgcttagattcagtcgttctaattctcacgcatcacaagtgtcaatactacttccttggaaaggcagtcaaagtcgttcctgttgaattttgacgctgaacggccacggaggtaggttccttgcgaatcgtcagtatgaaattccatataggaaaggggaaacttaccaaatttttcaacgtgctggcgaacttcagtcattgtgttgcagacgtcaggatttgagtgcagcaagtgatgatgcttggatgtgtcccagtcggagaatgaaggcaacttctgagagatcgcctggaacaaaccgacaatgactccgacaggagtagtctccatatcatggcagaatttctccactgcagcagcgtcctattccttaagttagtaagaacccttgtgcctcaaaaaaaaaggacatacgggagtgcggtagtgacagtcaaactgcatttcctcccagactgcgagaaggattgacgcgagcatgaagattgtaggccagttcttcaatttctcgccgctgtagacactggaatagagactcgacagttcctccaggacatccttctgtagctcacgccacatgctagctagggcgcacttgacttggaaattgatcatcacgggtgccaccgtcttgcccttgaatttcgagctcgggtcttcaatcttgcccaggaagccttcttcatcaccaacgccctccaccattgtgacatgaagtgtcaggttataagcaagaataagcttcaaggccttgcggatcacgggcatctttgtgcggaaataataccggaatgcggtttttagcatctgcgttaggaatggggtgccctcgaagtaatcatcgacgaacttctcaaaggtaccgttgccgtcgatatggcgatccaagtagtcggacagcatggcatgtgagactccttccataccggcggacaatttcgctgtttcaacctcgaactggctgggttcgcggttcataccctccacccagtcaatactgaaacactgttcgttgtgcacatacacttcgcgcgcattgatcggaagcacctgcccatatccgtgggtaatgaagagcgtcctctcttggtctgagaatcccttaatattgccaactgagaaaccgagggtgatgtgtcgctcatagtctgccttccagtccttcataaagtaaccgatttccttaatgtcaatacgggtgcagggaacctgccataatctagcatgcgaaggttggcaacccgcgcatggctcgcccttgtcgcactatttcggttagtgaattttggatgttggtaataagcttgagagtcttacagtcttcttgaggaacttgcaacgtagacaggctcgtaacttgcgaatctcactggcctgctttcgctggtcgggcctcagaggccccttgcgcttccctaccttcttctcacctggctcagacttcccgtgcgattgcttgcggaccttggtctcagcagtcttcgcagcgatcgggctcttgcgagacccctttctgctcgggggtgaagacgagctggctgaagagcgtgtcggtgaagtgtctttctttgcaggaacttggatgggtcggacaatagcagcggggctaattgccgtgggtgattgcgaaccatgagatgtgtggtcgtaggaaacacgtcggttcacgggactgttgaatgcggactcgaaattggtttccgagcatggcgaattgaccggattggagacctccacaaagctgccgtatgatgtcgagtacgaggactcggagagacttctgtcgtgtagagtctgtgtcgggttgatgaagacctgatccgggaaagaaaactcatgtgaatgacggggctcgatcatactccaaccgttatcactacttgaactagtgagcgaccgaacctcgaggtacgtgtccgtcggcgaactgcttccaaccatattctgtggtgccgcataggaagacatgtccggaaggccgtgagtttgaaatccaagcagatctgtctggagatcttggtactgatatgaaaccatgtcaacgggcgcagcgagaggtaaataaggcccgtcgagcaggctagtgctcatgtgaccgtgaggtgccgacatcatatcaataggagacgagtggatagtcatgccatagcttgcggtggtgaactggggagcggcagcagcctcatcctgaggatattgaaggtggggttgtaaatgttgaaattgccagtcaacgatgaggtttggatcttgggctactgtctgctcgaaggagtgaccgctggtttgcaagggtgagatatctcgcgaagcgtctgcccgctggtccaccgccacaggccatgactgagcctgaatgtagttcctcgagtcataatcaagcccgataaagccgtcgccggtcaaatccacattagacatggtcactgtagcctatatccagagataaagacaacaaaagtcgaaatcagagaggtggagggtgtccaaagacgaaagtcgtacaaaagagaagaaaagctggatggaagatgaccacgaagcctcagggaaaaggcactcggatgagcagaaagcccagaatccgggggtgcgagaggaagaagagggcacggcgataggatgagaccatggcgggcagaagcggtggggagcaaagcagcggtgaagcggaaggtgcgtgagccggagatacgctaggggaacctgggaaggagttatcgctatcggggtggggcaccgcttggccttcgagtaggaagactgcgtactgctgctaatgccacgcgcgtggcgctttcgttggttggagttggtccaaactcgcacacatgttgcctgttgcagtttagttctcctacagccagcaggattgaggcgatgatggaccactaaggcgtcaagcagccagtcccatgattatcatctcatcatcgaactcgaaagacgagtgctggctgcaactcggagcccgcggcgactacgactggaaattggtcatagagatactcaatagagagtagcttactccgtctgttgagctaacaatgcccacagggtccacggtacggcccttctctttttcaggaataagaatgctgacttgctgacaggatcaatcccaatccactccagagtggtgattctacgttgcagttggcgctcgtcatcaacgtcctgcatattgcttcagtcgagactcggccaaacctcaatgcctgaaggaaacgcctgggtcttcaaaaaggagtcccatggcaccgtgcggctttgccgggcgagagacatgggacgcgctctcgggaagaggaagatcagtggaaattcatggcctcagatctgttgaggcgagcgccgatccgcgggcgtggcaataatacatacgcaggaccgtcggaggcgagaaagcctggcccggactgaccccgctgaccatgaagcacaaggttgtaagcacggccgtgtcaagcagctgtgacagggctgctcggagtaaattcgcttgcccgaggactcgccatcatatggagcaagagcattcttctgtcgcttaattctatttgtttagtgaggaagaaacaagttgaaagtcatgt

SEQ ID NO: 1959 - DNA, 1913 bp, Emericella nidulans
gaactaatgcccgtccgtcagagttgctaagcctttcaccctccctcccgaaactcacattctacgcttccgttacaccacatacatgggtgagtcgcacccggccgagaataaggtcgtcgtcgaactctccagcagcgatctcgtccccaggtacctcaccgaggcgcagcgccaaaccctcctcaagctggtcggcccccgctacaaccctgatacagacatcatccgtatgtcctgcgagaaatttgacacccgcgcccagaacaagcgttatctaggagatctcatcgagaccctgctcaaggaggccaaggaaggcgactcattcgccgacatacctctcgacctccgtcaccacaagccgaagaagacgctgcagttcccgaaagaatggatcatgactgaggagcgcaagaagcaactcgaggctacccgtgctgagcgaaaacgtcttgagcaacagagacagggtgttgtagatggaaatgcggtcattgcgcaggcggtcaagacacttcccgctctaaatcctgccctgaaggctcatgcgacggcggagcgcgagaaggttgctgtgaaagtcggggctagggggcagaagcagaagctacgctaggagaatatcatgaagtcagccatggacgttgatgttgtacaatctctgtatctttgcttgaggatagcgcagggccgtttagactatttttcacgttaatgtactatactattagcactttatcttctacatacctcatttttcgatacaagaaatagttggcagccagtaatatcgggattctataatttgttattccgtaaaaatcctttttcgcaacggaaaccctttgtagttcagtaagatttcaccttataacgccgggcggcttacttctccgctttctacgtttctatcctcgtccgccgtcgttaggtacattatgccggaccgaagggaagtacatataaacgggagacccagtatagtacaagctaagacggcatagaatgacaaacaaattgaaaggtgagagggaaaagaaggaaaggaaagcacaagcaagaaataagaagagagagaaggaaatgaggaagggggaaaaggaacagagaaatagaggagaaaatagagaaagctgctgaagaaaacggagaacaataagaaaaaatcggtgtagatgtcgaacggtgataatccaaccatggccgactgccttcaaagcaagtcggtcgttgtatgtatgtatcccaagaacacccgccgatgaagtcccttcgtggtaaaggaaaggtattgacgtgggggaatagcgtgtggttctcttaaagccatttgttatcgaaacaattcacatattcccttcaccttactaattcatatacgacacatacatgcctctgttgccgaaaaggtgcagtaggtatatttaagcgagaagcggccaccgttgtagcatattgtagcataatatgggagtttataccctgccctgaagttggcgtaaaccagggaagaaacaaatagccaatgctcgcttggtgtgagaagaatctattggtctgatgtcggttttggtagaccgtgatggtaaatagtcttgttactttttgccgcgcaagtatgtatcatcctcaagaggactcaaccgattgtttgccattggatctcttcgtgccaatcgtaccgaaagccttggcttgacctctgttattccttccccggccgcggaataccccagggctagcgccaggggatgaagcgcttggagatgggccacgagtgggcgggttagagttagtacttctgcgaccaatgtccgccaccgggctggcaaccgcggagccagtggtcttagaggtgggcgaggccccattagacgatgccgtggcctggttatgtatgcaacaaggtg

SEQ ID NO: 1960 - DNA, 2743 bp, Emericella nidulans
cgctaaccatgctaacacccggagagggctctggagcgggggatttgtcgagcgagctatccataccttcctacaatcacctgctgttaacagcagacgcggatggcaagatgcactggatatcatccctgagaatcttcggcctgacgtattccgtcttgatcgcgaggtggccggcgacctcccagagctcgatgattcgagtgcgctgaacggtctatgtgagttaccatatagcagggtcggggcggatttcgcgggttgggtttaacaagtctacagctgactgtgtcaaagttatcattcagccggttgtccttcacggcagggaatgattcaagaaaacttcgatgactttacggaagggaaacagcgttaggactttaatatcggtgtcgtgggataatcaagtcgtgaagcctttttagtctagcacaggcaggacagataatcactattgcctgcaatatctgcatatacatagtttctatcacttctatcatacgctctaccgcgactcgtagtactcggtgttcatcccccgttctatggcagcaatctgtaacgcgaggatgccagagaactgtctcgaccatataaagctgccggtcatgtaccagaatcccggtacaccagtcggtttccatacctacaagcaacgttagccggctgcaaccataagatttataagagtttaatcaataaaacgcaccccaatccgttcctggctgttgtgtaaggtgcatattcttgccaccttgttcataacatcctcgcccatgaggcgttcaatcagtttagtactgagctcaaaaccagtcgccagtataacaacctcagattcgatcttggtgccattggccaagattaccccgtcttcgtagtacccctggacgccttgctcacattgccggaccttgatcctcccgtcgatgatcatctggcatgcaccctggtcagcgtagaaatgtccgcccttgatgagctgataatctaaaaggctgtctccatcccccctcttaactgccattccggctttttccagggcatctaacatgtctttgtcttttgccgacatcatctgcgactctccgacactaagagtccgggcaacggctattggcagtgagtggctcaaaagatccgcatcctcaaggcttacccccggagtgttccacagcggtaattgaatcctctccatcgaatcccgagatacaacatacatggcgcctcgttgcaccatcgttacattctccgccccatggttgacgaaatcctgagcaatatcatgcgcactcgttccagacccaatgattgtgatcttcttcttcagggcctccggcatcagcgccgccgatttatgcgccgaggtgtgcaggatctggcctttaaatgaagcctccccagggaacgtggggcgattcgggattgcgcccagcaaccctgtagcaagcacgacatgcttagcatgaacagtctgtatacagtccttgctttggaggtcgactgtccacacccgtgacgtctcattgtaacgaaaattacttgcaagggtgctgtgcctgacgttgaggcccatgatctcttcatagtgctccatccattttgtaacatgggcccggtcaagatatcgcggccagctggctgggtacttcaggaatggatagtggtccgtatagatgggagtatgtaatcttacggtgtcatatctggctcgccacgagtccccaggacgcgaaaatttgtccacgaccagatagttgaggcctaggttttgcaaatgcgcggcaagtgcgagtccacactgacctgtgaggggtgttagtgctttgcttccgacccacttgaaattggtttcaaatggctcacctgcaccaacaaccaaaacctgcaggccaccgtcatcgctttggacgctggacggctcagttccataaccagaagcaccagcctgcgcttccgctttctctgccctcgttgcttccagctcatcttggccgtttaaccgctccagcacagtaaacaccgtccaagccttccactcctccggttccacattagccaatctcagaacgcccctcccggtaccaaaagtatttctgaagctgaacccagcctggacgaactgcaacccaccgatctccacaagttgcggtcgcaatgcgccgggctgatccgctttgggctctgcaaatccactcgtcgaaccggctaggtactcacatatagccgctgcgccattatgggatgcgaaatcccacgagaaagagacgaaatctcgaaaccacgactctttttcgaggaagaggcttgagatgttgctttgctggccgctggacaatttctctgtaaaggaaaacagccaatcgttgacgatcttggccacgtcgaggtggtcggcattcacggatgggtggagcgttagttgcgggagcaccgccaatggcggaaatataataggcatgataagggaggagtaatgaagaacgaaagaatgtagctgacgattaggaagaaaaaacaaacatttctcttcagtcatatttccagaggatgaatggcttttatacctcaacagctcgaagatgagtagcgttatcgtgaatagtcctagagaaccctaagtcgctagggtggcggtagatacggaacaattgaacccacttgagtattcgtcctagggtggttcagatgcggactgagcccgacaattcgtcttaaccagggatagttttactcgtgt

SEQ ID NO: 1961 - DNA, 3337 bp, Emericella nidulans
gccaccatcaacgccggagaactgcggacgggtaagcgtagcctgcgcccactaaatttactatgagaagaagctctacttgaccctgagtggagagctacctgcatacaacagtttgcaagatttgtgggatatcgctgatcagcttttcactgctttggaagaacttatatatcgcatgccttttgggctccgatacattgctaaagagatgtacgagagccttctgtctagattttgcaaccaagacccgagttttatactccaaacaggtggccattgggtttggaagaattatttccagcccgccataatggagccagagaagtatggtgttgtcgaccggggattgacgcaggagcagaagcgaaatctgtcggagatagccaaagtcattgctcaagcggcttccggaaggctattcggtgcagagaatgtatacctccagcccctaaatacctacattgcggattcgattcagaggcttgggaatatttggggagactgtaagtgcgacctgaagataatttgcagaagatttttgaaatggcactaatcaaaggcaacagtgatctccgtccaagacgccgaaacatactttgacattgatgaattcaacgatctctacgccaagaccaagccgacattatatattaagatgtctgatatcttctccatccaccagctcgtggcttccaatattcatttcatctgctccaatccagacgacattctaaaagaggtggttcgcgacttgggcaatgtcaagtccaatgagaatgagctgatgagcgtcaattcttccgagatcaatctgacactgaacccgaaactcgcccaagctgaaggtaggaagcaattacttctattatctctggcgtacatactaagataactcgatcagatcctgaagcggatatcaaggctctattcatggagaccaagagatgcgttctgtacatcatccgcgtacagtcgggcgctaacttgctggaaatcatggttacaccacccactgaagaggacgaagaaaagtggatgacgttcgtacgtgatgagttaagtgctcacaatacgcaacgaagcgcatactctgaagcgaatagtcttgtagacattgcctctatgagctattctgaactcaaacgaacggctttggaaaacatcttgcaacttgaacgagcaggaaagatccatcgcagcaatcactaccaagatcttctcaatgcaattgcgattgacatacggaccaagcaccgccggaggatccaacgtcagcgagaactggaaagtgctcatatgacactcacacgtcttaacgaacaagctgtctggttagaccagcagctcaagacgtataacgattacatcgagcaggcgatggtgacattgcaaagcaagaagggcaagaagaaattccttatgcccttcacgaaacaatgggaccaccagcgcgagcttcagaaatccggcaaggtgttcaagttcgggtcatacaagtattcagcccgaaacctggcggacaaaggcgtcctagtttactggaagggttatacagagcgacaatgggaccgagtggatctgaccatctcgagtaacgaagttggcgtcttcaccctcgatggaagcagtgggccgatgatggttcctggggccaatgcccaggttcccttggatgacctcctgcaagctcagttcaacaacatgcaattcctcgacttctttgacggacatctgcgagtgaacgtcaatcttttcctgcatctgattatgagaaagttctacaacgaataatattcacagatgctcgagttgtttctcctgggaggtctttgtcctatacgtatgatgactatttgtttctgctttcctttttttatgatatccccctttgccttcatgacatgtacagacagcaaaagcacctatatccaacgagctctcactccgagtacctactttgttatttttgctgttttccatggtttttgttagcgatgattccctccgatttcatttctgcatgctggtcataaagttggtgctgcacgactgcctacacttttaccttctatgtgatgatatggacgaaacgatgtatttatgagtgtacgtatcgactaaatgacttctcatgagttccagagtcttcctaatggactttaagtgcaacgtcttatatgactgagttgttgccgagagtcaggggtgacacgtgacgttgtcttcgggcccgacgggggtgaccagctggaacctgattctctccttcatggcgcccccggctctgaattaccgatcgttctttgggctagctttctctcatcgaattgattgtatgcgcaattagcctcttttatccgcgcaccatggatttcgattccctcaagaaccaagtcagtaacctgactctttatgatctcaaggcgggagtgcgcaaggtccaaaatggtaagccaggctctcagagcctcacgtcaccttcagacttggaaaatatatgctaatcttcttcgtgacaagccgtcatgaattacactgagatggaggccaaggttcgtcgtattcctgactgtatccatccgcgatgtcggcatcgctccgcgccttgaagaagggggggggtactgttatgatatcagtcacttacaccttccaggtccgagaagctacaaacaatgagccttggggtgcctcaacaacattaatgcaggagattgccactggaactcatcactagtgagttattataaacattgcgtgatttgatggtagcgtaacggattcatggaattattgctgatctatatcgctttgcggttaaacagtcaattactcaatgagatcatgcccatgatttacaagcgatttacggacaagacatcggaagaatggcgacagatctataaggtagagatgattcaatatttattctttggaaggtcgctgactgtgccttgcgaaaattcaggccctccaactactcgaatttctcatcaagaacgggtccgaacgtgttgttgacgatgcccgatcgcacctgtccctcattcgtatgcttcgccaattccactacatcgatcccaatgggaaggaccaaggaatcaacgtccgcaatcgagcgcaggaattagtgaagcttctgggcgatgttgagctgatccgcgctgagaggaagaaggctagggccaaccgtaacaaatttcgcggtttcgagggtggatcgggcatgggaggtggaattgggagttctggaggaggtcgctatggaggttttggcagcgatagtctctctttttgcggctataatgggggtggtctacgggggaccgcgggc

SEQ ID NO: 1962 - DNA, 1544 bp, Emericella nidulans
ttttatggacattgccttcaatcggcgactgaggcagcggacggcgactggtccccttttagcaccgatctactgtttggccagccaacgcctcaaattctgtctgatacaacaggatctactacgacgtcattgatgtatacagtcattgaagactggaataggtgagggacgaattgaccagtgttggtcttgggtggcgtacggccagtagggctaacccctctgtgctgccgtggcggacggcagtgataacagcgtcgatgctcttctctgggaagatgtcgacttgagcatatagctgcagctgcacatgatgtttctagagtagaatatgtatatggccctggttcttggtctgcagtaaagcctagtcggcgactcaccaccggtcactctaacgtggaatcgccgattccccggttacgagaaaggcctatttatatcccgaaacagcccatttaattccaatcgtctctagattcataaatcttgaaatagagtacagggcacaatgcttttcgctcgtgctacacggcgctccatctttctaccatcggccaggttggccgtcagtcgacatgcatctacggcatcaccatcaccatcattatcgccatcacaatggcccgtgaactctgctgcccacagtcatagagtcgtggtggtgggcgccgggaccgccggtttgaccatcagtcaccagttactacgatctaaacgattctcccaggacgagatcgccgtgatagacccgtcagcctggcaccactatcaacccggttggacattagtcgggggaggtctcaaagcaaaagacagactgcggcgtccactgcaggatctgatcagcccgcgcttgaagttttatcgccatacagtaaacacgttttgccctgacagcaacatgatcatgcttgacgatggctgtcggatcgcatacgaacatcttgtggttgttccgggcatcgagatcgattatggaagcatcagaggccttccccaggctctggaaaacccctctgcacccgtctcatctatttatgggtatgagttctgcgacaaggcattcaagacgatcgagaacctcaaaaaaggcacggccattttcacccaacccacaggcatcgtcaaatgcgccggcgctcctcaaaagatcatgtggctggcactagaccactggcaaaaaacaggccggtatacctacagaccaggcaccggcgccgcaacagcggcagtagaagaggattcgccaatcaagatcaaattcgcaactggtctggcaagtctattcggcgtgcccaagtacagtgctgtgctggagcagctgcgctgccagagaggcgtcgagggctccttccagcacgacctcgttgctattgagggtaaccaagccgtcttcaatgttgcccttccacatccagagggagatgcaggtaggaacggaaacgggagtgggagcgggacagttgcggcctcgacgacgcggaaggtacagattgacctgctgcatgtcgtgcccaagatggggccgtacgccttta

SEQ ID NO: 1963 - DNA, 2612 bp, Emericella nidulans
caagatcttctgcatccacttcagtgtcttcaaacctttctgaaacccttcttgactttgtctgtttaaacgcaacgcacgtaatagtgcttgaatggctgatttcgaagcgcacatccgagtcgaatgtgctccacaagctcagcatgccggacttcctacccacagccaaaatgcttctaccgccattctcggacgagaatgacagagatgtcacataattcgaggggtcatgttccccgagtggcggatgctgcacgccgaaagcctcagaccataggtaaacgcggtgccctaatccaactgcaagagtcccagcgatgctggagtatgccaacgtcgaacagtagaagtcgtcacgcaggagaggagcatccagagttcgaaagggaagactcggaactatagtgtttttatcctttttcgaactgggttccccttttgtttcagtttatgtcagctccttccattcctgtggtgaaggagatggagaaatcaatgcgagaaatacattgacagcagtcttacgctatacagaagtcatggtgttttatgggtttgaaatacatgaaagttaagagaaggaagtcgacgaagggccattctgctgcctgagattgctcatatgccgaaagaagaggacaaagatggaaagtgagtatggatgagaccgcttgtcttcctactcggaagaaaagaaatttgagacttacattgaccgcgctctaccctcctccaagcattgtctttccataccagtggtgagagtcgatcgaacgctggagatgatgggcttggtagagggtcagatatcgacatgagcttggagttgctgaggactttcgatgcagtatcaatctccagtgcaagagcaatcctagactcatatgtcaagcggtcctctgttgaagagcgagtctgtggcagaaacttggctgtatacatgggagctgtggttccactagcaaatatgctcctacggccatctggagagacggttgaccgtctacctagagcagctgatgttccaccaacggtccaaattgccccgttgctaactcgtctcgtcccatctctggtcccagttgagactgatcttccggatacagttgagtcacccacaagatgaggtccaaagtgtgggctaaagacacggccgggtcttgtagcactctttgttcttcgaattttctttggtgtgaaagggtcctctcctggtgagcggcggcggaagagcttttcctcgggtgacagatcttgggggtcctttccaaccctatatggggtagatggggcgtcaatcggctctcgcaatgggacaaacctgtccggtgaagctgaagcttttatatcgctccgcacagctgcgatccgtcggccgcctctcaccttccctcggccacgatcagggcaaccctgtagcttgaagatgtctggctgaagcgttgatgggccaattaagtagtcgaagtattccagtcttatatccctcgaggcggcagttgagccaggcgatattgttgaatcgtgctctgtagaatccgacatcagggctagaaatggccggtgatgagaacgttcaatggtgtatcaaatatgttgagttcaacgcattgtagatgcgatcattgtcaaacccacgttggtagtcccagcgaatggcaggcccaactggaaacaataagtgcggaatcagttggaggctgtggttatgtacttgaagtcaacaatatatccaaatgaacggaccgggttggtaagctgaatagagtctcctgccgccggatataagactaccagattacggacaccacgggactcttattcgctgctaagagttggaatgatggaacagaaaagggacgacgtgaagctatgttgagtggcagctgcttgtattgacagacaacacgtgactcgcttgatcgggaagctgcctactcagcccaggtgaggtctcgagcttgctctaccactcttctcaccgacaccttccgacaccgctcgggtcaagtaccatttataggagtggaagagcgtgatttgtggcacaggcaagatagtagcccgtgtttaatatggctagtgtaattgtccctttcatggatagacttggccatggttaacggtcgttcgacagcatggcattccccgtcacagctcacttgaagcgactggtgaaacccgccagcaggagctccgcaaaatcgagacatatcgccaactggaatatgtcgttcgcgaggaggtagattgtgaaagactttgttgcttgggatagatgcagcccggctaatcaagcggagtagatcatgaatcgcaaatacacgccggagacattacagaagttatctgaattgctcaaaaagaatcccgagtactataccatgtggaattaccgccgccgagtgcttctgcatgagttttcacaggcagttcccgagcttccatcggagaccgatatcgaacgcatcacgaccctaatccaaacggatttgcagtttctgatcccccttctccgtagctttcccaaatgctattgaatttggaactatcgactgtggcttcttgacgaagccaagcgtcttcttcccaaggccatcgcccgtaac

SEQ ID NO: 1964 - DNA, 4587 bp, Emericella nidulans
taggttaaagctgacacctcccacatgatcgtcgccgcgaggatgggggggattttccgacgtggcaggtggtaaaacagcgcttcgtaaaacagacaggtcgatatcttcgaaaaccctagggcaacaatgaagaggagatcggcggcatacccggccttgaatcccaatatcttcatttagaaaggcatagcagacgggtaaggaacggtacgtaccttgagcatccgagcctggccagtcgcagagctagggccggtgcgtgtcccccacccataatgaacttgagctaacacgaccgaagcctgggtgaacgctatagcctgtcgcttatcagaccccaaaacccaatcgtatatttatcggcgcgacaatagggggaccggctaggtaaacccaccacgagcccggcgaaaacatagtcgtccgcctgtacgattcgtttgcgatgcagcgaaaacaccctcgccaagacacttgccagagtcagcacaatataaaatgaagcgaggacgacgaccagcccgctatggtcgttcttattatccgctgtaagcggggccctcacaccggggggaaacgtggaggtcgacatgacatggagagctagtaaacaagagaacaggacaagacgcggatcattggggctggtcaaggttttaacaagcaagacagaacatgcaagactggctttgctttttacgctgtgcgcctgccatggcagcagcgaggaggtgcggctgtgactgtgagggaccgcaacagcgggccccaacgatcgactcagtcgaatcagaacgagctctttttattgcgaatcagcgatgtcgagtcctcgtggcaatgttttaaaaggggctccggaccgctgaccacgagctgaaggaattcggttgccaaaaagacccggccggttgcacgcgcattccattacttgccgaacgtggacggggaatgtggccactggcattgcatggttgagcgactggtcgtacaggaaatgcagcaagggagggtttctgtgcagacaacaatgaccccgtcgagcttctatgcagatctctattatactccggagaaagcacaaggagctcgggtcccttgttgaactgccagcggactcgagcaggactcgaagaatggtgggctttgctagcgctctcgagatgctaaccctagaaaaggtcgaagccatccccagctcggccaactgtattcgacacaatgcgataccatccttagatcgtctcaattgacgggaccacaaagaaatccagcagccactaatgcatctaagcccaggttgtaccacacaagcacacttggcgggagattccatagccaatacaaaggagaggccgtctcctcgcccggccgagcctattcaatagactcaaaagtccaaacggccgagcccggctcatctcggctttgttgatctcgccaaagctttcacgctggagcagagcgtttgatcgcattcggggcattttaacgtggaagacacgctttctccctttcatggaaccccttgcgtcccagcctcaactgctgaccctgacttccgtctcgtttcacccctctccctcccttcagttgaattttctgtttttctattttcctattttttttttttattgcgtctcctcccctgctagcttgataggaagtcatagagcgtgataaacattgttatcatggaggtgcacactaaaccgccccggctcgggacgatggacgtcgaggtccattcgccagcaggtagccatgagggagggagacaggcaggaacggtgcttgatgataccgatatgcatcgcatgggaaaggtccaggaactgaaggtgtgtttggttgaccgacctgaccgtcaattcgattccaaccctcacagtcttgaatatgacagcgaaatctgcgccctgtcgccgcactcagttttgcgtcggtcttacaggcgacctgggagtttgttttgatgtgccactctcctctatttttcgcaccgaaacaaggctaatccactctgcggcttagctcgaacactgaagggctcgagaacggaggactggccgggatgtgctggtcgatgatctggacatttgtgggctttggattcattattgcctcgctgtcggagatggcttcgatgtaggcacgtacctgacgcttgtttgaacctttactcacttcaatagggcaccgacatccggcggacagtaccactgggtctccgagttcgcatcgccgcgataccagaaattcctcagctaccttacaggtacctggcttctgccatctttttccccaattatgcagtcccagttccaactgaccatgccgcccaaccaggctggatgtccgtcctcgcctggcaagccggttctgcatcgggctccttcctcacgggtacgatcatccagggcctgatcacgatccgcaatccggactacagccctgaaagctggcacggaacgctgttcgtatttgcaatgatctttgtcatctacgtcttcaatgtctacgcctctgacgccatgcccgtgcttaataacctcctcatgatattccacgtgctatcgtggtgcgttatactcatcgtgctctgggccatggcgccccatcggaccgccaagtcagtgttcacagaatggtcaacccagggaggttggaacagtataggactgagtgtcatgatcgggcagatcagtgctatctacggctcactgagtaaaacccctcgccaatccccttgtcgtggcggagtatactgatagtgatgagcacaggttccgacgcaacagcccacatgtctgaagaagtcagcaatgccggccgcaatgtccctctcgccatagcctggggctacttcaccaatggcatcatggccatcgtcctgctgatagcatatctcttttcaatcccctctgtcgaggacgcactttctgacgaaacggggttcccgtttctttatgtattcagaaatgccgtctccacggcgggcgtcaatgggctgacatcgatcatcttgatcccggtgatcttcagcaacatcttcttcaacgcctcgacgtcccgtcagacctttgctttcgcgcgagacaggggtctcccattcgcagactggattgcgcacgttgataagcggcgcaagatccccgtgaatgcgattttcctctcctgtcttatcagctgcttattatcgcttatcaatattggctctgaaacggcgttcaacgccattatctcgctcaatgtcgcggccttgatgtacagctacatcatctcgatcagctgcgtcatctacaggaagctaaaatgccccgagaccctgccggctcgacgatgggatatgggctcttgggggttaccggtcaacataatcggactggtctattcgtgttttgcgctcttctggagtctctggcctggtcagaagcatgtcacggccgagaccttcaactggagtgttgtgatattcggcggtgttttcgtcattagtctggtcttgtatgtgcttaaggggaggagggaatatacggggccggttgttattgtgcagagggtccgtgttgactaaacaaccggataaggatatatcaagtgcgacgcaacgagcctttcaaatccaatgagcttgagaggggaacggacgcaaccgcatcaatacagtggtcatttacaaacaaccggcaatcggaaccatttcagcctgctggcaatggtaagacacaacccataacgtctggttatggaggtgtctttcgaaaaagtccgatgaattgtgcccccgattagcttgttctgtccaggaaacaccttctcggcagtattcataaaggttgtttttggcgtttagtataatcattaaaaccaagatatatagttctacatctaaatcgcacagaatcaagggtggtatatcagagttactcagcaatgaggcaggtaggagttggttcttgcgcttgggatatctgagccatactgcgcagctcggcctcacccacgtatctaggcagccaggaaactttcggaatcgccttgtatcagaaatgaccgtatcaatctctctgttccttaatactggctcgaccttgttgtgtctgaacagccctcagagccgtagccttgaagagctacgttcattatctatggtcggctacgccagatcattctgtcccaatccagcaatcggaccctggatgtcagggcataatcaggagcgtggactgaatagatagatttaaacaggtgattctactccctggtttgctttgttctgctctcaagctggtactctgcttcccgcatgcccggttcgttcggaatctgctcaaagacaaggatgaagctgtctacttatctgcatagttcagccggatgtggcctcagttgcccttctgagaaatacaaggtcaaggctctagcatttcattagtttttgaagattcgattgagttacccctccataatatactcaggatgtcaacttcattgttggctacttggccagcttaattttctcttaaatttgtcacttaacatgttctggacaggctgttgttgcaccagcagtgtgtacat

SEQ ID NO: 1965 - DNA, 3879 bp, Emericella nidulans
ccggtccgaagagccgttgcgatttacgcccattcacatgaaaacgcgtactcatccaactcgccctgcgagatgagagttgtgcaaaagcaatctacgttgagggcccgcttagcattttgtccagagtataacattaatgcgcgactgtaacttaccttaacgagtagacctcccacaacagctgcgaaaatcatccatgaaacccccctttgcgaatctctccaaggctctatacaagcccgtcgatatcccatttgcagctcacaggcgttatcatcgtgcgcccggtccttgaacggccatgcacgatcatgaatactccttaacccgcagcactgaaagcggtcctggattgtgcggatcgcatttgcgttcttttgctggtaaaaggactgccatcgactttcgaggtgacaggggagtatctgggaggggaaaagataggaaagtgccagtgtgccaagtgtcgtgaggaggattgtgtggatctgggatgagaggggtagaatcaacctagcaatattggtattggattcgttgttgaagacgattcggaagttggcaaggacaaggagggcgacgggagtgaggaaggttgttgtgatggggatccaggttgggagtggaaggtagaggcctgtggttcgggcccaagagatactggctgagggtcagtttaacaagattctatcttgtgatcaagtgtgatcattagggtgggcaagctcgtacgctccgaagagaagggaagtgaccgaaagcctattgaagaagtggttaattacagaattggacagttgaatgatagctgacttgccacaagaagtaatgcgtaaagagccaatgatgaatcgcacttgaaaggcattcttaacagctagtttggatgtgaagagccgaaactgatggacggtgaggaagagaagaagatagacggttgtttgtttgttggaagaaggcggggtatataaacacgcatatggtagcctggcttcgcaatcagtctcagtcactgttcctgctgacctatcacactcaatgcccttatagcactggagataagtattcttaggaatctaccaagttctaacaacttcatctgtttgcgatagaaagcgtgcaggtatctagtctgggcctatgcaaagacggctgaagatgtaatcttggtaaaacagctggcgtcgctgcttgagttcaatattgagaagtctgtatcctcactttaccttggagttcatgttggatgactgtttcagtctgaattgaccattcggcatggcagctatgcctttcatctgacctataaaaaggtgtatagttcttctaagagttttgcgttattgcagtctctctaggctttactgatactacagcagattctattctctttgccacagatgcgggaatgataaatatccaactagagtccatctgccaacggaatacccttcaccctctgattgttactgcgctttgttggttgcgcgaattatgctctaactcgccagacatttttggatgggctggccgagtttacgatggtcttcagatagcatccgcttaggttcatctatgttctaaaattctccgagctcaggcatgctccttcattctttgtgaaatcattatgattgcgtctgctcaaaattaatggagttaagaaactggaagggcattcagtttcaataattgagccgcatttctccagcgaatgcctccaacacctcttcagtcaccatcccgctctcctccagctcttccaaccacttcaacccatcggcactctttgcaaatggatagtccacgctatacatgattctatcatgttttgtattacgcaatatacaagccagcggatccaacgcccaattgccactcgtcgtcaaccacaggttctgatcccagacttccctgaacgatctctcctttccccaccgcgatgacacccgctctatcctctgaagcatgtaggggaccatctcacccatatgcccgataataattttcaacttgggaaaccggtcgaagaccctcgctgcatacagacgcaatatatgaatcgccacgtcgccgtgccagccgaatccaaatgagaggatagctgtattcacgtcctcgggaatgttggaggaacggtacgctgtgaaaagttgctgggagggccaagtcgaatgaatatatatcggcacgtccagcttcgtcgcctcatcccaaagcacgtcgaactccggcccgtcatagtatagtccgccttctgtatgactgtccacgagcgccccgacaaagcgtatcccgtcaagcgctcctgagcacatacgacggagttccattgctgcctcctgaggttcatgcattggcagctcggcgaacccagcgaatcttgttggacaagcacgtatggcttcggcaagctggttgttggtctctcggcattgggcgggagacaggtcacccggaccgtgggatattacttgcatggtgacttgcccgtggtccatgtccgcaatgcgcctaggtccaagctcggtgaaattgtcgaagagcccagggatggctcgcattctctcgttgagcgcatttggagatgcgagggcggcgcgcgagaggaaatgttcctcgagggcgatgatcggtcttgcgatcaatttggttattgagtgaggtggcatgacgtagtaggcgttatttttcgttttttttcaacattctatgatgaggaccagtggaagagttggtgttttatactgattgataaatattccacagctccggacactaccgctgctaactccgccaagctccgtcatgatgctatatccgttacccccgtttgttgtgtaggcaccagccaaatagatagcttaacgattgttgtggatgtatcgctagatatcgatcttctccggaacactgtcaggccaagcatggatcagattgaaagaacaatatagcggattttgtgtgccagattcaggccaatttatccaagccacattgagcgtgagcaagatgtcaaattgactggcaagtaagttattgccatacaatatatccataacttctccaggccactgcccgaacgagtttaaagtccttcgccaatactgttagtcttgcggcatgccatacacaacgagtacaaggcttaccatgaacagagtgggaaaatatgactgaatgagtgctatgaagaaagttgtatatatcgtttccctcatgactgtataaacattacaactacagcttgaaaccccttctcgcttctaggtgcattggggggtgtagcacgggactatcgatcctaaataatggttcgcttaaagctttcgtgcaacaagtattccaaaacttatactggatttttgtcctctgactcgcaagccacgctacgattacagtccaagtgacaagagagccctcccaatggcaagaagctgctctgggtgttttaatctcaacttctgcgaggcatgccaccttgagcgtgttgtcagaaaacaaagcaaagttctcgaaatgtaagctctattgtgttgagcatccttaatctcagaaggacacatatatcaactaaatggaggacacacaagacctgctcgagactcgccgagcagtccggaaattcaagccctaactaactcacgtgactatggtggcttcggcctccccgaccgcttacgtagctcttggcacgatcatggggtgatccgatcgtcattccgcctgagcgccctgcttccggcacacgaaggcgaccacaccatcacaaaaggaccatccagagtcctgttattctttcctctatccccttctgttatctctataacttcctacatcttcttgtgttgaatgtacatccaataatagcgcttc

SEQ ID NO: 1966 - DNA, 4222 bp, Emericella nidulans
gcactaagacagcgctcgtgtacccagttggcgtataagcggatccgttcgctgacgttgcggttgccgcagtggacgaagtaacggggtttaggcttagaggtggtgccggaaattgccaggagtttgagccgtattcttcaacccgtttttgaagagccggactgtactggagacgacgggtacgcgcggacctgaaaacttgttgtacaggctttagatagaccgttgcgagggttccgacgttgaggcagagttcctcgagggtgcggttgtcgagtttctcgctcacagcggagatgggtggtttctggcccatgacgacttgacgggcggttgttgggtcagatgaaagaagacgccagtacatgtatcctctgtcacggagatccggatcatctgtttcctctgtacaccattttaggacttgcggaacgagttgctgggccttcgttgggcgctggatgaagagcttgacagttgctgtaagaagggagagttgcacttcaattgtctcgtcgtggaatgtagcgagatagtcttgcaagaggtcggctgagttctcgatgcggtctgcgtactggccaatgatccagattacggccgccttggcttctggttcgtccaggtcatcgatgttttggatgacttggccgatgatgctttcgtactggttggggtatttgcggaagatattacggatgacgacggttgcctcttgcacgatatacggaatcttggcgtttaccaagtccaggagacaatcgatacactgtttggcagcggactcgatcttgatggccagtttcccaatcgcccggactgccttgcgcacaaagtggacatcgatctcagttgcgtacctaattaaattagcagtgctctttgcaaaaacacagaagctgcttactctctcagttctgccagcacaactgagatgttctccttagtggtcaacatgaatatcaactcgagcttggtcaccttgacgtagattgggtcattgtaattgcagaagaagacccgaatgtcgttacgcagaacttcgggccgcttctgcaggataagaatggcattgcggaggacaagatattgcacctctggcggtttggacagaagcgtcacgagaggtggtgataatttctttgagagtgatgtgagatgccgttcttcggcgatatagttcataaggtagaggatgacgcggatggaagtgaggacaacggcggagttctgatgagagagtcgaggagcgatacgttccgccaaaaggagggcttctgcggaatcttgtggaacataggacattagggcttccagtatataggattgaccccatctgcgcaatgttagacacgaacagaacttcagttggtatatccgtactctgaacagtctggtaagattgataccagtttagacgcgcttgcgtaatcaatcgtcaaagatattgtttcgcttcgtccccagatatccactaatgaagccaggacgcttgaaacaaccgttgggttttcatccttcagcatcgcattcagccggtcaatcaaatcggatgcctccaccatcttcctatcatgctcgtagagtttggctacgcaaaaagcggccgtcttgcgaacatagggatccatatctcccatcagcctcttgagcggttgtacagtggcctcgacatattctcgaacatggatatacgcgattgttcgaagcgccaaagcgcggacaagcgggttcgtcgcctccatatcctgcggccgttagcttatatagttgggcagaaatagcgtcgtacattaattaatataggaagagcctttagtgcgatgtcaggcttcatccttgagtagttgaccaggaatagaaagcacctgggacagctgtcaatatcgcgtcacccaaatatcgtcccagacctacatcttcttgatctccaagctcggcaaattcatacagtcgataacatccgggaacaaggcgatcatatcgttgttgctcatggtcatgttggcaacgatcttcttcaacgcaatcttcttggccgaatagttcttgtccttcttgccgccgctgttgagttcctgccggagctcggcaactttgccctgtgaagtgcgaacccatggtggtaagctagattgtacataaggcgcaataaacatggggacagtagcaagtaagtgctgggttggagatgcaaaacataaagtacagatgcagcattagaaagaggagcaaagaggggtatcaagaccaaggaaagagcacagttaattcgcggacaaagtcatgagacgagcttcataaaggggggtagcgataaactatcgcgcaactggaagggccaatgcgatagagatatagtttttttttccacataccctagcgaacagctttgcatctcccccactcgaactcatggcggattatatagcttcacggcagcgaatcggacaggtctcttcgtttcttgaaggatacgggtttcccagtatggttcgcgcggcttcttaggtcgtcgtatcacataagaattgctgagacaaggaggaattcaaaatagcgaatagcttcgacggcgggacgactccttagctggcacgatgcttcgaaacgtccataccttaggttatgacgggatttagactgtcagcccagaagagtcagcgtggcacaagcgtagccatatgcaggcggcaaactcacctagaccgagcgaatccagcctggccttcaactacgagctgagattggaatcatctggcgtcagagagaataggagttcgagactgagaatcaggagtggaccggcgccgccagctccgcggtttttgtggagaatcctttgcttcctgattttccaggcgatgatcaacttcgacctccgctgtcgtgccgctgagctagctaaagctcccttcgcaaacccaggaccttcaaccatctgtaatattggctctatcgcaatggccactcagcaaactctaccccctcttccaccccctaaatgggtcgtcgatctcaaatcaccgttaccgcgcccgtcaatttcagcgtccagcatccccgacccgcccggcttctcgcgcaaggctggtaaaggcgtgggtaccccaaagcatcccatacatatatatacatcatgtcatactaactgtatatatagcgctcggaaaaatcgaccacttcctccgccccgtccaagcccgccgaaaccgacacgctgaagctcaagaaagcttgggaaatcgccctcgcgccgtcgaagcagattcccatgaacgcgatcatgatgtacatgtccggaaacagtctgcagatcttcagcattatgatggtctttatgttgttcaagggccctatccagggcctcatcaacaccaataatgtgtttgccaagtttgattcggagacattgcggggcaagttgctaggtgtaaaggctgtgtacgtcctgatgcagttcgttctgctggggctgggggtgtggaaggttaatgctatgggtcttctgccgtatgttctcgttaccttactcctgctttgtaggaggtccttatgcgctcttctggcttgctaatgtgtgatgacagaactacgagatcggattggctggctgggaatcggagcggcagccttagaaagagttcactttgcttttggttgaagttcttatgtgatactgaagtgggtttatataagagtgattggtcatactcgaaaagaaatttgagcacgcagattgccctaaaactgtgccttgggtaaaatagatcgtataatgcacccatagagagacaaggctgctagtctttcttttcaagagctttgcggcaggcttctgaaaaaatctggcaaaactgccacacctcctcgtacgtgttgtacaagggcgcgggtgcaaccctaatgacatctggcttcctctcgtcgatcacaactgcatattcttccaacgtttctaaaacgctatccaggagacctggagccagccgcaaacttagctgagcaccgcgttctgaggggttcggcggggtaatgatagaaaaaggcttgtcggaaactccatcaagagacgcaaggaggagatgctctcttatagcctgtttcattgaggcccccttgacgaatctcggccatggatgtaaggatgaacagttccagagaggctacaaccgcattcatgtcaagcgcgggaggattggaccatgatacgtagtgc

SEQ ID NO: 1967 - DNA, 2587 bp, Emericella nidulans
atcactagcttgtgatctaagcaggcccaggtgtgggactgcactactgagtcgctcagccatcattgttttgtttatgcaggcaaagttcatacgcccatagtttgagctctactcgcctttcaaattacacatctaccccttcggcaagatgggtgatctgtttgtttatatgtgttttggctttatggctacagagtacttcatcatacgtcatatatctgttcgatacctttattatctagttgctcgagcggccggcatgcggctctttgactataccgtttctcacttgaacagtactgcagttccgatggaaggatcgtatttctatcttcgcttagggtgcaattcttgagggccccttattttggtattgagcagccccaggcctcgccggcctgattttcaaagacgaagtcaattcgccacaggtaggcgtcaatcaagttctgacacaagagctcggcttaaatctcgtctgcgcagaatacgggaggtttgaaagtgataggagactccgtgagagataacactacaggtagattcagcaaccgttcatgattatcttcgccgtagggagtaaacaaccaatacacattgactcgaataactgccatgcaattgagttcgctatccagtagcatactaacacaatgaattgattgattgcacatggttgagaaacaacccccgacccactaacccgccgagccagctatgctagctcaataggagggacagtaacaaccctattgtctaacggaacagcctccccatcaaccctcccgcaagattcgaaacaattgtgcctccaaacgcactattcgcatatgtcgacgcctggctaaagcggtcacagcgggagaatgcagtcgtattcgtgatcgtcagaaccagcgcaatcgctacacggaacaaatcagcacccttccaaccaccgcgaatccggatctgtgtttgcgtagaaaaggtatacgtaccaatcagactcaaccaaatcacactattcagcctgacgatggccaatatgcccaagccaatccacagcgccggcgcaacgtagagactcagccagaagaagcgcttatccgttgccgcgatggtgcgtgtgttcgggtctgcggattcaaacacccagtgcgagtcaccggtggtggtgttgacttcgttccaccagcggaggccgacgaggcgtcgaccagcgatgttcttgaggtagtagaagtctgcgctgaggaggaggagggtcaggatgaagacaaggatgctgcagaagtggcattgttagaacgattgctctggcacggctgggctgcagggaaagggcaggatgtacaagttgtttataaaaagcacgccgaagagatacatcagcaatgctcccaggcggaagccgaggaaagtgaggagggtgattgggtgggcgctgagtcgccaattcaagtctccttgttgaggttgcgagttgagaggttgttgctccatggtgacgggtccgggtacaagagcccgcttagtgacaagatatcagataaggtcgtgtgtcaatttcgtgctttttcccgttcgtggcaacagccgctgccctcgctatcgagagtgagaggtttgagacgatgctgttgcgttgcgtgtctttacctagggcggtgagaatcgatggtcggcagaatagcgtgcgccgcgtcatggtcgaagcggcgttccataaggacttaaataagttagaaatatgcatctcgctgtgctgagctgtatcctatgatgaggactccgtataatgcctgagtttgtgtccggcgctgccagctttacctcaaatgtcgaggcagcgcggtaatctcgcgtacatgggcggccctagcttggagaagcctttatgctcctgttgtctccgccgcctcatcgccgaggatgtcaatctctccaacactcgacattatcttaatgcttctttctgaccatttgacaggctcacttctgaaggcaatcaagtaatatttacagggaaaagccataatggcagccagaaacaccctccgccgcgctctcctctacagtacatcacagctctccccgcatttccctgtaaaacctggggtttagttaaacacagctaacgcatgaggcacccgcagtccccggctcatcgcagcgctttatcaccaaatcgcgctctcttacggctgattgcgtcgcctacgacctcgaagacagcgtcaccccgcacaagaaagccaaagcgcggtcgctggtgcggagagccctggatgagcccgcaccccccagtatccgcgagcgcgcagtgcgcattaactcggtcgacagtggactggcactggcggatctgacggaagttgtacgtcgctgcacatgccgtaagctctcgctgtctagctagatagctaataaactgtgcagctcaagtctccaaatctctccacaattgtgatcccgaaagttaactccgcgtcgcacctgaccttcgtcaacgatgtaataacacaaacacaagcccagcaagaagcgcagggtcgtgcctgtaacgaaatcacccagctcgctcttggcaatggatgagtcc

SEQ ID NO: 1968 - DNA, 2185 bp, Emericella nidulans
agtagctgaacgatgggtctgaagtcgcctcggatttccagacgcacagatcaaaatccaccggttaggcaaaagtcataatactcatcgaataacaagcacgagaaataatggcaagtgagcaatgacggcggtgcaaaaaggtttccggctcgggttttactaagatcagacgacagccagccaggcaaagaatcgggagtggagcagtaccagcgcagtggtatagacagactcgacagccggcggaaccagtcttttgcgtctgaaatgatgctgttttcctgtcggcagagtcgcagggtcgccggttcttcaggccgaccacggttgggcacgcgggctaagatgattctcaagtctcaaaggcgacgatccgacaggagcccttgtttttgtaccatggaggtctgaggtgatgcgcacattggcagggcccagtagatcaggaggggacgccggcaaaattaagtcagatttcagttcggcgacctgcgcaagcctgaaagcctaccttgcctagccagatcgtctgacgaccgatcgagttaagcacgaaatccactgcgtttgcgggcaaaccacgactcgctttcccgaccactccccagcccaccgacgtaacggctggcctgtgtccgttgacgatggagccggctatgcaggtgaccagacccgtatctggccgccaacgcagggtctccgatccttccagcttttccagcttcctgtgactccaggtgtaatgggtgatgtctggtgcgcggatctgggcattccagtcaaccatgattccaaatccaacgtacaggatcttgtgaagaagccaataatgcgatcgctgcgcttggccagtaatatgtacttacctaaactttgttgtatctcatgcgttagcggcgagcattcatagatagctctctcctttctcgcaaaactcttcttctctacgtgccaaagcaaagtctcccgaataacctgctggcgattagcgaccacctcaatctccaagcaagagggtgccgtttaattatccaaatcaggaaaatacgaacctcaatagcgttttcccaccaccaaagaaagttcgacgaaaagcgcggggaagcgcggagcaacgcctacagggcaactgttagagtacttataacgcgcccgtcacactttttctgttctcgtgagctggctttgtcctttttggtcgcgagttttccggcagtgccgcaagcgcctcgagaaggagtatgcccagatcgtccgtctgttcctatccccttccttcgtcgaacgtacctagatgtcttccttcgctgatagtccgtcggaattctattccaggctcaagcgacaatagctttttgtaatgggtgagacgcaacctcacaatatcgtcgcgatgttgaaaccttcttcggccatatctcaaaggcgaggagagccggcgaccaggcgatgcgaaagtaccccaaaagccaatagcgaaggaaggcgaggtgttgatatatcagtgattaggaagcgctatgtaagaaaggaatgtgggattgggcgtgaactcttttcagcgcgaactcttttcaaagtgttatgcaagagtcccctcgcgacacagctgcgtgcgctccattctagcgcggtagatgcatcacatcgactagccttctcacacaggtcgcagagatctgccgcccactgcgcccgcccaggattagaaagcatcgtttgaagcagttgattcgacatgcgctctccagccggttcgtaccgtcggcacacctccgtcaaaggccaagttggtcgatgcggagaaaggagacaaggatgcacgctcctgttggaacgagtcatcaatgcagtgactcgctcccagaccaaggccggagaacaagaaatgagactaactaaccttactctggacttaaggtgggtgttgtcactacgccgcattgcactcaggactccatgtcagtatgaatctggaggagctcgcggctgagccgggcagattacacggtttgttccccagcgtcaaactgtgccaatggtatcttacgtatacggggtgcataggcatgaatcctggtttctagcaaatgcagccgcgtaagaaagctttaaatagtcttcctcctcctgcgtccaatccgagtcgtatgagcgagctgttcggttgatagccattggt

SEQ ID NO: 1969 - DNA, 2531 bp, Emericella nidulans
gacccaaagcgcagaggggtgagacaatgccatatggtaattgcatcgatttgttgcgcgaacaacaggcacctatgccagcttactaccatagggtacaatactagcatactcgtccggcttgaagacaacccccaacccggacggattttacggttgctcgtttagcagcggaagatagtacggctcgttaccagctgactgtgacgcacggtcctgcatacactgctgcagcaccttggctcgtctatgctcgggcttgtaagtgaggtctgtcagaggcgcgatggcgaggacgccgcggattcgtttgtccgttgtcgcggcgcagagggcgacgacggcggagaatgacatgccccagaagaagagctgagatggatatactgaagcctgcgttgaaagaaaggtcaaggcgtcggagtagtcggctgcttgtttgacggggtcgatttcgttgcgcggtgtaccgtccgataggccggttgagcgcggatcgtagaggaggaccgttactccagcagtttggaaatgcagggcgacgtcggggagaccgagcatttctttcacgcaggcaaactgggcgctgaagtgtcagtggcgtcatatggtgtacgctggatatagaagtaaagccaggaggataacgtactccgggggtcatcacaatccccgcaccgcgagcaatggctggatatagagtccctcggagtgtcagtccatcgagagtcttgaattcgatgctttgttcctgtagagacattggttttgctcctggtgtggacggtgacggcatacggtaactgatctgttggttgtggacacgatctgtgattaaagcaggtcaacgtggaaaacatagagcgtagaacacagaataatactgccttggttttacccgaacaagagaagattaaaaatacttgtttctgtaatgaatcaatatgactgcaaggcgagccacaaatcttggcggtttggtcatctgtcacgctataaacaggagggtaggacacaatcccggatgcaactactgcgtactggggcgcctgatcctcagtcgattttgaaaggggtgtaggcataactcagcacgatttcatgttcagcggcatagcgtagccaccttcatgcgagtcgtcggagttggacctcagtctagacatttcaggatggccttgacggtaagcgcaagggctgccattgtctttcctacaaagtttgctgcagcaattcccattagggatgcaggacgcgccgtgtccgctggacgcctaatgcccatcttgtaaactggtccgcgaccttcggtaccttgtggagcatcaacactggtgcttatcaatgcggacgttatattgtacgctggattgcggctcttggtacgagggaccatccgaccaatcccgtcggtaccctgtggacatgccagtcggatatggatgtgctttgcattagaggtttaggtgcggttttatcacatccgtaatcgcagaagattggtgtagggagactcttgatttcactcccgtcaccccaaaacgatctggtggatatctgcttggtttgtaagttcccgttgtgttcttccatcaacagctataggtgctgtgtattacctgttcaagatgaatggaataacctcaacctcgttaccctcacctcgttaccacttcgagcccattgcggtgattgggtttgcctgccggcttccaggaaacaacaactcccccacagcactatgggacttcctcgaacgtggcggagtggcgagtcgggctgttccagcttcgcgcttcaacttggcaggccacgagaacggcagcaagcggccgggtacaatgcgcacgccggggggtatgttccttgagagtatcaatccggcggatatcgatgcccagttcttcggcctctcccgtgcggaggccacggcgatggatccgcagcagcgccagttgttggaggtcgtgtatgagggactggagaatgccgggatcacgctggagcagctgagaggacaggatgttggatgtttcgtggggagttatgcgtctggttggtgcaatgatcatacggtgtgggatatgtgtatcagttgttgatgctcatactttctagactatggcgatattcaggccaggaatccggacgatcgggcgcctaattcaaccgtgggtattggacgcgctatgctcagtaatcgattgagccatttcctggttctcaagggaccgatgttgacatattcagtcttcttggaacgatgttcataacaggactggtattttacccattaatccgacttccatagaaccgttacatagctgggaacgtgctcatggacgcactgctgctggtttctcctcgggggctacgaaagaactcgagctcgatataccctttccgcacaactagatactgtgaacattcaatgtgattcttgaaaacattctttttagcctatataaagattcatttgggaagaacatttcactcattttttaagcgaccctctcattattaacccttca

SEQ ID NO: 1970 - DNA, 1017 bp, Emericella nidulans
  unsure (1)..(1017): unsure at all n locations
atacttactatcgttctaccataccccctcatttcccgcccccagagcatttatcctctatcttactgtgttgtaccctattatctgtgaagaaagtacgtatacgtacgtcaatgcgcttacatgatgtaatgacctgatgttgacgcttgctttctttccacctctagctttttagtcctgttttctgaatagcatgagcatgagcgtncggatttatcgattatgatatggtatttacccaagcatagggctaccttgatatgaagcaatgcggcgggttatatatagactttcctcttttatctgtttccctgctagctccactataatggtatacaaactggatacctggaagatgagtgttaatgcagagagtataaaattctttgaagatgaaattatagtcttatcatatacataacaacagggaaagtattttttcttgttctatgttagatggcttacaatagcgctgtgtatctgcataaaatggaatgggtagaatacagctatgccatgtcccagctctgaccgaatgatgtggaaatgggcttaagtgcgggcgtagatgttgcgcaggggcgaacagtggtggtgatggccagctgcagtgatatatacggaaataaggaagttattgctttaagctcactctactttgcgcggtatccacccctaccgcggcgcgaaggatttccagagtgcgcggagtgagtttgagtatgaggttttttgggcgttggtgtcgacaactgttgatgttgtcctcgatcaggagcaccagcttcagaaccgttccgcgacgcctggctctgctgcgccggtgacgatgcaccctgagactggccctgagtctgcgcctgaggtcccttcccccgcctcgtccgctgactttgaccaccgggacctttactcccacgacctcttcgtcccccacggccgtctcgttcagccttcttctgcgtatcttcgtcttcagccccgggctccggaatcccctgaatgcgtctactc

SEQ ID NO: 1971 - DNA, 1723 bp, Emericella nidulans
cgaatgcgatatcacagacgcctcatccgtgcaatcggcctttgcggccctgcaaaaagaccagaccgctataggagctttcccaagcatcctcgtgaacaccgccggatacgtctcgctcagtgatatgcacctcacgccaccagaggaaacactcaagcacttgacgacgaatgtgctaggccccatgctctgctcgcaagcgtttgcgaacctctatttcgccgcatcatcttttaaggggcaaacccggaatgcggaggcgcccccgggccggattgtaacgctcgcctcgcaagccgcgcatgtggctctccaccggcacggggcttactgcgcgtcgaaatctgcagttttgggcctgactcgatgcatggcgtctgaatgggggccgaaggggattacggcgaatacggtgtcgccgacggtggcgtggacggatctcggaaagaaggcatggggggagcagggagtcaaagagaagctgctggagagcattccgacgggcaaggcggcgctgccagaagaggtggccgacgcggtggttttcctctgtcaagactcgagcgggatgatcaatggggctgatatcagagtggatggcgggtatactattcggtgatcggacgtgcattttcttttattcaagttatagatgcgccatgcgcaatgaatggaacgttatattgatcaatactatagactcttttgtcttatttctgatcagacaccagaagttccaacaccctcgggtgtggcccagctcaggagagagatccgaaaaatttcaacactgatttcgcaggcatctccatcaaagacatggttgtacatttacaggatggagagttatcgtctcctttgacctgtaggcctgtaggagcaagccctgtcgtccaacctaccgcaagctctagtggccttaggcagaacttcggggaacataccctcctccatggcgacgacggtctggcctttcaacacccccagccaaggcccctgcttctccgttggaagtatgtccgttgttcacagcagtctggctgatatccccctccatctgagccggtacgtggcttgaggtagacgcagcaggcgcgcgagcgccgttttcctgtagaagacttttgggcacgtagccgccgccgtgtttgacactgctagaatttgtctgcggagaagaaactgctgccgtctctacactagctggtgcattgatttgcggctgctgctgcgttgttgcgcccaaactggacacccttgtattggtagtggaagggacgaagccgcctccgtggcgcttagtagtattcgaattgtgagacgaaggcaggtttgacacgggagtagattcactctgggggcgtgaatagcgatcctggccactgctggactggtcgactgttgagcgccgggtgaatgataaggacgcctttacggctgggatgaagccgccaccgtgtctcttcggcgtagacatttttttcagttatctgagatcgtaattcgcaccgtgatcagtttcaaaaagaactctcatatataagccctgtatggtgaggaatccctgactggggtgggggccgcctcatctgatttcccatgctcagcctcagcctcgtagagactcccccaccattgccaatcctccaggggcttaacctgatttttttacaggaaccgaaatagatgccagagataatggaccaagtcttcaacgacc

SEQ ID NO: 1972 - DNA, 1920 bp, Emericella nidulans
cttcttcttcaccaccacgccttctgcaggcgaccgcctccgcgtccagcacgtcagccatccgaatctgatgtcccaatgctggatagtgagaatgttcatgaggtttcgggggttgcggtaccggccagggaagaaaagaggtcagaaagggttcttgaggaaggaaaagtgtttgagctggatggggggttcgatggggcgagacatcagagggctataaatggggagcctgaggtggatgccaaacagtagaaggaatagcatgacgagccaatgaaaatgaagatcaatgtccaatctgtcgtgtcctatctaagctaaacaagctatctacccaagtgaagaaataaggtaaaggcaaggggtataaccaccacgaacactatccaagtcatgcacattctcattctttcattccgaactcgccagacaccgtttcaatgtaatgcagcgtatgcgtccggactcactcgtgataggtacttaatatacaaacgtaggtcaagtcgacgcaaaggggataaaaaaagcaggtgggaatttgaattattcagaaagcaaaaggaagtgaaggagtaaaaggggttccgtcagtcgtctatattacgtaggtagattttatgaggccggagctggggcgcgcactgcctgcagtgtctcgcctgtgtctgccagtgggccgcaccacccgtaaacgtcgcagcggcattgctcgtagcggggacagctgcaatcgagctggttagcaagtggattggaacagaatgcgaacgggacatactaaataacttccatcccaaagataatgtgccagatcttctcgtatacccagccaaccccaaaactgtctgtgcgctctgtctccgccgcccacttcaacatccgctcgtagtcatgccttggtcgctgcaggatgcgctcgcggcttacggcaaactgcccgcagcatacattcccaatatgctcgggtacctggtcagaaggaacattgaagatcgtttggtatacctccgggaaaaatgcgcggatatcgttcttttcgatatcgatctgcgtggggctccacgggtgcacgctcgtcggacacccagggtcatgctggcagcgcagattgacgtatcccattgcatccacggcctcgagacggagatttcgcagggcgttgctggtgtaggggccaaaaaggtcgttgtgccattggttaatgttagagtggatgaagagcgagtacggcggtagtttatcgtagtgatccacgataaaggacaggtaggcggttgcttcgcggccgcgggttgtgcgtggaaggaggaggcgtgggtcaggtttctcgtcggtgctgtagatgaaagggatcgtatcggggccgctgtgaaacagtaacacaagtcagtccttcgctgttgggcttgggatcctaggggtagacgaaccgctccctgcaataatcgagaagccactgcaaatcctcagattgtgtagctgctagcacgagcccgactcgacttgtattgctgtatgccgatgtgatttcggcgagttcacggatgacctggtcgtgaagcgattcttgcgctgcgatgacgccctcagtactgtcgactgactgcgcactctgtaaagacgaacctcgctgagctggcgtcatgggaaaatgacccttccgccatataggaataatgtgagactgctcagcagcagagcgaggaacgtcaagccagtggtcccgggggcttggccacggaagagtcgccgcttggccatcaggacaaaccttttcgcggaataaaaaggcggggcgcaatgggacggcaaaaaaagaaaaactggcgaaaaaatgacccggatgggagtttttggaataaaaacctttcgaggaattaaatgattccctggggggggagggatttaaattgg

SEQ ID NO: 1973 - DNA, 5224 bp, Emericella nidulans
ttcaatgcggcgggatagtgtggcatgaaacttgcgacttagtagggttataatttttttcagaaagaccgtatagactcccgcctcatcctggctgttgtacgggaaaaaccatgttgggtactaatatgctggcaccaagaccaagagttcacttttggcatgctgtgtgaagcgagttgtatagttggcacagtacgactaactttccccacgtaatagctgtgcattgtatactccaaggcacgccttggatcagttgaattggggttgggtgtcaccaaggtgcccgcctatgtacgcaggagattggtgataccttggctttgattagtttatggtgtaatatgtcaaacgtttactgtggtatccactaggtagcaagattatattcacaagaggagccggaatgaggaacaagcggccaaatgggcgcaaggttcgatccgttccttcaattcatagattgataataagtatattgtccatgatagtgataaccagcctattctcttcatttttgatggcgaagaccgtctctggatcatgtaaatatccgcgatagcgtttcaaccgtgcggtaggtgaacccagccttgaattcaagccctatcgcctcctgacgcaattgagccaacttcgtgtcacattggctaagtgcgcgtgaggtttgctgtaaagtacgatagcatggacggcatccgcgatatggaggacaatagcagctgcaatgggatgcatcgccataaggaggtacagtctcttgattcgtcagtatcagcttctcattgagagaatccttgtaggcagcctacgacctcatctccttatcaacgcttggggttttggtaacgatagcagactggacacggtcaacctcgtaccgacgaatcagctcgtttcgctttcggcttttgatcgcgaaaataggagggtggggtgaaatgattggattttgcttctggcccggcagcataaacctcccacaacttgccagacccgctagcccttccctgtgtcctatccacagctctcgtgggtctgctggcgctatcaggcgacccttctaatcctccgtacccggtctgtctcctggtgcggctgttatcttgtgacgttctttgagcgggcagcgagatgggcctgaaaagagccggttctagggtcagttcaagaaccactcggcgttctgcgaaccatgaaagcaagatttgcgtcatacagacaagaagcgttctggaaagccagaaaatgcacttggaaagatagcagcaagtgttctgctttcttttgtcttgagcgactcatcaaacagttgtagtgcctgattaggacagtgtcatatgcatcaggcactgcatagtactagcgtggtctctgctgtgtttgattgcttcctcacacaacacagatgaaacccccaagtctcatcagcccatttgtcagaatgcagagctaaggagtgtgtgactcttagggacgctgctttgcaatgctatgtatcacagatagcttccgagcttgggctacgacttgcaatgacgccgccaggataactgacgcagcgtctcaaatatcccttggggacttttatagctcccagcagacactcagtttacagctatacaaagcaagctgagactggccttactctcagtcactcttctctgctagcataatggacgttttggtgagatcctgcgtctcgattcatccggcggtcctcgtctgtcgtctctcttcctgactgtttgaaatcagtcgaggataatggctgctaccgtgagcttcattgactggaactcctcgccgtgcctgaatgtttgcctgaaaccattttcattagctgccttatggaggagagaaggtcaaataaaaccatgacaattcaaccaaacacatcccactactgaaccctagccgtatacggaaggggattagcataatatacatgtatcgtagtatgggagttctcggggagcacaaggtgagatactccttgattactttatagtctatttctagttgaatgcaatgtgcctgtcgtataaccataaagcaaaaccatgagcttggagcgaactttcctccctctcagagagaaacaacaagctggtgttctccttgtggtagatggatctcgctcttcgaagagactcgtacctttgtgggcagtcctgcaacgaccctggcaccaacaggaagaaccagcctacagttcgtactcgttgggatcctcacatccaatctgacctttccagattcccctctctcaaatcgcactttgatcagcccgtacggacagtcaacctctccctccacaagtccaaactcactcacaaacggtggccgcaatgtccacgttttatacgcatccccgaccggcttcacgccaagtacagcttcatagaaccattcatatattgttcccagcatatcatggcactttgagcggcaccgatcttgccagaactcaagaagcgtcgtttcgccccgtcggagaaaccgcatataactgggatgctcttcctgccgcgccatggccagcacaatatctgggcggtcgacatccggttctgcgagtgtgttccaaaggtactttaggcctatttcgccggcctcgatgcgatttcctgacgcctcgcaggcggacaggaaggcttttatcacctctgcccggtgctctacaggaacgagaccgaattgcagagcgacagcttgcgcgaccatcgtgcaatcgtaggtacctggattgtcgagtgaggtgtagaaggcgtatgggcgagaagctttgtcattgatcaggaggtgcttgttatacacagcataaatccgttccgcccacgcggtgaatttcgcttcatcgtctgcttggcccagttctttggccattaaggcaacgttgcgtagacatcggtagtacactgctgtctcaatgttcgcctggtggttcccgaacgcaatatcgcggccccaatcgccgagtccgtgctcaattagacctccttgtcgctcttttgttttcatgtactccatgtaccgaatgcaaggctgatatatcttgccgaatacttccgttgagccatagtatcgcttgatcagttccggaagaaatgcaattgcgcagccccaagtgatcgtgtcgtggagcggaccacacatgtatctgatttctggtgccattgtgggcacaagaccgtttgattcctgggtatcgatgatatcgtccaggattttggagtaaacagcttccatatctcgaacgtactgagtcgccggtgcaaggagtgaagttacctcgagccagccgaacttctcgatttgtgggcagtctgtgtggtagctgaagatgtttgaggagaacgtccagtaacaggcatttattaggtcattcacgtccttcctatctgttttgacgtatccaagctgccttgcagccgacgagatgtgtcgagcactgacagaatggattgttgggaggttgtcggtctcgtcgagcgacgcaccttcaatctgaatataccgtgcgcttgtaaaagagaagtctggtgtccagatttcgaccccagtccctgatagtatgagtttggaatacacgccatactcgaactctttgaacaaaggatcgggcataaacactgaacccacatcgtcgaccgtctctgagtaccggatgatgatctctgagccagcaggcccactgacctcaacacgcggcatgatactggaattctggcccaaatcgaacattgtcaccccgggccggagctgcttgtgcttaactggggtgaagagattgtgtaggataactggcggctgactctggtatcgaagtttgcctctaggcccagtcaacggcttagcagaggcccaggtgctatcatcatagcctggtgtatcccacccaaatggatacccccgccggtcatgatcttcagaggcatatatattggccagcgtcgtcgcgctcttgcgcaccttccagcttgggtcagaaatgatcgtttcatgggaaccgtcgtcatagtgcacatggatctccgcgaagaaacacagctcattcccgtaccgaacgtacgtgttgtcctcgtacattggccagaagaaccggtccccttgatcgcccgcgtagaaaccgttaccgacatgtgctccgatcacattctccttctcgctccactgcggcgttacgttgtagccgacgaattgcacggtccggtggtagtttgtccatccggggtcgagaacgtgcgtcgaggcaggctttccgttaacgaagagattgaagtgacccagccctgaagcgaagatgactactttctcgacgcgtttagcagaagacagttggatcgatttgcggaggtatattggcttgtcgcctccgtttccaatccagacggctttccatcggtccgcctcattttcgaaccaggtgcggaagatgagattagtgtgcggcatctattctgtcagctttaatatattatctccggaaatgcgagcactgacataagtttggttcatgctatacggaggaagtagcctcgatgagcgcgggtacgaggtataaaaatcattgacagcgctcttcgactctttaccttcctggtcccagactgtcacttgccagtagtacgttgtcgttgacttgaaaccggactcgggtttgcatataatgttgcgctgcgcatcgctctcaacacgcccagagtcccaggcatccggctgctcctcgagacccttcttctcagaagacactgctatacggtaggcagtctgctctgacctcgaacagccaccttcaaggacccagaagaaacgaatctcatcagtgtcgatcccaagggtttcatggaaaccgtgaataccgcaccgagtgacttccatattgcgcaaaccaccggctcgagtgagaggtagaagacaactgcgccagcttcagcggattacaatcccagcttaaagtaattcaagctgggtccacttcagctgcccatcggtttctgattgcccgagcgcggtcaccagccagaatggttggactcggaagtgccgaagtagtgccaactaccccaacccgggaggcgaccaagccagctccacatggttcccgactcgtcttaccgagataccctagacctggcagatgattgtatgagaagtctacgtagtcattgagctcggggtatcgttccccgtgtggccccgcattgcaaaacgtctt

SEQ ID NO: 1974 - DNA, 736 bp, Emericella nidulans
gaggtatatattcccatactaatactgttgaggatcaatatctctctcttgtatatagatgcggctgccaccagaatagctatttgtcaaaccaggaattactacccaagaatttattagtgaaaggaaagagtttgtactcctctgggaggattaggtccttatttgttgcacaacttcatgcagaacagagatcacagtagtggcctaaattttacttctcaccccccactcactcaagaagtgggtgatttactcaccttgttgtaacccatctcacctgcacccaccctaggctagtgtctctcactcctaaaaggagaaacacactcagggcttcttatcgcacttgtatccgcgttgataatggtgacagtcaagtacaaaaagaaaaacatacaacagcatgtatatttcggtgctcacccatcccagctactgttccgtcgccgctttgccgcacatattccggcgccttaaggtgaagattcaggcgcctggatattctgcacctgagctacctgaagctacatttcgacaaaagcgcaaaaagacatcctcaagagagagataaatcatctaaaacccatggtgtgtatgtcttactcctattccttctcccatatttaaggctaatctgacagtatgccacaagaaccggcagctaattttacgcgcgtgatcaatcttgatgagcacaatggtaagagatcaaacgagcattctttcacgaacg

SEQ ID NO: 1975 - DNA, 2603 bp, Emericella nidulans
agtgtcagtggttctgagttcgtggaaatgttcgttggtgtcggtccttcccgtgtccgagatcttttcgccaatgcgcgcaagaacacaccctgtattattttcattgacgaaatcgatgccattggtaaatccaggtccgccaaaaacttcagtggcggaaacgatgagcgggaaagtaccctaaaccaaatcctcactgagatggatggttttaacacttccgaccaagtggttgttttggctggtaccaacagacccgatgttcttgacaaagctcttatgcgacctggacgtttcgatcgacacattagcattgatcgacctactatggacggtcgcaagcagatcttccgtgttcatctgaagaagatcgttaccaaggaggatatggattacctgacgggcaggctgtctgctctgactcctggctttgctggtgctgacatcgccaactgcgtcaacgaagctgctttggttggtatgtaaactccctcatccttcctgttcccacaatatagtttcagttcactgatctgtgtgcagccgcccgtgaaaacgcagagagtgtaaccatgaagcatttcgagcgagcaattgagcgagttgtcggcggcctggaaaagaagtctcttgtgctctcaccggagagaagcgcactgtggcttaccacgaagccgggcacgccatctgcggttggtatttccgctgggcggatccgttgctcaaggtttccatcataccgcgtggccaaggggccctgggatatgcacaatacctgcccgccaatggagatacatacctgatgaccgctaaccaaatgatggaccggatggccatgaccttgggaggacgcgtcagcgaggaactacacttcgacactgtcactagcggagccagtgacgacttcaacaaggtcacccgcctggccacagctatggttacaaagttcggcatgtcgccgaagctcaagtacatctactatgaagaggacccatcatcacagcttcacaagcccttctcggaagagaccgccaaggatattgatatcgaagtccgccgtatcgtcaacgaagcatacaagcaatgccgcgatcttctcacagcgaagaagaaggaagtcggcctcgtcgcagaagaacttctagccaaagaggttctcagccgcgacgacatggtccgcctcctcggtcctcgcgaatggcccgagtcaggagaatttgctaagtattttgatggcaagcatggccagaccatcgcgcctcctgagcccgaagttggacccgaagctggacctgagacgagagaatcaccatcatcatagagctggatttaaggaaaaaatatcgataagtgattgactgatcaatttttttctgctgctctttcatcttatctttataggaggaacttgtatttaccagcattttatctactcccctcttatttttttctccctccatttcactacctgcttatacctactctatccttcctcctttcttaccaaaatactcgatttttttggtagcttcccttccgacccgttcgatccccctcgtctttgtatttctgcctccgaagcgtcgagtctaatgtatcattgtatagtaggtagctgaatgatttatttcctttgtgaatcctggctggcaattctgcgaattaccagatatggctgggaagttaggtagaattatgtacttattagatcgatttgaggcgttcccaactccggctgtttttgtccgagaagtgaaaagaaatagcccaaggccaatacattcaaaatagactgagaatcaaaacgcaaaccattatctacttcaacctccgaatctaatgtggaaaaataaacggcgacgtggaccactcaaacggcctgcacccatgtaaaagaagcgaagtatgcgtttccaaccagggagagttaaaatcgttagatataacggataatatgcatatttactcctctttcttgccgtgagcaaccctcttcttgtttttgttgcctttgcacctaggcgtaatagatagacgaggaatgaatcttccgacgcgagcctggtattcttggtactctgggtactttctagcactgatctcctcagtgaggcggacgcttccttggaagatagccataaggccgatgacgcctagggcagtccactggacataatgctcagttcggtaggcgttccagaggtaaagagtgagccaaatggcctgttccgcggcaaagttgggatggcgggagagcgaccacaacccgctgacgacgaagccacgctcaagatcttcagggtcatactggtccttaaggttaccggggatcctggcggaggtgttgtattcgtgcttggcattctggaatctccattgttgctggtcggcaaagaactcgagaatgatgaagaccaaggcgacacgggagaagatcaggtcgggaagttcgaaggcttcgccgccgggaagacgcgcaaggaggaggaagttgtaggttggggtcgtgaggaggagtagcaggagcggctggatcacgctgatgaaggtgatgttgaagaggaagaaggccaaacggttgtttacaccggaccggataa

SEQ ID NO: 1976 - DNA, 2592 bp, Emericella nidulans
agctccttcgccagatcattttccttgtcttcagtgggtggcgctgcagcaacagctaggcccgcgataagtaaatggtactcggcaatcttgcctgtgaatcccaactgccggacgtcctgtattactcgagtcaggctgcccgtagacatggacctgaaacgttcacttgttgcacggataaaaagctgctgatcctcgctgtacatatgctgaagtggtagggattcggcgtactgcacgacaggaatggtagcacttttttccgcactctgggtagccaaaacgcggcgtctgatgagccttctcaaagaagtccctgagtcgaccgacttttcgacataactctcaatcttgaacagatatctcttgacctcttcatgatccgtagctaaatcctcgaaatcctccaaggcatctagagtcttgatcactgtgactgtctcttccaagggttgtttcttgtactgatctctggccgagcgcaagtcggctaccacaagactgaagactttttcgcggctagcagcaagctccgcgacatctatcgcgtccattaattgttcctgatgaacccagaattggtatagagagatcctgaggaagaagcactccatagagctgcgatcgattgactgcaacttggacaccttcgcagatatcttgcggaacatcttcttaaaaagcttccggcgctctccttcagctagaagaagcaatttcgaaacgaccgcacggtgcagaaatctgaatgccttcattatatcaaggtcaatattcgtatcctgcaacgagagtgctttcgcaattgtccagagcggttcccagtttccagtgatctccgcggtggatttgggtaaatctgccagcttggccatcaatgacaatataccaacggtgactatggaagtgctgtcctgttctgataagacgccctgcaatagatctaggagagctccagtttggcggcgtgtgataagagaagccgggactctttgcaaactctcagtgtagagcttgagattcgaaacatcgtccttgattcgctcggatatgacaaaaatcagatcgttcacaatgctgggggcgttcaaaagatattcgtgagatgcgacgctagcccacgtttgcaaaaaacgtgcacctgacgagaagttctcaagagtcgacgaagatggctggtattgggccgtcgcgaaagagagaatatgagaaaacagcgggcgtcgaatgttggactcaatgtgactccaaaggtcagggattcggataagacctagaaaatatgctaaagatagggtggctggagagtccagtgaattcaaacgaccattccacccagagttcatggagtctagtgcagcctttgccgagatagaattcatcaacttgatgacttctttcatcaaagatgacagatcctcgctgctgttcgtgctaggtgagtgcttggtgattgcaagaacaagtcgatatgcctcaatacactcaagacgtgcgctgagcttatgcgtcaactcctggtgtcggcgtttgatcgaacttgtagccgcgccagtcaagcttgataaggaagcgccgagaccgacgttgactttttcaacattgttctcaatcagactgcgagttaacttccacagacgccaccgccaatgcaaagcttgatccgaagaaagcgtcgacacaactgtttccattgcagatgcgaggtcagcattattatcggcaagattgatgttccgtttcctgaacccagcctcagcaatcaacagctgcgcatatgcctctggagacctagcaagtttgccatcatcaccacgaatctcgaccgccgcagcacgcatctgagcggaggcaaatgtttggttcagagggttgcgcataatttcaccgtatgcatcacaaaggtcgtcgtcttcccacactgtaaagaggctgagattactgtcttgcattcttgcttcctctatatcggtcagttgctggtaccagatctccatgaaagtagggagatccctggcattcatgaacccgcgtagcaaaggcaaaataatgccggctttgataatttcgtagctactatcggtggaattgccactccgccagagcaaattaatcttgttcagcaaggccgccagatacttctcagagtccgcaagtccggagtttggaaggaagatatccactcctagttctatgaggagtgcaatgagattccactcaaccagagggagctggtccttcagaaggccggtatatgcagcatgtgtaagaagcgtgtgtagcgataattgcacatccggctttagagccacttgaaacagcagctctaaaatacgcacaaagtgggaaacaaatgtggttggcttcgtcgatttcatagatgagaatgccaattcggcagcagcaacgaagagtgtctccaaccaaggtgcttcgtccgttttccgtcgaaatgagtcccgcgggactgatcgagtagcgatgtagaaaaactctggaattagctccgccgcattccagaattctttctcagcggcgttgtcttttgtcacagtgctgccgggctcggatagaggctcggcggcagaa

SEQ ID NO: 1977 - DNA, 3822 bp, Emericella nidulans
cacgtcggctggatctgcgcctcttcaagtgactacgcgaccgacaaagccctattcgataaagaacttcggattattgaaagacttgcaaagaggtaaagcagccgctgacggctctacagaggccaatcaatgccctcaaggcgaatcattgccctcaaggcgaatcattgccctcaaggcgagacataaaatgcaggggaatcctattcattcaaacgtccgcaccattgagcggtatccgcatatgaagacgagtttggacggccgaatctagatagtgataagctacttaagctatataacgcaccaactcctctgtgctgacgccccggggtgctgcgcgggtacgggctcgtcagtcttgattgaacgccatgatcgatcagagagactggacgacccaatgatccactacgatgccattggctcaggcaacactataatgaagaaccctttctggcgagatgagcttgcgagcaagacggacatactatgtttcgatacgggagctgctgggttgaaggaccaatttccctgtctggttaaacgtggtatatccgaccatgcggattcgcacagcaccgacgagtggcgggggtatgctgcaatgacggctgctgcctatgggaaggacctgctcaatcctaccggctatcagacttgaagcggagatagaaatctgtgaggtgttggattggcatacgaatgacgactacagcgtgcagcagaatgataatttggaaccgcgcgagcctgggactggcggatggttcctccaaacactggagtttgaggactgggtggagagtcctggcaaactcttattctatcctagtatcgccggtgcagggaagactaccattgcatctattgttgtcgattacccccaagaagagtacgagaacgatccaaactgcagcgtcgcctatatttatttcaatcatatgcgccttgaaaagcagacaatacgacatctgctcgccacactgctgagacagctatctgaaaacgcaacacacctacacagtttaatcagatatctataccagaagcataggaaggaaaggaaaaggccgtcagttaatgctctagtgcaaggcttggacgagtcagctggcctgcaatcgcgacagttcattgtcgttgacgcactggatgagtgacaaaccgccgatggatgccgtgagcaatttctgtccgttatactaccactccaagcaaaacacggcttcaatgtactagttacgtcgagagagctgcctgacatcactcgtcgatttagcgcaagcagagcgctcgaaatacgcgcaagagagaaagacatcgcagcatacgtcgacgcggcatatcgaggtcaggggtgccattactccatgcttaccgagagatgataaaaatgaaactcgccatgatagccaatggcaggtatgttgtctatatcaagcatcacaatgcttcccgccatctaacacgagagttaatattaatctcccaagactccgcctggcgcggctgtattatgacatgataagcatgcagaagacaccgtggcaaccgagaaatgcataaaacccaggccatcccaagatggcaagggtacagtcactggtatatgaggcagcttgggcacattatataaggagaataacagcggcgcctgtatccaatccggcgtctgctgaaatagcgagaacatttcttctattgatagcctgttcgcagcaggaactcactgttccgacagtgcagcgtgcgctggcagtctttactggttctattgatgatgtcgaagaaaatgtcctggaactcgatgacatgatttccgcttgcgggggctcgttagagcagaaaccagtaagaaaaacagcacagctcgacttgccctcattcatcatacattgcgtgaatacctaaatctcacgcaagatacatggtttccagacgcacacggtttgctggcagccacctgtcttgaaacccttctttcagacgcttctccaacgggaccttgtaccagcgaggggggactcgaggagaggctcacatcggacgcattctatgattgtgcggcacgtagctggaagtatcatctgcgaaagctggtgtaacggactgcgcggatagtgtagcgccagctgcagcccaagcaagaaagctggctctatcactactccagcacaaaatgagaagagcgtgctgctgaaaaaaggcttttacagctgcccaaaaagcatccggccactaccacaatgaactacctggcgaagtcgcaggcctgcatcttgcgcgccgttcggcgttacggaatccgtggcaagatacctagatagtcgagtcagtcgttatgtccgggactcacgctgtcagacacgcaaatgctagctgtggaggatgttatggagcagttgcttcgctgttccttgatggggacggagttgatgtggaagatggggatcgcgatggtagaatgctggtccgcgcaacagctagcgatggtcattgtgagattttgagaggtgtggaacagaagcttacgtttgacagcgagagcggcagtattgtcgttgtgtaggcggagaacgaaagctgcggtggttaagataggctttgaggcggccgtctgtcctgttacctatacttagagtggatgtataagagacgggtgaagcgtgtccgacagataacgtctgaatggcctatgaatttcgggcccgagttgtagttttacagttttgtttggacgaacaaatattgcattaatctagtttaaatgttgttgagctatacatatagcacctggcctagcccataacaagataggaggcttctatgcaaggaataaggattcgaagcatcaagcgcgaagcaatgcaagcatgagatggctcttgagcacgatgtgctcagaagaccatacccttgacctgcgcaatcttgccgacattgatgttccgaatcatgatggtccagacgaagcacagagacatgatacccacaccagcggccagcatcctcgtctgagcatacccatacgccttctgaatagcaagcctagtgggagtcccgacggcatagctcttctgggtagccaagtcttcatagatcatatcgagatcaggcatcgctgactcgggcaagtaccgaataagcgccttgcggaatgtatttgtccagatgctgccggagatagtgttgcccatggcgcccccgatagtgccgaccacattcaagattgccaggaccgtcgcaatgtgctggtggtccacggcggccaggatagccagctgctcgatgatgatgaagatcgacccgccgatagagatgaagatctggcacatcaccaagtaaccaacagtctggttcggacggcggaagtagatcatcaggccctgggcgaagatgtacagcgggacagcaatgtaaagaagccacttgaagcggcctgtcttgcggatcaggaacccgacgccgaagagaaggacgcccgagacgacgtcgaacgtgttgctgacgtatccagattcagcgagtgtcaggttattcacgatctgaaggaaagaggtgaagtagttggcccagcaatagtaggagatctggtaggtggcgtcgagcaagcaggcgccgacgacggtgcggttccacaggaagctgaatttgagcatgggcacaggagcaatatagacctcgtgcaggatgaagatgcccagcataacaacgcccacgacgatcatcgcgatgatgtacccagttccccagccgttgggggcgctgtcggcgatatcgaaggggaggaagaagatgaccagacccggcagagaa

SEQ ID NO: 1978 - DNA, 2749 bp, Emericella nidulans
tttttctccttctgtcttgtggcagccgcgggaaaagaaatccagatcatggtggtggagttggaggccgattgatcaaggactcttcaactccttcgtttcactcgctttgcttcctacctcagtgcagagggtttgtccagtccagaacaaaagctcctagggttaaacgaatccgcatcctgtcgcctttccaagggtcgccttcggggcgtaatagacttctgtcgctcatggttagtcagtgttggcttggatctggttgtgggaggtaggctgagcatacacgtttccctgcatttgtagtcagcagtgcgagagatgaatgcacgggtgaaggctcgtcatgcacgatgccatcatggcattgagtaccgggtctggccaatatatgcagggctgttgcccagcatcaggcgtccagctcgatctgtcaaagcgtccggaataatacatgaatgtaacccagtggggcttctgctctgatccttagttgttggctgttgactgggaaagagaagttgctccgtgcagtgtgagttgtaagataaatatctccacattcgccggccctcaaaagctaagtacgttggattgcaccatatctaatattgtatatatatatatcttccgtaaacaaacgcatctgtctctcgaaaaaaaagatcagttattctgccttgcaaaaaggcctttcggctagagaatagatgcatcgatcaattatcttagtacttggagtgccgaatatgtgaagcctcgaaactcagtaggctacatctcgttgtttactaggtctacatattcgcagatctggacctcgctttcagatgccacgactgcacttgcattaggtaatagacaatccgtggaagaagcacaaataggtggatgtacatacgctataaaatcacgtgtatcagtgctgaggttaggaatcaagacagtgacccgctacatacggggacaaaaagcttgctttgatcttctctgctggagaacaacgaccagttgaaatacatatatgatgtcctgccagaattgtgcgttgtgccctagctcgctgtggccaacgaccaaagtacatcatagacaaacattccttgacgaggaaatgtgccctggagtaaaaccctagttattccaggtatccagcaagcattgagtaattatatggagtcgtatttctagggactatcgtgataactaaaaggatacctaagtctccggaatactgtgcattcatagataaaatgtagtaaaacagggcaacataacttgagacttcagcccaaggctaccgggatttcagctccccttcagctccaatttccgaaggtaaaggtgcgggctgttccgggggatgctaccctgacattcagtagtcgactaaccacagtagatccagggcagccgctccttcggagaacccgtagttgcagacactgttgttagagattagtacatagttcatgatggtagtagagatatatctcagcttcagcagtcaaagctgcggctctgcagtatagaactgtcctgattcaggattgtgatgcctgcttatccaattttgagcaatgctcgcgctaaattttctaagaataggaacaaagaccgctagaagacggttaggccggctgctcagccactggtggaatctgagagcgtaccagggaaacgacacgtatgcaaatttcagataataccgtatagaggaaattaagtggtgggtgcctcagcccaacacctggtgttttgaaacggaggtgggacaatccaaagtccactaagccaggcagatccttttaagagctccgccacaaaatgccacgatttctctgattggagaaataagatctttagggatcatgatagcgtctcatttgtggcactctgatatgtattgaccaatagcagagaaacacaattgagtctgtcaatggccacagctatatttggttgccagtgggatctaagccttttcaggagcgtcggatgaccccgccccctgaaatatttctctgtttgtcctcgtactgtaacctcaaactgacagtacaagtacaggtcaactcacactactatgggaaacaccgaagcttcacaatataccaatgagtgtgcactccaagggaagacctaacttatgacggaggccagcaaggtagcatttgagaatggcatgcctgccacatacttggttttgtcggaagtgcagcccggtcaacgatgctggctagggataggaatgcagcctctcaggaagaccaagagaaccaagacagttcaacatttgctggctgcagaatttcgtatgaagtagatggatggcatatccccaaatcgtaataatggagtcaatgggcaaaggcagctcaggggtcaacaaatgagaagagcgcgcagagttttatactccctaagaacaacggtgagtgaaagtcggaaggcatgagctctctgagcgggactcgggtggcagaacgggaaagaactaaattaccgccaggccgcttggtgctcaataagattggctggggggaagtgggctctgaaattttgcacctcagtttttgtacccctggcggtgaggcagccaatttttgtctgtatactctgtacaggtatagtgtagggagcatcgatttcaggattcaggaatcaaaattcaggaacagttgtagatgaggaatgaattggcgaagtgtgttaattagatagacctgatgatagatttgatagattt

SEQ ID NO: 1979 - DNA, 1715 bp, Emericella nidulans
atcaatatacggagttgatcatggtggttaggagccgactataaatgcatttacctaactgtttactccgttccacttcggcttttccgagcgggttatccgactcattacccttttccgccgttctaccaacatctacggtagtgagcggattatattatatcagtcgttattcatcaccatcatattccatacttcatgcctatcgtcgctactccgtaactatttagcttccccatcttccatttgaacctccatctgcacctccatctccatatccatccatcataaatcatcgcaaggctgctacatcacgtaaacgtaacagagcggtcttgtctcttcctgatccattcatatcccaccaacctagcaaccatcccccggacgcgagtcgagcacagctcgtgttcgcgccagaacggtggccagccgggctgggcgcctttttttggtattttgcatatatatgtcggcatggcattatatataatgccagatctgtgattaaagagtgactgatgtgctagtgatatactcgaagtgcactgcacctgtcaagtcaagtcgatttgagttgaggcatgtcaaggccgatctgagccagtcatcgatcgcgcgacgaggtcggataagagagggaggggcaagaagactgcgtttctctcatctaccggcggacaacgataccctggcgcctcacgccccgacgagcccggcggtactcctcatcgctgtcgctgtcctcggagcaggaatcgccccaagtctcagagaggtatccacaccgggaaccgccgcaatcgagcttgacgcggtctcccttgcgggtgatcccgtaccgctcacaatggcaaactgaaggcggatcggacatgctggacagcgagctgggcgaggtgcttccgctgctgcgagaagacaacgacgaaccgacagaggaaggcggcgagttggacaggtcgctgtaaccgtcgtccgagaggcgggacgacccaaagcggcgagaaagctcatccatggcgtgggtcggggcaaagtcggcctcgcggatctggcgcgacgcgtacggcttggaaggcttagggtggtggatctttgagggcgagagggcgcggccggtcgcgatatctgaggagccacggcggggacggcgcgcggacgtgctggactctttgcctccggggacatcgaggatgttgagcttgcggttggttgttggctcgacggtgtagtctgctgccgggtcgtgcgagacgtggtagccgtcgaggatgtactgttctcgattagcatatacatttatctcaagatataccctctgggaaaagcccatacgtagtaccagtaccgaccaccaagcttcagcatcgaggtctggaagcggaatttgcccacccaggagccgggcttggacgagtcgcgagacaaggggatctggcgagagtagttgtcccaggaaccaagcagatgcacggtcttgacgttggacgaggtgcgcaagttgaacttgagctggacggcggacatggcgattaaattaaagcggtatatcagtagataagtgaatcgtaaacaagcacaaaggtgtcaggtctgtcgtagatggacggtttaaaacgactaccagagccgggtaaacgtccacttctgttgatgttgggttgggtggcagagcaacaggtcgcagcgcaacgaaggatccagtcctgaca

SEQ ID NO: 1980 - DNA, 3006 bp, Emericella nidulans
cttgatactgggttatgcgcctatgccctttgatggaatcctcctagggagccgcatgatggtggctcgtgaggcgaagacatcgttcgctgtaaagcagcttatagtcgaagcccccggagtcaaggatgatgggaatgacaacggtgcttgggcaaaatgtgaacatgacgcagttggcggtgttatctcggtcacttcagagatgggtcaaccaatccatgtgcttgcgactcgagcaatgcgtttgtggaaggagttcgatgaccggttcttctcaattcgggaccctaaacggttaaaagctgcattaaaacaacatcgtgttgaaatcattaatagactgaataacgactttgcccggccgtggttcgcgcaaacagacagcagtaaaccaacagagattgaggagctgagctataggcaagtcttacgccgtctctgccagcttacatatgtgcagcatcaggcacgctggatcgattcttcctacctcagcttggtgcatgactttctccgtcttgcacaaggacgcctgggctcaggttcagaagctgaattacgctttctttcctgcaacactcccatagagctggaagcgtcgtttgacgcagcctacggcgtgcaaggcgaccagatactttatccggaagatgtaagccttctcatcaatcttttccgccgacaaggtcagaagccggtgccctttattccgcggctcgatgcagatttccagacatggtttaagaaagattctctatggcagtctgaagatgtagacgctgtggtggaccaggatgcacaacgtgtttgcatcatacaagggcctgtagccgtgcgtcattcgcgagtatgcgatgagccagttaaagacattcttgatgggattactgaggcgcatttgaaaatgatgctcaaggaggcagcttctgacaacggttacacttgggctaaccagcgcgatgagaaaggcaatcgcttacctggcattgaaacaagccaggaaggctcgctgtgccggtattatcttgtcggacctaccctcccatcgacggaggcaatagtcgaacaccttgttggtgagtgcgcctggggctatgctgccctcagccaaaaaaaggttgtttttgggcaaaatcgcgctccaaatccgattcgggacgctttcaagccagatattggagacgtcattgaggcaaaatatatggatggctgccttcgtgaaatcacgttgtatcattccttgcgtcggcaaggagaccccagggcgatacgtgcagcactgggactgatacatctagacggcaataaggtatcagtgacattgctaactcgctcaaagggcaaacgacccgcgctggagtttaagatggaattgctcggaggaaccatgggccctttaattctcaaaatgcaccggactgattacttggacagcgtgaggcgcctgtacacggacctgtggattggtcgagaccttcctagcccaacttctgtcggtctgaattcagaatttactggcgatcgagtgacaataacagctgaggacgtgaatacgttcctggctattgtcggtcaagctggcccggcccgttgtcgagcttgggggacacggggcccagttgtgccaattgattatgctgtcgttatagcttggactgcactcacaaagccaatactgctcgaagcacttgatgcggaccctcttcgactcctccaccagtctgcttcaactcgtttcgtgcctggcatccgcccgttgcatgtgggagatacagtgacaacttcgtcgcgcataaccgagcgcacaatcaccaccataggccagcgagttgagatttctgcagagctcctcagagagggaaaaccggtggttcgactccaaacgacatttataatccagcggcggccagaggagagcgtatcccagcagcagtttcgttgcgttgaagagccagatatggtcatacgtgttgactcccacacaaaattaagagtcttaatgagtcgaaaatggttcttgctagatggaccttgctcagatcttattgggaagatattgatattccaactgcattcgcaaacggtattcgacgccgcaggagcacctgcttccctgcaagtttctggatcagtttcactggccccttctgatacctcagttgtctgtgtctcttcggtcggcacccggattggacgtgtatacatggaggaggaggggtttggagcgaatccagtcatggattttctgaaccgccacggtgcaccccgagtccagagacagccgctcccacgggcaggctggactggcgatgacgctgcatctatatcgtttactgcccctgcccaaagcgagggttatgcaatggtatctggagatacaaatcctattcacgtttgccctctgttctctcgttttgccgggctgggtcagcctgttgtgcatgggctgcacctgtctgccaccgtgcggcggattctggagtggatcattggcgacaatgaacggacccgtttctgcagctgggcgccctccttcgatggacttgtccgggcaaacgaccggttgcgaatggagatacaacactttgcaatggcggacgggtgtatggtggtccatgtaagagtgcttaaggagagtacgggtgagcaagtaatgcatgcagaggcggtactcgagcaggcccagacaacatacgtctttaccggccagggcacgcaggagagaggaatggggatggccttgtatgatacgaatgctgctgcacgagcagtatgggacagagcagaacggcactttagatcccaatatggtgcgttacctcctcaacccgagctcgacagaacgggcaactctaataccgattacaggcatttcgctccttcacatagtccgtgagaatcctacgagccttactgtcaactttggcagtcggcgtggtcggcaaatccgtgatatttatctttctatgtccgactctgatccatctatgctgcctggcttga

SEQ ID NO: 1981 - DNA, 1488 bp, Emericella nidulans
tcgccgccattgcgagcttcttcctcggtcttctcgcgaatctgcccgtcgctctggccccgggaatgggtctcaacgcgtactttgcctatactgtcgttggtcatcatggtaccggattgatcccctacagtcttgcagtgactgcggttttcgtcgagggctggattttcctcggtttgactttactcggtatccggcagtggcttgctcgtgccattcccgcctcgattaaactcgcgaccggcgccggtattggattgtacctgacgctgatcggtctcagctatagtgccggtcttggagttgtgcaggggggtacaagcagccctattcagttagccggctgcgcgtcagatacgttcggcgacgacgggttgtgtccttcgtccgaaaaaatgcgcaatcccacaatgtggattggtatcttttgcggcggtgttttcactgtcttcttgatgatgtatagggtcaagggtgcagtgattgctggtatcctgcttgtctcgatcatctcatggccgcgtccgaccccagttacctatttcccccacacagaaaccggtgacagctcgtttgatttcttcaagaaagtcgtcaccttccatccgattcagcatactctggtggcgcaggaatggaatatctccagtaatggtggacagtttggcctcgcattgatcacgttcttggtatgctatctagctcgtcggtatatacagagccctgctaactgggatagtacgtcgacattctcgacgctacgggtacattatactcaatggccaagtttgctggcgccatggacgagcgcacccaggattttgaaggcagtgctatggcttatgtaggcctctcacaccctctcgtgaaaacatcgctaactatagtagatggtcgacgcaatctgcatttccatcggttctttgttcggttctccgcctgttacagcattcgtcgagagcggtgctggtatttcggaaggtggaaagaccggtctgacatcatgtatgaccggtatctgcttcttcatcgccgtcttctttgcgcctatcttcacaacgattcatccatgggccactggcagaacattggtcaatgtcggctccataataatgcatgcgacactcgagatcaactgacggtttcttggagacccggttcccgcgttcttgacgatttcgctcatgccattcacctacagcattgccgacggcctgatcgccggtatcttgagctacatcctcatcaacgtaggtgtgtggattgttgccaagttgactggaggccggatttctcctcctaaccgcgaggaggagcacgagccgtggacctggacaatcccagcaggatttttcccgccatggctggtgcgtgcggttcatgggaagaagcacttctggcgggctgaagatgatgccaatgaaataagccttggcgtcaagcctcacgggtcgctctcgtcgcaggatccgaggtttctataag

SEQ ID NO: 1982 - DNA, 1502 bp, Emericella nidulans
tgagatggaggcacctcggctacctggggttactaaaacgatgatcatggcaagttcagattgtcacctggaaagaagatctcagctcaactctagatatcatcgacttggaggtggcgctctctgccctgccaccggtttggtgtcgagggcggggtggccagctaaccagtaaatgaagagatcggcacagccttgccaaaggtgggaaagattcccacctgggccacgctaagttgctgtcgaggataccaagcagtcatagttggtgctcagttgctgcggctgagttgttaggcatccacagtttcatcccctagcgccgtagcgagatggccgtgcagcaggatacgcattgccgtaatgctcaatcccggcggatatttccgttgtcgtgtcttttttggagaagtggacaaaaatggaccacagataaacaaaaatctgcatagataaggtacgggttccgtttcggctgcatgagttgttcgcaatggacgttaatggatatatacgaaaaaacatgtagttgcttactgagcagatctggataaggaatggccgaacccgttcattaagcaactgcaactggctaatagaccaattgggtctgcgaggctgggattgcatgttacaaaaggaacgcaggatatcccatacgtgatcaaggggatggaatcagttggcagaggcacgccgtgcgactgcaccagcaacggggaacggcctccttgcagccttcaagaaacatcatattgggaaatatcctggcaagcctctcaagtctgtagatacccatgacaccacgaaaatcgtgataaatgcctcgagctcaaggatggcaagctgacaacggagacgagagtgaaagagagaggcacagtcaccaacaactcgctccaaatcaaccgcacgcagagacaatgtccgttcgcttaacgcatgctcactgtccgtatcgacggccaggatgaccgtgaactataggaccacgcaagtgacactcatgcggcctgttcaagagaataggcgctatttaaggctggctcgtcaagggcaggacgtatgactgctagcattgattggaggtccagtttccgctcacgcagcagggcaaagagcagcagcaacaggggccagaccaggccagatggcattggcacggccacagctccccggaaaataggacgagatcattgagattcctcgttgtcagcaagggatagagcgcaatgcgcctgagaatgccctctccggactttgtgacctggcttttctgaacccttgacgcgggttagggccaatctccggtttcgggggcattgataataaagtatacgctgccccgtcggtttagatgacgcagaaccgaccctacagcttttgaaaaacgaaaagattcaaattcatattccgttcaaatttggctcattttttattaagtcctcaattgagtccctaacccctgaatggtctgacacagcagatgataggtaaagcag

SEQ ID NO: 1983 - DNA, 2257 bp, Emericella nidulans
ctggttgtattagggtcagctggttttgaccgaagaagccattttcactttaagtggtgagttaagataaactcaagctcgctgaggctgattgtttgatttataccagcccctgaggtacggatgtgggatagtggtgcaaagcacatatacttcaaaccgatgactcactgctttaggagctacagggtggaaatgcggccgtttatggcgcggtaaccgatattttcgacgtcggtatgcaagtcttcacattctatatataagaaaccttgcgtttttccctgccatgcgcaacccgggtaaatgcgtcaacacaaaggtctatacgctacctaatataggtagaatcagatacaagactatatttcacatttcatatgacattgaccttgaccaaggacagaacaataccattatctttattggacgcagatccgttgccgccggcaggtaccgtcggcattacccgtcagccttccgttcagggcacgcttcaagtccttggcgaatatcaagaccagatataaatttgcaattctagtatttgtgttctcctgccagagaatgtagctatacacattgtttgtaagagtgccgatgtcttgattttagccccgaaggcgttcaggtatacttgatagtcattgttcattggttgcaagtcttcgatgccgccataacatatcttcacctatatctgtctccttcataatcagcggcctgaaagcttgcttggatatcaaatgaaggtactctgtcaggatgtaaatatatatatctagttatacacatttactggctctgcaatcggagggaaaagcatgtagatcggcactttattttgctggcccagtgtgtctgcccagtgtccagacgcaggcggttgttacctgaaattcagtcacgtcagataaggatcgtggtgtaattaaatctggcgtgattgagctatagcatgaactacaccactagcggtcaatggggctcatcggttacttcgagactgcatatacctgcgaacatggttaggccgccatacacgaatgccgggtatccagcttaacgtcaccggtccgagaactcgccgggctgggccagataccggtgagcctgcccctgctgctaagtcatctcggtactctggacattggttctggtacggtgtcgcgcccagtaccatccgagaagcggggactcatttcggcgttagacctgcattgccccattgcagttgctgtattgaatgcccgacaacgcctggtgactaacgtcctcttggcgcagaccagccgcccgggccagagctgggctagaacggtataatagaaatactcctagtagttatgcaggtgttgtctgatgaaaatcaacagacatcagtccctcgtgggtttacattttagctggaaacattattccgttccagaaggagcagaataggattagccatgttgctgcttacatttagctcagacctcgtgctttagagctgctcacctacagaatggcggagagcagattcatcccgagtatgcctaacacgacattaagcagcctataagcggccattcagccattgtggtcgagccagaccactacctgtcgtacggtatgaaaggtgcgcagtccaagatacccaggtcgcgtagttaccctagtataggcacagtccagaaaaaaaagacccccgcacgtcaagccactgctgcattgtataaatcaggtgctattatccgtaaaccttggattatgacatcattaatctatttttccagagagacctacctattcaggctgggccaagggcgtttggccagtcaatcttccccggattcgggctccggtggggactccgcaggtattgtggggagagctggagtagaaatccccttaatttgcccgcaaggttgcggaggtcctccgatttctcggaagcaggtaagagcaaatccttaaatgctggctctcctcgggtcggtgtgccttagctcaaggagttggagtggttaatcctagtgctaccatcaccatcatgttccgctcatcggctacggtggccgcagccaccgccatgggcctgttgacggccgccgaccatggctcattggcgattgcgcagggtaccactggttccaatggtaagcgcactccgtctctataaagtatacggctagtgagttgaaacagcccaacaatcccaagcggtcgtcgtcgacgggacgaacttcgcgcgcatcgcagccaacatgtccac

SEQ ID NO: 1984 - DNA, 2572 bp, Emericella nidulans
gatcttgttgttgaggagccgccacctgattcaaagataggaagttagaacagcggcttggtcgctatttgcgttcttcaggactggcaagccaaggcggaacgcgacattgactcttcggcgtacgcgatatccacgcttgaggctgcgctggggtcgttcttcagcacgtcgaccctcgagggtggagctcttaaagccgtgaacttgggctgggatgcggataccgtgggtgccgtctatgggggcttagtgggcgcattctatggactggaggcgataccaactcgatggattgacggactacagaaaagggaagttatcgaagagattgtagatcgtcttgccaaactcggagaaacaacttgtctcaacatgacatcgtgaccagaaaagcgacatgttcagccaaatatgatggtgtttatggatagagaacgagttcagtgttgcggatgctataaggccaattaatgaaacaagcccgcaccaaagggagcatcttatctagtttgccgtgccgtagatcgatagttaccgtgccagcctttgaataatctattttatagttctatgcaaccatcaaatcaactatcattccaagatgtaaccaactagcacaggaataaacatatcaatgccccaccaaagcctggtgctccggcccataccgattgcccgcaggttttgcagcgtcaataatcctcctcatctccttccactcttccccactaaactcaatctccctggaggcccagttctcttctaaacgcttcgccttggtcgtccccggaattgcaatcatcccctgcgcggcgacccaagcaagcgcaatctgcgagatcgagacacccttcttcagcgcaagcttcttggtctcctcgactatggcacggtttttgtagaagttctcgccttgaaacttggggcctacacaagtttatccgttagttgatgagttccttttgggcaggtgtcgggattaggtgtttcgtaacgtactcctccgtcggaaatcatccggcgcaaaatcgtcaggtgtcttgtagtcgaagttatcgacgagccagccgtggcctagcggactgtaggcaatgtaggcgatgcctagctcctttgctgtgtcgataagaccgtctgtttcatggatggtttcgaaggtggagtattcagcttgtatggcgtcgattctggcgactatcacaaaccagtcagcaccaagaagccaaggtgggacgtttgaggggtgcatacttgagttcgcctttcgcagggtcgcagctgagcattcagagaggccaatgtacttggtctttccggccttgcggatctcatccagggccgggattgactcttcgaggggcgtatctgttacattatggttagatgagtgcttcaatggccatttattccggtctatggcgtactagggtcaatccggtggagatagtagagatcaggcgtgaaatcaaggcgtttaatggttccctcgatgtactccttaatatgggtagcagagttggtgacgccgcccttgccaaagacatcgaagccacacttagaggcgactggtgttggtgttaacttggtacatagagagaagcctcaattcgcaaaaaaagaggggattttaccaaacactttatcgcgaacgttatgctttttgatgaatgcgccaagaagcttctcgtttataccggcttggtaaacaaccttcccttccgatcagaatccgtcctagtttcagtgactcgagtcagcttacagcggtatcccagaatgtacatcccagctcgatggccttcagcagcacgggctctgcctcttccaagctgaggtttgagcccaacccgaaactcagacccatagccccgaagccgggagatggaacatggatatcagcaaaagggagtgttttgaccatcgtgatatccgtacttgcaataatgttcttgaggattgtctagtggattgtttgggaggcgagtccagggctttaaatattgtaccaccgctctatcaagtctcggatatactacggagaaatgcctgtggagaactggctgaagcatccatcacgaccccttatgtcctaagcccgaaaatatagtccggagctgtcatcaagatgggccgtaggacactggctgttccacatctgaagaaagcgaagctgagattataatctcaaaaccatgatcatgctagttcgttacccactggcaagacaatcgtgaacttacccgaagttttggctccgcgctaattgctgacacttgcagatcattgagactcgaggattggatgatgaagtatagacctaaaagattctggtcgagcgtgtacaaggactaacattacctcctgctggaagcaacttcgtctacagcattgggccgccatcatttcatgtactaatgacataataatcagtcatttaccagtagaagattgggtgcatgtgagtagcactatactggggctaaaatccagctaaactaagcgacaatgcttgacagggagcagcacctgtccactatgtagagattgttacaatcccttgagcgcaaca

SEQ ID NO: 1985 - DNA, 2480 bp, Emericella nidulans
actgaattaatgaaacagtacagtaccgtgaccattttttcttgctttatcaacacgatttccccatgcaataagcataaaatgatgctctatcgcttgaaacgatattttggacgtcggggatgcccgagcacaaggcatggaagagaccttgcgccggctctagaattgaccgctcttcaaggcagttattcgtagtgctgatacatttgagggtcggttaaaaccggtgacgataaatgtgcgacccgcgcaggcagaatttaactgcagaaagcgccgctttttagttgctgtggctgatattgaagcaattatacttgggctttggctcgatctctctcagtgggattatatctaatagtgcatgagttaaattttagtcacctaataactcgagatgcttaccgcagaagcttttcaatcaagtcaacgtgtgtcatgaccattcggcgacagcaatagcgcttgcacccgagttgatccatagcgtctctagaagtccgcaagtttagacaggtaatataagagcccatggaaatactgacccatcggggataccatcgtcaagaagctgtaggtatcgctcccagagatcgccaacaacctaaacatgatggcatgtcagtaataagtccggcacatgatgtgagtcacagaaccttgccgcatgagaagcaccgaaccggaattatcatcgtgttgaacaaaggagtacaagaacgagaattatcaagcgatttgagtcgatggggccgtggaaatgatgctcagaatgcttctcgaaggcggtgtcctgtgtaccttttatgcaagggcccacttgcggaaggccactaacctaggtcggattggcgcctacttgtcgcccagtaagaattgagtgcagcagttaacctccagactcttttgacttaaagagattttttcttaatacgaagcaaagctagggcttgagcatatcatcagattcacataccgtgcctggagtgctggtcaagttcagcttctcgactttaggcacagtattgttcacacttcattatgtcgacaaaagacaattcaagtccggtgcggcctacgaaaagatcacgggcaagtggtgcaggtcttgacaacgtaaaatccaaaggcgatcgggtaaaacgacgtcgaacctccacagacaacgaaacagggaaaaccctgaaagattcgaatgccttggaaatttcacaacaattcattgatgcaaccgaagctccctcagaggctccaacttggactttgtcccggcccatcgccggccatttcacaaacacagatcctgttcttacgcctgacgagcagtatgtattccctcacttctatgactttactgttgattaattctgatatagatatctttttctcggtgtcgaaacctcggtccacgtttattcagttgctacttctcgtctcctccgtgtcctagaagtaggctccggcgatagcgtggctggatatagactttcctccacaaactatgaccgtcttcatatcattacattatctgggtccgtgagcgaatgggattggccttccaacaaacaagttgctcattggaacacggcaccccggattatcgcagttgatattgtatacgattcttcctccggtacattattttcactacggaagcgcaaggatggaaagagagaattagcggtcacgccactgaataatgagaagccacagagcactgtcatactcgagaccaatgccaaaatcgacaagttcagagtaagcgatgactttctggtggtgtacggtggtgccagtgttttttttggtacttcttgctccactcaaggttctgagtcgcacaagttcgtgtggaaggaggtcaaactagcttccactgttacctgtgttgatatatggggtactggaccggagtttgaccttgcacttgggggtgctgacggttctgttttgatatatcatattcaaggttccacgattaagaacccacccaggcgactacattggcatcgagaccctgtcacagccgttcgctggtcaaaagatggttggtcgcctcttacaattcacagaattaaaaaaagctaactgaaataaaggcaattacgtcctatcaggcggtcacgagtcagtcatggtactttggcaactagataccagccgaaagcagttcctccctcatttgtcttctccaatttgcagcatagttgtttccgaaagtggtaactcctacgttgttaggctggccgataatcgtgttgtggtcttgtcggcaagggaattgcagcccatttctacaataactagtctgcaagtcgctcgtttagcaaacacatgcaagacagttgcagctgtgcacccgcagcatccagagcaacttctaatgcctccaccagcttctcgccaactcacacaaagaaaaattacttcagcaagtgcttctgttctgcagacaaatgacactcggtcatgggtcc

SEQ ID NO: 1986 - DNA, 1524 bp, Emericella nidulans
aagctggcgaaaacggccaggtgtgctcaaaaagtaacacacataaccactacaacatgcttgcaatcgaaaagccggaattggccatgcccaagccccaaagtggggcggagggttgtcattccctggataaagcgggcatccggctgggttctttctttgggtttgcacagcagttcgccacaagtcgttgcctagccgtcggtctttaccagtaatttgagttcgccaaagaatcagccagaccgggtcatctagctaacaataagtgatcttcataatcttctaagagacctatattaggcactcttctaattggttagtcccgtggaaaacttcccacactcccatgggaagtcccatgggactaaaaattcctatccattgtttagtcaatttgatccccctgaggttgtgataaaaaaaatattctacttatacatagatctatatccaatatatacttttcttaacctccccctacataattctactacttcagaaggtaaaaaagagaattcgataatatatactactcatacggttgtcaatccgcaccgcaacccgcagcggtgcggtgcggtgcgggttgcgggttctgatgtctgtaatacaaacctataatatctagacttgttaaacccaacccacgaaacccgccccaactcggcccgacccgccaagaaatgggttgggttagaccttctaattatccattgggttttggatatttttggctgccccaaagcccggcggagcaacccgctgggttgccaagatatctgaataggtatattactgtatttagattatatttgcttacttagatagttataatacagtatttaaatacagtattttattaactatgtaaatcacttcttactaaagtaatgacatgcatagctgggttattctgggtcatttgggttgggttagaattatttgctaaacccatgggcggtttactgttcaggtaaaccaccccaaaaaccgcgtgggcggatcagctaggcctgaaattcccgccccaacccgtggtttaaacaagtctactgttggctattgaggtggttgctagcgtcgatttgattatgtgattgatatctgtaatgagcgactgcattgaaggtattgatcttataactatgatctgtatagctaatttatacacttccaaaggcttcaaaagaatgttctcgatatcagtagataattaagttaatatatggttgattgcgatccgtctatggcggtgtgatcgcatatgattggacgagcgaggtgctggatattgattaatgaagaggtcttctctggtcgatatctacgtatatagtataaatttaggtatattaaagcaacgtgctgctttgcgtattaatataatctctctttttttatacctgtacagccagcaggagccgacctttcttctcatgacaattttggctttgactaacgcgaatcggggtattgtggtctgtggaagaagatgaccgcgtagcatgtaaaaaatggtgg

SEQ ID NO: 1987 - DNA, 3597 bp, Emericella nidulans
gcgccctaatacgcaaaccgaacgtgcttcttctcgacgaggcgacgagcgcgctggacacggagtccgagaagctggtgcagggtgcgctaactgaggcagcagcggagcagaataggattacggttgcggtggcgcattggctttcgacggtccgtgatgcggactgtatctttgtctttcatgcgggtagaattgtggagtttgggtcgcatagcgagctgcttagccggggtggaatgtatgctgcgatgtgcgaggccagaagctggatgtgaatggcactgtgtcagcatgattcagcgagagcgggagtcgaggttgctgatgaagttgttgggtgcgctcaatgtgtcgcgaccagcgccaacaatgcttgagagattatacaatgtatttatatagagcaatagactgggttcgatctgtgaggcgagtattggattggtgggggcgcatgagaaccataaaaaaaggggaaaagactttgtagagaggagagaggagagagtgttcttgaaaacattgcttttggtggaattgtacattctacacctgtacgccttctatatgtgaaggctataaactcgtagggtatcattttgctacctgcccctgctaataattggacgttatattttcctgatggtttgtggtaaaattttcgattgaccacgcttgctcgctagcaaggtttagacactgatatgaaaggctccctcttcagaagctgactgtaagttcccagatttctgtcgcctgctactgtattgccaattccagatatttagcactactttgaccctttgcgttgcgttcattttgcagcctctctaactctcggcttgcgaggccatgacctccaagttctcttcatagcaaccgaggagagtgagtgcaatcgaactttctcttcatatcatcctccccattatatataccatgtaaatcaacttgatcctcatccaaatccgtcatctctcctcctgcggagtggacgagtggcaaaagttgcgagtgttttaggtcagatgctgaacaagaaagttgagtctttggtacatggtgcttaacagtatatactgcactacaagctactcctcctctatataccaataggagcacacggaacccttagcccagtcgttgctataagctacttgaccgtgtacttatacgtagtagaagtcacgtgtcatccttatcagtgcaaggtggaccgcagacacttccctttctattctcattccctttccctccgcacgtcgacgctaccttatcataaaatcggtgttccttcgtcaggacataaagctacccaaacgtatccaaaatggccgacaagctgcgcacccttcaaaatctcgaagcgcaacaagcgcgctacattggcactggacatgccgacacaaccaagcacgagtttctgaacaacatcgtgcgcgatagctatgccagctatatcgggcacccaccgctgctagggtacatggcgctgggaatgggcgagagccgcgaaaaggtgcgtgctatgatggtcgagaagatggtcaggggggttggggctccgccggaggttagtatttcctttttcttctcctcttcctcttttgttcgggaggattcgcggatcttgatggggctgacgctgtgaactgtagacgcaagagtagcgctctgcgacgtgaaacgaagggttttgatatccggcaggacactttcccgcccgatgagaagcgatatggtcggttcaatcaatgagactaaacgaggtgttaacgcggttgaatgcgcgtatgatttgccataagagagaggcgaagactcggccgacttgatgcccctggtctgaaatcggcgcgggcagggtttggagcgactgcttcgattcgattacagtgatagtcgctatgatccacggtacaattgtgtgagacgtcggatatgctacaacacgtggaacggacagtatctggggccgtaaggggtctattgtggtaagagatgatatgaggcatgcacgttacgcggcgtctatggcgttattctacgggcatattttggacggacaaaatatcggtagataaacctcccagaggttctgagttcgttcctatcattataataatatacagcatgtatgctcaattcaaccctgaccatatacatattttgcgcatttcattactttgtattcccatctatcgctgccgcatttccctgcctcgccaatttcgtgttctccgcctgcaacgccttgataaggctaagccactgcttccgctcacccttcaatctctcgcactctttcttcaggtgctcaacctccctcttcaaaacttctgtctcgtcgcgcgatcgtgccttatcctccttctccgcttctttccgatgcctcgcctcaatcttagccgcctctttgatctggtgccgctcaatcttggaaaggcgacggacgagcttggcttcttcccggaagaggccggacgacgtttatgcatctgtggcgtatcggatgcgggggccggcgtgccagagcggctacggtttttggtggcgctgctgcttgatgtgctgtcggaggtgagtttgttggtgctgctgttgggacttattggactgccaggcttgtctactgaggcccgcgcagatgttgtctctttcttgacttcttgctcatctggggcacgcaggccgagagcgtggatgtctgatcggacgagctggatctgggcctcgacgctgcgtttctcctgggccagtttggcgagttgccgctcatgcgaggagagcttgcccttgcgatttccttgacgcatttcgtctgctgagcattctcactttccctcttatcactcctatccatctctccttactcaatctctaaaccccttcttcacactcatacacatctccatgtactcaataccatactacttcctttccttcctcacacctctctatcctccctctctcctctttctccattaacttccatttatcattcccattacacttctattcttccaacatacttcattccactcttccctccctaccttctcttctaaattattataacaatcctccacctcaactccctcaatcacactctcctctaccacccttctctcataactactataccccctcttcacttatcacttttacctccttccattctacttcttccccatcccatcatacccctttcctttcctccctactctcctccactaatctaccttcttccactcttctatctctacctcacttatttacatatcctcctatcattaatacttatctttcaattcaattttatacacataatttcatatcctctttatcctcatatactcatcttttcttcatctttcccaccccatccctttcctcacaccctcttttatcctattcctactcaacttacctcaactcccatccttccactcccactcttccttcttacttcaaaccctctctatcacactccttacctcatacactctacttttctcactaccccctcttcttactcatccatcccactctattttcactatttccctctttcaaacctcctacctctctttc

SEQ ID NO: 1988 - DNA, 3040 bp, Emericella nidulans
cagcttataaaaaaaacacagggctggcatagcgaaattgatgtcgctcagtggatgaaatccaatccggacgttaatcagctgctttacgagtgatagggtacctacccacaggaagtcataatgataataggccgatggagagtcgtagcgataggatgatctgatcgagtgaactcatacatacgaccgcgaggtggtcattccagctaagccacccagtgaaaagcaaagaggcaccaggagactatcacgacggctgattaatgtcgcagtctagatagagtatgctcatcttcgaggctcaagggattgactgactcggctcccttcataatcatcacggagttgtctacagacagttagtaaaccagtagtacttcaatgatccacattatctatattgtacggagtagatgatgggtcccttcgcttaagattaatcctaaacctggcatcgacacctacctgcatactatcacttcatagcggcgtaatcgacactgatcccgcttgctctgcaagcgagctagcgggctggcgggtaatctatttgcctgggccccatagaagcacgcagcggtaccgttgctgtactcgttaacactattaaccgtcaagccttatttgtatccataaccgatggaatattgctgtgggcgggtcgagtcatgactctaccgacatgacaggccaagactatgaaattcggaagcgatattagtcgcgactcagggaggacggggaagatgcctatcggggtaggaatgtactttattcgggacgactgcaccgacccccttctccaatattctgatatccagccgacagaaaatggcattctggcatctgccgagtatgaagtcgatacggctatttccaagttccaaacgatagtgggagatgcggccagggcatggcgtaccgtatggctacgcctatacatagatgatcgacaaagtcaaggtttattcgtatcgagattacacacgtactgtgtacagtgtcatgcctcgttaggccggtttaattgcgcgtgaatttggcgatggctaagtgtatgcgttgatagaagctacaccgtaagtgagatggatgctttggatgtcttgatgatcttttgcattttgcattctgcatttgaatttgaggacagtacgtatagtacttcgtcgtcgtagcaggaatgaaccgtaccggaaattaccagaaataccaataccagcctgcattagtgcgtcggctttcgtgccaaacccgggaagggccgaaggatgcctgcgacgggggcgacaatcttgccacgtgaagtcaccagggtccagactccagcggcgacgctaggaggccggcgctatgccaaagaggaatggtaagggcgcttgctccagcagttcgatgctccggacgcgtggttggtcgtgacctggtgtttcaggggcggcagagcgttggaactttctgggcgagggactaagccggtttggtgcttgcgcaatcctttgactcttggcttcttgactcttggacgcttgtctcttcattccgattccgagcccctggctgcctgggtgcctgtatgcctgtatgcctgacctgctccccacaaacccaccggagcctgcactgagtcgcaaagtcacagaccgagccgctggccccgattccagttcctccccgagcagcgccaggaaaggcttcctgacgtacgacgatcgaccgtgatggtatgtgagtgcctaggcctgtgtttcgacatgatagctcagatattattttttatgagtagcatagtgatcactatcaccagattcactcccaactggtatcttacagccgatcacataggagtaacggagtatacttaccgaaatcgcagcctggcaaggttgtacgatcacagaaaccggaatactacgcaacataggtcgcaacagctgccggaaataataatgcataatgctgaagctgaagtgttgcacagtctgtgccacatttgccaatctgcagagtgaggaacagcgtggttatccgcagcatacagcctcgctcccccatgtgtttgtcatcgagtcctcactgcgtaacatcggttacagtcagactcggacacggcggtgctgaagctgttcaccacggaatgtgattggatatgcagggggaaaaggggggaggagacgtcgatcccgtattacggacgcgcgtggcaggagatgtgatgatctcctcatcacgcgtggctgtacaggcttagccaagacagccctgtctcctgaccagctcctgaaacactgaaaacttggacagggatggctgctctttgcttttcgcactgatcgacgcttatcataaacttcaccgctcgcctatctcggacagacagacgaccagccctggaatcgcttgacatggttccctttacttcgcggttcctgggtcgtgcgaggcctaacctgatacggcgcacccaagcgagcactgatcagattcgattatgagattgttcttggcatgttgttctgcgatgctttttcctctgctccccaagaactcgcattcccaaaagtaatcatgagttatccttgagctttgaccattatccctgataaggcacttcccgtaatggaagcatcaccgtgggggaataccgagaccgttactgtttcgcatagcggcaagaactatgcgttacaggtccatagtctcggagatagatcccagtaacgcctggaggctgattatcatatcagacagaggctagagcctgactaggctggcttgattcaaggccgccagggggctggagtccttggagaaaggccaagcccaaagggagaacttgcagggcaagatgattgattaccggcccgctaagcgagttgcagtagttcatccgagcactaatccggcggtcggcggtcagtgctctggacgttgagcgttggaatgatcgtcgcgcatcataatcatctagtgctagtagttcatctcgggattgcttttctagttttaccggtgtccggccggatcattgatacgt

SEQ ID NO: 1989 - DNA, 2569 bp, Emericella nidulans
ctactcccgatcagttcatccggatatgtggaacgcgactctcgtgcattgcgtcgcgattaggcaagcccctgccgccatctgcagttcgcattacaggaggctgaacgcagaaggtggcggagacaagagtgatcagcaagaaaaaatcacagcggtcgtcaacgtgccgcagtctaagtacaactacgtggcaatcgagccaccagtgatagagacgccgcagctgcgtgacatgggcgaggctacgccaccgctagagtggattggccttcagcgggacaagctccccaatgtcacgcatcagatcataattgttaccttgctggaggtggccaaggaggtagaggacgcttacgccaagatactgtggtcttcttgaaaagccctcaactagatgttgccgttcatgtatttattgtatactattgtcagtgttatacccagtttcgaattacattcatgcaccgttgttgagcgaaaatgtcgaccaacctatgctatatcccttgcagtaaaagcagcaccgtgcctagctcgagcggaaatcttgaatgtgggcttgagagctcaagctaagcttcttcaggactgtaaatcctgattcaaagatattgcccaatcagacgctgcggctttgcagagctttcagagctatgtcaattagtaagcaattaccccactagtgcccctcaccagggctatgatttgaaacctgtaacttgccagtcagcagaaggtggcagcacatctttctcgtcgttgtgaagtggcaacaagcgattcatgatttcattttggagatattattggctggagttcctataattacgaggcggtgtgccggagagtgaggtctaccaagctgattaccaaccatatttggatagccgattccatggaaagagaggatatcgcgggagatgactcctcttgatgcttctcgtgttgtagtcaaatgatgctgatgatcgttttaagtcagaattgagtcagtgatgtgagacgaagttcgtgatgactacttgtccaatctcatggtgtagattcattccatcggcgaccttgaaaccgtcaacaggtctctgatagatattcgctcaggtggcatccagtcatacgttttgttttagaaagaagagttatatgttgactaaatactgtacctttgtactttgtaatctccaagatgacaccgggggtaaggggcatcagagggccacaagcgggaaatgggtgcccagtggaaaaaacgcacatcccagattgggactcgggaaaaaaccaaccaccgccggccccacgaccactaaactcgcttgcttcctctcttccacttcccctcctctccctcctcctctctcttcccaaccctcttctcctccctcagtctctccctctggagcagcgcacataggccttttttcctatcccaggtcatcttcaggtcgagctagctctcggtcctgatctcttgtgtgtcgttttctgctttcttttttctttttcttcccctcttccacacaaccccgcctttgaggctttaacagaaaaaaaccgccaaaatggtcaagtaagtccatcccgaatcatctagacgatgattgtgatggaaatggttttgataaatatgctaacgcggttctttacagcttcactatcgaggaggtatgccgttccattgaaaacgccagcgacccggagctataaaaatttttctcagcgacggggagattgatgtagtactaacaagcactagctccgctccctcatggaccgcaaggccaacatccgtaacatgtcggtcattgctcacggttcgtactcgacaattccttcaccggcgtgatttgtatgctgaatgtttcatagtcgatcacggaaagtccactctcagtgactctctcgtctcgcgtgccggtatcattgctggtgccaaggctggtgatgcccgtttcatggacacccgtcctgatgaacaggagcgtggtatcaccatcaagtctactgccatctctctttacgccaagttcgccgatgaggaggatatcaaggaaatcccccaggccgtcgacggtaacgagttcttgatcaacttgatcgattcccccggtcacgttgatttctcttctgaagtcactgctgccctccgtgtcactgacggtgcccttgtcgtcgtcgactgtgtctctggtgtttgcgtccagactgagactgtgctccgtcaggccctgactgagcgtatcaagcccgtccttatcatcaacaaggtcgaccgctctctgctcgaactccaggtcgagaaggaggacctctaccagtctttcctccgtaccgttgagtccgtcaacgtcatcatcgctacctatgaggacaaggccctcggcaacgtccaggtctaccccgaaaagggtaccgttgctttcggttccggtcttcacggctgggctttcaccgtccgccagttcgccgtcaagttcgccaagaagttcggtgttgaccgcaagaagatgcttgagcgtctgtggggtgacaactacttcaacccaagaccaagaagtggacaaga

SEQ ID NO: 1990 - DNA, 3095 bp, Emericella nidulans
aacttgttgccaacctcgaatcgctagctgatgctttgcccgatgctgagaccgacacgaacagctctgggcaagtcaacatcatcaaacagaaaactttgaaacaccgacctggtgctcagaagcgcaaggaaaaaatcgagaaactggagcgagaacggtttgtgaaaaatatggcgcagatgtcgagtatctctgcaatgactacatcgaactcgcagccggtggctgcggagtcagtatcaagtcgatgggccgcgttacggggctttatatctcagactatggaacagcagcctgcgttcaagacgaataagtgaaacctaccgctgcaagggcagtctatgatgaaccgatcctcgttttcggcgacagtcatgttataacaagaagtgtgctatcccgcgaccatgatataagtgtgcggcggactgtgtgcactaggaactcggtactacattgtcttcgcaactttgcgtgcagtgataatacctcgatgaacttggattagctaaggtgttagtactcctcgggagcagtgtgccccttgaggcgaaacagaaggctcaaatacaattcagaaaatggtgctggctttcagggcagtgttgcgctgatttggaggcagccagcgagctttgacaacgaccatggcctattaccattcacaacttctaaagccttgtgagacttgtcctgatcggcggaccaggcattgatgaaggagttatttgatgaatgttgatcatagatgacaggtagtgaagtgcaatgcaatttctgttgtagtcgcgtggtataagttgagaggcgagggccgatcgcggtttaaagcggggatcaggaatgacggggcgggtcgatggggcatcttatctgacaaccttacttcctcacctcccaccagctccccatctcattctcccatctcctcaacttgtggtcctcttcttctttcctcctcttgtcgcttatgcaccaccttcacgtttggataacatttgctagagaattcagttatttagcaaccccggcgcccgtcatgctacggctgccgtgtcggccactgtcagtgcaccgcaccgccctccgttaccggccgcttgcgattcatccttcccatttacgtcgcggtttctcgagctcgtcagtgtccttccctacatttacgcagtttgatagatccgacttcacgagtcagccattctctggcgtatatgaaactggattacctacggctggtccgctaggatccacacctgcattcggagttcgcatcacaccgaaatcattgaagcaatatctggatcaattcgttgttggacaggagcgtgcaaagaagatcctgagtgtcgcagtgtataaccattatcagcgagtgcaagagctccagagacgtcaggaagaagccgagcaactgcttgccaagcgtttgcgccgagaggatattcagaggcgccaggaagaacgtgaggagcttctcggcaaacatgcgagcacggattccgtcgagcatcacccggtcgaaggtatgtttctttactttcagccatacatggcctggattctttgtccgagctgatgcaatttatagacgagtacccaggccaacagcgcacgatctatccaaacaacccacctacccagccttcctatgctacagataatgcagaaatcgacgaatcgtcacaactacagattgagaaatccaatgtccttcttttgggtccctccggagtaggcaagactctcatgtgccgctcattagcccgagtcttatcggttcctttcagcatctcagactgtactccgttcacacaggccggttatatcggggacgatgcagaagtatgcgtacaccggcttctagcggccgcgaactacgacgtcgagcaagcagagcgcggaataatcgtcctggatgaaatagacaaaatcgcagccgccaaggtcagccatggccgtgacgtgggaggatctggtgttcaggaaagccttttgaagctcctcgagggtacgaccgtacaggtgcaggcgaagcaggaacgcagtgcgccacgtctcagcgggacaaccagttcttcatatcctccgaatggcctattaggaaacaccccctttactcccccgggtggaggtaatgtacctcataaaggtgaggtttataatgtccgtaccgataatatccagctcatatgttccggcgcgtttgccggacttcaccaagtttttattgccccataattccgtgccttattggggttcggacagccgtttctattccctctatctatcttctcctcctgtcaactattattactttcacactctttatccacctcgttctccttacttacccgtttcctaatcttgcatcctctattccttcttcccttttccttcttttctccacctccactctctatccttcttctgatcctctctctcctcctccttataccccgtcttgcccctactctacccacttccttcactctctttatcctatcaacctactttcctcccattctctcctttctcctccatctccactctcttctccattatatactactcctctcctttcaccctactctctctatttcttatatttatctctttatttctctcttctcccatatctctctttctactatatatctcattctcctctattatccatctcccttaatctttatcccacttgtatctttcttctatccgtctccccctcctatcatatatcttctctctcctcttacttcacatttcacacctaaattctccttcgtctttttcttttcctctctccttttcactctcatccctccctaactcttcccattctgttatataacctcctctctctcttcctttcttcttccatcctccttcttttctctatatcttccatttctatatttcgttactctactttcttcctctctttatacctctctctattctatccattaaccctctttctctattctttcacatcttccctctccttcatttttcaattttaactcactcccctctccatattcctgtctccgttttcaccctttcactcatcttctctctttaatcac

SEQ ID NO: 1991 - DNA, 7737 bp, Emericella nidulans
tgttgatgacggtattgcattggtttctcctttctgatgtaacgatccactggaaagacctttgatcgtttgtacataactatacgctagtatttttcaatgagttagcggcgcttcaacgaggctaatctgttgttgcagtcgccaagggcgaatctgtattctttgtataagattattgtataagtacaagccgcccagacagagggcttgtctcttccaagcattcacacggtcccgtctttcactactcttactcttggaacttttaattttcttttttttattctttttcatgcttcattgttgatgttgctagaccgttgagatacccctcttgttcttctacccgtttcccccttacaagcatcatcatcaccatcattatgcctggcgctatagaatcctccccatcggagtggctacagcttgagctccggaggatatgtgccaatgtgctccagcttgacaccaaagatgtcgatccgcaacggtcctttctctccttgggcggcgactctctgctggccatcaagatattggcccaatgtcgggctcagggtattaccatcaacattgccgatatcatggcagcaactacactggagtcgctgtattcgatggcccagggcccggctgagcttgcctcgtcctccaccagcgataatgccagcgacaaggacagctcactggatgactcagagactggcgccctcacccctaccaccgacgctggctcgagcttggccgacacactctcgcccgagatgaaggccaaattgtctgcgctctccgtatcccaggataccgctattcaagcggttgtcccttgttccgcaatccaggacagaatgctcgtcagccaactacagaatcctcacctatactcgtgctgctttgtgctcagattaacccactcacacccaggcctccccgtcgatgccaaacgactgggtacggcttggggtgaagttgtcaagcgtcactccagcctacggacggtcctggttgagagcacacagcgaccagggcactacaaccaagtcattctggctgggatcattccggcagttgaacactatgaaggagccgaccacttaggctcagtcaagttcaacgtgaataacccaatcgtctttcagccgcactcgatcccacaccgactacagctggtccaggtctctccctcggaggtttatctaaaattcgacatctcacatctcctcattgatggacagtcggctgaagtcttgttaaaggacttgagcgacgcctaccgtgatggcgggctggcggcggcacccctgtcatacgctgattatgtctcctcctacctcctcgaacctgctcagctaaacacatccagaaaggagtccggcatggagatgagccctctaacagttccaatggacagaccaaacgaagggctatttgactttcagacggtcagcgcaaacgtacctctcgattctcgactcgtccaatccgtctgcgcgagatactctgtgacacttgcgacagtgtgccagctagcctgggggcttgtcctgcgctgctacgccggcacagacagtgtctgcttttcgtacgtcaactctggtcgctccatgtccattcctggtgtgcaggaggtcatcggcccgatcgtgcagacctcgatgtgctccattcagctcggtccagctgatgagttacccaagatcctgcagcgcatccatagggatgcattacaggccatgtcccagttatcgcctctggaggcgaatagcacatccaagtcagcgcggcagctgagtaatacgaccatgtcatttcaacgagccctagatgatgctgctgcgcagagagctggtctcttagttaaaattgagggcaaagctaatcctactgatgtgagctgtgtttaacctatcctgttactgacctctgacgtcttgcagtacgacatctctctgggcattgcgcaggtccgatggcctctccgttgatctggatttctggggctccaggctcgacgaggaaagcgccagaacgatgctgggtgcattcgaggccgcaatcagagggatcattgactccccggacagcactgtttctaatatcagtcttctctctccgggcgaggtctcccagctagcgcaatggaacgcaagcatcccgaagccggaacgagtgtgcgtgcatgacaagattatggaaatctccaagcttcagccaggtgctgcagccgtcaactcgtgggatgggaacctgacataccatgacctcactgttcaggcatcgaccctggcccatcatttgcgggatcagcttggggtagggcccgaacggtttgttggtatctgcatggacaagtcgaagtgggcgattgtctccatgctggcagttctcatggccggtggcatcgtcgttccgctgggagtttcccaccctcgagcacgcataagggaacttctgaatgatacagctcgtgtcgccctgcttgttgacggtaagcatggagaccggcttgcaggtcttgaggtggaaaatgctgccatgctcacggtggatcagcagcttctagactctctgccaacaatccctaagcccccagtctccggggtgacgcccgacaatgctgcctgggtcatctacacttcaggctcaacaggtgtcccaaagggggttgtactgctgcatcagaacatttccacaagtgttatcgcccacggagcggtatttggcgtcaactgtgttacccgtacagcacagtttgcttcatacactttcgatgtcagtctctctgatatcgtcatgaccctcttccacgggggatgtgtctgtatcttctccgaggaaagccgcatgaacagtctcaccgaagctctgcaggggctcgctgtcaactacgtcaatttgactccgaccgtgcttggcttgttaaaccctgctgatctcccagtgatcgcactgtcgtcgctggaggagaggctatggaccctgggatcatagagaaatggtcgccacatgctcgagtcttcaattccgttggaccctcagaatgtaccatcattgctgtcgcagctggtcctgtcacggaccctgctcaagctgccaatgtcggctaccccactgggactcgactttgggtggcattgcctacagacccaaaccagttgtgccctgtcggcgagcccggcgagcttctgatcgaaggtcccatgctctcccgtggctatctgaacgacccagagaagacagcgggcgcattcattacgaatccggctttcgtcaaacatctcgaggctgctactcccgcatggaaggttctgttccaaaaaagtgagcgtcgcttctatcgctcaggcgaccttgttcgccagaagagagatgggtcccttgttcatatgggcagacgagacacgcaggtcaagatccgcgggcaaagagtcgaaatcggtgagatcgaatactggatcatgcagcggctcaaggaggtccggcgcgtagcagtcctcgtaatcgaacgcggacaagggaaggagcagaaatctcttgttgcggctgtcgaattcaaagaggattacgaggacgtcaggcatagcgacgatgatatctctcccgtcacgaagattggagaatccacagttctgccccagttgctacccctgaccgagccactgtctaaggcattgcatcagctgcgcaatgacctgttagagcatcttcccccgtacatgtcgccaacaatgtacgcgcccgtctcacagctaccgctgaacctatccggcaagatcgaccgccgggcagtgacccagttcatcaacgaactagacgacgtgcagctacagcagtatctcgccgtcagtggatcacaccaggagccttccactgagaccgaattcaaactgcagaagctgtgggccaagactctcggtgttgatgtctcgcagatcagcgcagatagccatttcttccatattgggggcgactcagtagcagctatgcgcgttgtcgccgctgcacgggatgtgggagttggtcctgcgcgtcgctgatctcttcgagtacccccgtctccctgaccttgctcgcgcggtagagagccgcgtcgtagatgaagccgatgaggaagatccagccccgttcagcgtgtggcgggaaagtcgcggctcggagcccagcgaagagccagttgagttggataagatcgctgctatgtgtaatttatcgaaggagcaaatcgaagacgttcttccgtgcaccgctctacaagaagggcttatcgctctcacggcgcagcagccaacagcctacattgaccgcagagtttttgctctctcacaggaggtcgatctatctcattaccgtgctgcctggcagattgtcatccaccgaacctcggctctacgcacacggattgtgtctgggcctcagacaggttcactgcaggtcgtggttgttccccgtcatattgattggaacaagtcgtcatctttagatgagtacctcgagaccgacaggcagacggggatgatgatgggtcagcccttaaaccgtttcgcctttgtggatcagcctgatggccagcggttctttgtatggaccactcatcatagcacgtacgatggatggagtcgagccttggttcttcagcaggtcgccgatgcctacgcgagtcgagacctgccacccattgcctctttctcccggtttattcaatacatccactctcagccgcaagacgcagcggcctcgtactggaaggcccaactcggtggggatacgagcgctgactttcctgcgcttccaattgccaattaccgacctcgtccgcagcagcgccatcagcatacagttaatctagcttccagctctacaaaggtaatgttgccagaccttcttcgaggcgcttgggcgctggttgtgcatcagtatgttggcaaaactgatccggtatttgccattgctctctccgggcgaaatgctccagtacgcaatgtgcccaacatcgccggaccgaccttgacgaccgtccctgtgcgcatcttcatagatccagagcagctcgtcaacgagttcctgcagagtgtgagacagcaagccgtcgatatgataccttacgagcatacaggtcttcagcgcatcaagaagatggtccccgagctggcagcagcagtcgacctcaaacatcttttcgttgtacagccggcaagtgatggcgagagcaagttcaaaatccccggagtgactgagcatcttgttgccgtggacgaattcgacagctacggcctcaacgtggagtgcatgctttctggtcagtccatagaagtcgatgtgcgtttcgatgagaagatgttatcgtcgtcacaggtaattcgtctgatgagccagtttgaagctgttgtgcatcagcttcatctccatggcgagggaagcctgaagatcaaggacattgacctcctcagccctgaagatgtcaaccagcttcggcaatggaacgcccttccccttgcacagcctctcgatgtctgtctacacgacctcatcgctgaggtcgctcgatcccggcctggggcagcagcaatcgaagcgtgggatggaacattgacgcatgcacagctgcaatcctacgcttcgacgctcgccggctaccttattgagcttggcgtcggtcccgagatctcggtccccgtttgcatggacaaatccgtctgggccgtggtttgtttcctggctgtcctacaagctggtggtgtggttgttcccctcgggactggccatcccatacctcacattgccagcatcatcgaggataccggcgcgaagcttgttcttgttgatgcacagcaattcgagcgtctgttggagctcaccccttcacggggtttgactctagtgcccatcgatacgcaactgctcaacagcctaccgactgctgcgccacaaacatccgtcacgccggccaacgcagcctggatagtcttcaccagcggcagtaccggcaaagccaaaggcgtcgtcctcactcactccaatttatcaacggcaatcaagacccatggcgcccgctttggtcttgggacccatacacgcacgattcagttcgcggcacacaccttcgacgccgtgctgcaggattatttcaccacgcttgccagtggaggcaccgtctgtgtcccgtcagaggctgacaggatgaacgatcttgccggcgtcatgaggggcatgaatgtcaacttcgcaaatctgacttcaactgtggctcggctcctcacgcctgaccaagttcccagcctgaaggttttaatcttagctggcgagcagatccaggattctgttgtggaaacttggtacaagcatgctgaagtactgaacgtctacggaccaacagagtgctccatcaactcaacctgcaatggccccatctctgacctatcgaatgctcagagcatcgggtttggtatggggtctcgtacctggatcgctgaccctacagaccccaaccgcctgtgtcctgttggcacgcctggagagctcctaatcgagggtcctggtctggctaggggatatctaggcgatccagccaaaacggaggctgccattatccagaacccttcctttgcctcccgcttcgctctctcggactgccgcgtctatcgaactggtgatttggcaaagcaaaccgaagacggccagatcctatacctcggtcgcattgacacgcagatcaagatccgcgggcagcgggtcgagctgggcgagatcgaacattggattggacgccatctaccccatgtcaagcacacggctgttgtggcaatatcgcgtggagagaagcagatgcgtcttgcagccgttattgagcgcgagaacggacataaaccagacccggtgatctttacgcagctcaagaagaccctgtcctcattgctaccgtcgtacatggtccccagtctgtatatcccggtcactgaaattcccctgactgtctctggcaaactcgacagacgcgccatcaaacaaacagttgaaagcatgcccactgaagaactggagcagtacttcgcgggtgagtctagcggaacccgcgttcccccgtcaaccgagatggagaaagccctgcaacgaatctgggccaattccttgggcatagaggttgacgccatcggcgccgacgacaacttcttccagctcggtggtgattcagtggttgcgatgcacatctctgcctccagtcgtcaagaccagtcggtcaagggactggcagtaggtgatatattcatgcatccgcggttggccgacttggcggtcttgctggagaagagaccgcgggaaggtgagggtggctgggacgaggaaatgagagacgatgagagtccatttgcattgctgcaggaggtgttggacttggatttgaaagacatataggctatgttatacatctctgacacgcggttttattcttgctttttgcagctttctaggcggatatggtagagacttcgatcacttgcatttacatgaatcaatctgaaaggagaaaagcacacaatcaagcccgccgtctcttcaccaacaccctaacgccgcttgggggaaatactgcctctgccacccaccggttcgccggtctcttcccctggtactcctcgggaaaccggatatcgtagttctttagcacgtatgcgataatcatcttcaactcaaagtccaccagaaaccggccggggcaggcatgcttgccatgactga

SEQ ID NO: 1992 - DNA, 2182 bp, Emericella nidulans
ttccgatttcaggactagagacgtcatcgtcgtcctcgctctctatgcccttactcgttttatccatatcatgtcggatgacagtcccatcaccatcttcgttcggttcgtgataatcttcgtagtcatcttggtaggcgtcctcatactcgtccatatccctgtccgtctttccagcttcactctccggcttaagcagagaaagctctttcccagtaccggcatgctgaggaaccgagggagcccagtccgagtcttcctcatcataagcactgccatttccccagagtgcaagagcagtgcgtcttttctttctaggcggtatcgctatagcaggccttgacgacgtcaatcttttcaagaatggcttcccaaaaggaaccccgtcaataagatgccttccgtcagccgatatctggtgccggccggatatctgccttgccttgaggtcgaagatctgtagggcacgtattaggacttcatcgccatccctaaggattccttctatttccatgaaatgcaaacattccgagcccccaacttcaaccacgtagtcttccaagccccactgtccgcttgtttcatcttcaaacagccgcggctctgtctccagcggaatgacctcgttaacgtcctccagcaactgtgcgattgtgtatcccccgttgccgtataacgcattgggcatacgcgacgacgtcacagcggaagaggaggcaggtgatatggacgaggggttgggatgattgtgtccgaagagcgatggcggtgaagtagtccagagaatgcgcgttacaggcaaaccgtgccgctgaatggtaaggtggagccgcatgcttggaatgtcaaagtttcctggttcccaaaccaggaaagaagataccggttaagaaggcagctgcagtcaaaggcgcaacactacccacggtatggcgcgtgcagattgagattttactatcagtgtcaatcgcggcaaagttgcaggatagtcaaactgaagagcaccaagaacgacaaaatgaattgaaggaaatcgctaaggacttgaggttgtaatcatggtggtggaaatgtggttgagcccaagatttaagtaggagctggagagcgcagctctcacttgttgctcatctcctcaccgctcgcgctgttttgatcggcgcgcctgacaagggcatccccactacgcaactatactttttctagacttctttgtcttctgttggggatattatcaccatttcttctttgttgctgaggtaactcataaggaaacatggtttatacagaatagtgtcacggccagcgaatttggtggacagatattattcttcctacgaagcaacctatgtatctcgaccggatgggaaattgacatacaataagcaaaatacgaatgaagaaaactgcacactccaccgtcttccagctcaatgatagagccagtgaagggcagatgttattgatattccactgcaaccatgttcacgataccggcaggcaacatgccagcagcaccctgaatgttgcgaaagcgccaacaggaggtattctgggtaaccaactaaaattaggacggaatggaacggtattagcgtgtgtggtgtccaggtaatggtaagagttataactcatatggaaggcatgcgacgtacatactccgtaaagatagtattatatgttatctctgaggggctaaaaataaaactgataggttttgcgaaacgcgtgggataattgataatgctagaaatcccagactcctgtcatatgcatttgaacgaattcgaatccctcaaagaatgataatgcccctgcggagcggaacaggtagttttcaaagggcagtacagcggctcagggtttcgcctgcgtattagcttgcgtgttagctcggctcggacttggtactggtttcctgctgggtactccaaggttcattcgtcgcgattgtctttgtgaatcctgtccttgggccggttgcgggttttcagctaccagccggtactgaggagggctgtcttccaccggaagtggcgccttgtggatcttgagtacactctgctgccgggcaacggggggccccagaggtgaccctgaccgagactctggaggtgatgaagggagcatatcgaatgattcggaagacgagttcgctcctgggttgccatagattccgcgg

SEQ ID NO: 1993 - DNA, 1133 bp, Emericella nidulans
gatgtcttgcgaagaaatgtcctcggaactcctctgccaaaatcatgctgaacaatcccattactgaccactatatccccaagaataatctccgtctgccctttcgtatatggaacccctcacaaatgcccaccaccagggcgagttgatgttcgggtaggttgatcgtatagaagaggcagctcggcttgtggcgctctagttggagcagcttctggagggctgccgccgggagaatggcctggaaagatcatccagcggcccttacaatgtgaatcaagcaccgctcacagattcaccatgtcaaagccacatgggctaagcatgctctcgatccagatatgttcattgaatgatcgggtttgcgtaaacttttgtatgcacgtcggagacttatgccgcattctgggcacctcatctgccaaacccctttccggctgtgcccctttaagaccttatcatggcaggaaatccgctctgtttcctttctcagtcagccaaatgtgcgatacagacgcaatgcagaaacctacgtcttctgtcgcaggggccgtgcaagatcctgccacggacgacaccagaaaccttccctccaagatccaggaaactacgagatgcattaatggatggatcaacctactcatactctgcggattcagtagaagagtgtctttgacggaattatttacccgcttgagctttacatagacgtcttattccaacaatcctcgcgcaacatctggatttcttcgcgcaaacggggatatactccggattcgcacagagttccagtagcacctctgtcactagtcggccactagtcaaaccctgaagataacgacactagtaaaatcagtggaacctgtagatagcttattttggcgtgggatggatttcagagttatcgatggggatgcccaagctgtgactcgtctctagggaaaagcactctgactggggattgtctagacacgcctacacctgacccttggagatatatgtgtgaaagccagtatcctagtaagagcgtagtcttgtaagcacaattagccatttctggctgagtgaagttcaatacttagccaatttagaccatttgacgtatactataagtcatgtggccaatctaatga

SEQ ID NO: 1994 - DNA, 6256 bp, Emericella nidulans
gtcgagacagacccaagaactgattccgggttctacgcgggcaccaaggaggaaacgttggacgggaatacaacgctcctctgctctgccgcaagccagctggcgtctgcagtatgcacggctgccagtctcgcaagaataaacgagacttccggggactgggtgtacccagtggcaccaatgaaggcactggcaacgctgccctcgagtacagcagcattcttcacgtaatcttctccgctagttgcattcgggatcgagtagtcacatcttgggttcgagaagccggggatttgagagccgacttgctgtaaagcgcggacgcccaaacggttctgtctctggatgccgaggaggttctggtagtactccactctcgagccattggtggcatccctcaggaaggtctggttgatcggctgggatgtatagtatctctcgagcagtccttgcaatgcgtacgcgtattcaatgacttcggcgtcagaggacttgggagaacagcttgtgttttgggcgatcgcagccccggcaagcaggagaccgccgaatagagaagagaaacgcatgctggcttgagaagatagtttacacgtatatggatattgagtaaagtagaaaccaattgagtccaggaatttgatagtgttatgtgagagtagatactcatataagtacacgaatactaatggccgtcagaacgacgtgagactaactgtatgatgcaatatgaactgtatgttctcgtcttagactcgtggaaacgcgcggatgcttaacccgacctttgcatcacgatatcgccgagagaagagctcataggtggacagagcagccctcgtagtgctgcccatgggttaccggatatgcggatctctcacccgccattgatgacgagcagcgcgaactgaagaccgggtcaaactctgatatcatgacattgggaattgtggtaaggctgaatgcggtcaaatatgttgtcactgtcaagtgtgggtgtaagagggccctgcagcttcggtccgtcctctatcttctggtgcgaatccccccttcagcgagtcctagatgcgacagtagatctagattaaaatccaagattgactcatttttcccccttcaaccagttggcggatgagtgcggaaagcataaccacagtaccgcactggactatgtttgggtcaacaataggcacgtgactaggaatttacccctacttgatgccaactcggcaacatactactttgtattgatgtgggttttcatccagtgtcattgcaaaacgatctatgccatgtaccatcaagtggccaaagatagcactcactacccgagtgtcggttacgcaatcaatcaagttaagtcaagccaaaccaacgcagaatcttcagaaaacgagcaacacagatgcactccggagtgctttacatggcctgggcgaggatacctccagccttgaaaggagtggagtcgacatgagagccgctcttgtagccacccttggcaatgatatcagagtagttggtggagccaccaccgttccaagcaaggagctaaatcacaagttagttaagaccagtaaaaattccaacgcgcaacttacgttgggggtgtccgcaggaatgtcagtaaggacaccttcagtggcaatggatatgatatccttcttgagcttctcaggagtgaaatcgactgcgaaagcagagtccttggacggttgaagggaaacaaagtacgccaagagaccggcaatgtgaggcgaagccatggaggttcccgagatggtgttgaccgccgacttgctgccaatccaagttgacagaatgttgaggccaggagcaaagatatctgtgcacttgccataattggagaagtaagcgcgctcgtcagcaagggtcgaagctcctacagtcactgccttctcagcggctgcgggagagtagctgcacgcatcggcgttgtcgttaccagcagcgacagcaaagtgaacaccggcttcaacgccagcattgacagcatcctcaagggtcttcgacttgccaccgccaaggctcatgttagcaacgctgcccttgaagccgttgccacccttcttggctttcttgagatgagactcgacagcccactcgacaccctggacaacgtcggccatggtgccagagccactggacctgagaaccttaacagcatagatgttggccttcttagaaacaccgtacttctttccggcaatggtgcccgagcagtgagtgccgtgaccgttaccatcttcatccgcgtagatgttagggatagtcttgccccagaaagcacggccctcaaagtcctcatgttcgatattgataccagtatcaatagtgtaaacatcaactccctcacctccctcggaagcgtagaggtacttgttgaatgtaccgaaagtgagtctgtcccgatgcgagatacgagccaaaccccaaggggcgttcttctcaacgtccgtgtcctccaatgtatggacttcggagtttcgctcaatgtactcgatctatgaaaagatgaccgtcagtttgggcagagcgtattccggcggtgtacttacgtcaggatgtttgcggatttcctcgatcgtatcctcgtggaaatgtcccgagtaccccatgagggatcctgcgatattgaaggtggcctttagaccgtcatagatctcttcgccgaatccgaattccaagccgaggaaacgcttcttcaggtctgcccttccaccactcttctgcccgtggatgtcctgcacccaactgtgatgaacagaggcggcaacagggtctacgtgtttcttgaagacaacaatataagagtccgggacctccttagcgtttgtagatgaaaggatgggagcggctccgttgtgaatcgagtcgacaacaacaggcgaggctgcaacaagcagcggaacgaatgaaaggccgaagatgcctttcatgatggcggctataaaaatgtaaacgaacttgacagaccaacgaaatgaaagaaaccaggacttcacaaagatgaagagtacgatgatttagataagagatgatgaagatgaagatgaagagagagggatggggagatgaggagtgaggaggaggttggatggggagagccgagcttatcagtcagctgcaccaaggaagggtgatgtaagatgcaatccgggatcattagatactcgttaccttacgcgctgttacagatcaggtgactcacctcacgcctctgtcctggtgtaatagtgtaaattacctatcaattacagatggcggcagtacgcggcctggtcacgctatgataaggacccatgctgagcaaccagccagtggtggaggctgcggagatcaagcagatcaacagtcagaagggtgcagttgtgatagctagtatgctacaaagtactactgagtacacgtttgtggcgtagagatgcctttactactattattggcaatacaatgaaaatcgcccttgccgtaaattacaatcggacggaggacgcccgtccagcggtgactcaggtcctcagcagaccccagacccaagttccaggcaccaggcgcttgaggaactcgtgaggggtcaccctaaccaagaacaacagcagggtggaacaatggcgaatttgtcagttggctaacttcctgtttcaaccccagcctgggccgagctacaagctgctgatcgctgatcccgcctcattcctgactccggaatcctgccaacagattatgggtactataggtggcatccatgactctgcacaagctgttttaagcgctaggtaacccaagccgtgacgtacacaaatttgacaacctgacctttgtaaataactcggttcaatctttaccgccctcctggctaagacgatttgctctacggatgaggcagcagcttcaataagccgctgaattagcatgctggagggaatacaaatctaaacagttgccaagggttgcaatatatataaggttgttcggtgactcctcagctatgctacggatatcgcgctgcaggtttccattctgtttctaacacaatataaagtacttacggccatccattcttttgaaaccatggggccctaaacgggaatgcactactccgaactcggaagtgcctctttcgaagccggacattcacagtcccaccaacaaggaaatcgagcctacagctaatcccgctcaatggagtatcgtatcgctgccgttattagcctacagtactctaagcacgtcctttcgcggtactttgcgacttcgctgaatgctgctgaggtagtaatatattctttataacattgtagcgataagtgcgggaacaaaaccttttgactaggatttggcacatgcttcttgaagatgctcacgagcattttatggtctttgtatgattccaacctagtcatcctagtcaagtatgatactgcagctacaaacgctgaaacagggcgtccccaacagctatccagatgcctagtatgatgctcaggtaatagcaatcgagatatcctcgcgaagataagctcttatcgataacacatcaatgatacctgcaagtggctgaggtgggtcacatgagtgatctctcgaaacggatcgttgcttcatcctcttggtccagcgacactgcctgtttgtcggcggccgagaaatttgcagcttagctactaccgttgatctcttaataaaaggaaactaataaatcataggtcttcgattcgtggcgtccctctccaaagcgcaattgctgatcctactttgaagcaggccttcggtcccacccttccgcctctgccgacgacgcagcttcctcgccctgccaatgagggcagttgtgacaccaagtcgaagtgattgttcatgtctgatggtctctagccgtcaggtaggtagccggggtgttttcgcggcgcaatgaaccaggccgtttccctgtcgccgcactcctcgcttacccaaagcccttttgtcgagttcgcgccggttatcgatgagctgaaatctatttgcgatgattatatcgacataagccttacaggtacggttaccgagtgtctgctccggctgcgccacacgttgatcgataatccgcgtcctacggaggcgaaggagttattccggcaactcagcggcttccagacgctactgagtcttatcagaaagctttcggagatttataccccaagtgtgcacactaaggaagagaggcggagcttgctggcggtctacaaagactgcttgacaattcttgctgaatgcctcagagatcatctaggaaataaaaggcattttgctaatcgaatccctggcggagggcaactagttctcgaagaggcgttctccacactgatactaaagctagatgctgcacaaggcgatgtggaatatttctgcggtagtgttctcgcagcgtcactgtgtcaagagaccgtagtggatgttttcacagcactctcaacaaagctccagaaaacagaccagtcagacatagctcccgatgctgaagagaaggaagtctgtcgctctataggagcgtcagagattattgaagcaccggagcttgcgcgcgcattactacgagaatggctgacagcattcggtctgatagaagccccgccagacggttctgcggctagctgtaccatggtgcataaaccgactggccacacagtctcaacggcatggcatgatatttgcattatacaggcgcattaagcctgacattttcgcttttactcggtgagaacctactgagcacggagaagcagttttatcaaaaacttgctcaacagatatgcaccccaagaaccaagaatatggaccacgcggggtaagtttaaaaacggataaccaatgtctcaaggcggttacagttctactgcaggttcctaaccgctccagggggcttcctcgtaacgatacattatccctgcagggatttccaaccggaagtgaacaaaagtatgtctggcctctgctataccaaaggtttcaaaggggcgtgcttgtatatcattaacacagcacctttcagccttacgccatccttctgtcaacccttaaaagggatatggcacacactggctcctttggactaatatggttctcaacgctttaagccgggtagccaaagggccattctcttccaaatactaccgtataatttcttttcttaaaatatgtggcaaaaaactccgtcatccttacaccccggagaatctctctgggacac

SEQ ID NO: 1995 - DNA, 2497 bp, Emericella nidulans
ccgataatacgactactataggctcgctctttctccatcttcacagccatctcatccagttcccgctcaatgtcaatatgaatcctcagttccttctcaacaagaacgttatatacgtggcgcagttcgtggaagctcatccctttgccgctttcaccttctctggtggcagtgtcttcgcgcagctggctgaacgcgagcatgaggatatctttggaccaggggcacgcgcgcatggcgcggtagaagacactctttgcgcggattagctcactgcgagagagttcgaaaaggatatagagtttccagaggcttatgctaccgcggcctgtggatgtacgggatgaaggtgatgaattctggtctccgacagccttctcgaacgcagcgcgaacagagtgcagtgtcgaaccagcgtatgttgggcggtttaattctgtgtagatgaaaaaaaaatgtatggttatgggaatgcgttaatattgttaatggattgggatgatgttgtggtggttgtggtagtgatgtctcgcataatctcgcggacacgctcctcaatcggaagcgagattcgttccaagcaaagagagagagcgttattgtgttttgagggaaagacgcgatgctttcgtttaatattgagcggatcgcggatggtttgtagagggtgcttgtgcggaggtggtagtagagtagttttgcgcgagcttggtgcaggagttcggttgcatatgatatgaaggtctgcgtggggcctgagtctggattcgggagagcggaaagtctgttgatcgtggcgctgtatgcatcaagggccttgttgacgtcttgtgcgtcaatgaggtacgttaagatagcctgactgtcggtacaggctttgataatgctcggttttcggtctgcaatagcgctttcttggatctccgatagatactgcgcaggttagcaattgaatgaaatgaaaggcgacgatcacgcacgttacgtagcttcagctgattagcagggctaaacgatgattgctgagacgcatcgggaaatgttttaagatcgatgttgctctgcggcatggaaaccaagagatgggcggcgtgggctatatttcgagcctccaaaagttcccatatccaggtatgccacagaataacgctgtcaactcgttgttggcttggaaacgatttactcatagagatagccgtggcccaaacatgatcagcagctgcgtggttgccatctcgacgctccataattgcatatgcgttatacagtcggaggctttgaggcctctttttgagtagtgactttgcataccttttggcttctttggaattgcaggcgaattcgactgcgacagtgtactcagccaatagctcatccgacgagtatgcatcaaccaacagcctcagagttcttcgagtccagtcacgaacaacactgcatgctgggtcagaggtagccttgagccaagcattgaaagaagagaaccaattctccggatctgcaaaataggtgtcataatcgtggataaaatattgatgaggaaagattgttggcgagatgccggattctcccttagttgtcgttggaagccagtcatcgaggttcgcgatcgaggcagctgataactcgtttcgcagaaagctgtcacccatccaacaaccggttgtcctatagttgttgacggttattataggcggaagatgagagaaatatataaaaccctcaatgagctcagatatcgaatcaggtaacgatgcgagagagagaatttctaagaggtcactggcaaggaccacgcggtatggatcatcttctggctcatccaagcttcgggccgggagttgagcaatgagcatacgttctctttcacaggctgtccatgatgcaaacatggactttgagttgagatggtgctgcggctggaaagttttaggctcaaataaggccacattgctatttttccaacccttggccccaggctcaccaatccgagctacttctgagtcccagaaatccgtgaatgcagacagcacttcgtctgtaaccatgtggacatcgacgccttgcggtcggaaaaaagccagctccagaattccttgccagaggccagttgcttgctccgtgtatcccgcttcacgtaagaaaagcgttagtcggagaaatagatatatttgcacacaggctttctccggcccatccggggacatcttattcagacgtaggcattcgatgaacgttgcaaggcactgaccatgggtgaaattaagaaactctgtctggcggaaatcgagatatttcacccagaggttgatatactgcgagttggctttcagagtggactgccactgctccaataccttttttgtgtcccacagcttcgttccttcctccagaagtccgataagaaggcgatctcgaccaggaccctgaccaatcttcttcaacgccttttcgtacaaagagaccttgatatcagccaaacctttatgctcggcag

SEQ ID NO: 1996 - DNA, 3596 bp, Emericella nidulans
  unsure (1)..(3596): unsure at all n locations
gggaacggagggaggcttgggctctgtggacagacgctccatgagctgcctcaacttttctcgctcgcgctcttcgtggtcggacgttccggctgccttttcacgttcgatctgccccaaaagttgggcaccctcagatctgcgattgttgatgaaagtgtcgacgttcttcttgaggctgtcaacagtttcagtcatctcagcgtagaaagtttgagcctgcttgattccagagccaaggttgttgaaggagtcgtatatcttcttatatctggccatgacggagttgcgttgtcgggttatcgactcatatttggattgttcagctctcactcgcttatcctgtaatagatctccataagttttcgtgagctccttcatcaacgctgtttgcttatgattggcctgaactattcgcatttgatgagggtggaatttctccaactccgcttcgaagagttgactctcctggcccgtaatcgacttcttgttaagtatcaagacgttcgatatatcatcgttgcgcacctagaacgcccgttaggagctttgaaacaatatctatatgcactggtggcattcaccttttcctttaagtccttcaagacctgggttcgctcccgtttaaccaggtttagtttcttcaaaatggattccaccctggcaatctgctctgccacagagggaacgccatcatcatagacatcgtctagtagacttccctccgtagccgaataagggctcgtcacaccatttttagttttgccttgctttgagcctgccttgatcattgctcgctggaaaagcacatccgcctcgtctgtttctcctgccgatcgcatctcatcaaagtcagattcgtattgccgaagagttgcagagagctgagcgtcactagcactggcttcatgcaccgtgtctcggtatgtccgaatatcattgcggagagtcatgttcaatcgactactgggctgctggctccaatcagccccatattttgagcgcattttctcgcaaacgctttcttccaagtctaactgcttggcgcattggtcaagggtagctagcacttctgacttgcgatcttgaagggtatcgaaagccttcgcaaaagaatcatgtcctgctagttcctgacaccaacgttggaattcttcgtcgaccatcacttcctgatccattccacctttcaaaatgttcaaactaccgggaagcttgaaatagtctaagcttgctgccatctagccatcggcggtttcaaccttctctgtatctgcccggatcagtttcgccttttcctcatcataaagacttgctgtctccgtaaccgacatgggaacgagtttctggaagatatctggaccgataatccgttgaatatcttggccctgatacaactcgctaactggaattgccttggctgcagggagcttagataccgcagacagtcctgcctcgctcggaacaggctgatgataaataaaatcgttatccttgacgaaggtagcaagctgtgactgcacgtttgcgagatggaacttcacgatatctactagactgggcccagcctccgatgtaaggtttgtgttcggtgatattgacgaagggagcgacttagcccaactcaacgcactcgttgaatgcttctctgctagctggagcctagcaacagctactccgtgcgaacctgattcgccgtcggctagagcctgataatacgaggccacggagcccatatgcgccgacttcacttgcagaagcgtaacccatgatttgtcgaatatgcctttagcatgttcctgtgtcccttcaatggcctgtgcgtatagatatgaagcctggctggcgagtttcgccaggaacccggcctttttgtggtccatgatctgcttctcgaggaaaacttcctgaccttgagcaagcgtgatgttgatgagagtctttacagtttcgcggttgagatcagtcgagggggcgtggaggaagttttcgttgatgtaggtgaacatgccggcggatgcctggaagttgtggtaggcagtcttcaagccaatatcatctgcgcggttctggttcgctgcatgacaagaaaggaccgcagatatattgaagataatcgaggccttttcgaacgcgagagaatactgcgaggtcggcttgtgggtgaatgcatcatacctataggcagcattacatggttagcggaggtgaggtaatgataattcgtaggtccattaccaggtaaatgatatttttatatgattctcatccacagggaacctgagatccagaagctctagttgcccatagtagcggtagagtaggtctcgtcctgtcgcgctgtccttgccggcacccctcatatcctgacgcaaccggttgagtgtagcacactcctgactgtagcgctcagggtcttcgccataactttgccgaatataatccttgagaggttggatccagtcgatttcgttggtctgtttgaggggacatgatatcataggcgactgaaccatcttgccgtcgtggagcggggagctcccatctacctaaaaggagagcggggagatgttgtttggaacgaagagtaatatggattatacgttgtgggagatgaaactggaaatgaaatcaaagattgagaagggaaagaaagcaggactgaaaaggagagcgatgactgtggggttgagaggagaatgtgactgatgatatctagcgacggaaattgcagtggttggagttgggctgattcgatcgcgccgatgcgatggatggattaacagccaacgcggggaccaatgatccagcgcctaagcaccctgcacattcttgaatattgatgactgatctattattaacttctaatttaaacaccggcctggagagtatgtatacccggagaagtagagatgttgtggctcccaataatgtacatgcagagatagcctctatggcgcgcaatccctgtaatcaaataatggatgatacaattaaagaatcccaacatgcagaatatgcaaaatcacctaaatcagaaaccagatccctccataatctcgccggcgctatgatatacacaaagaatagaaggtaaattcgttcgaacgacgtcaaccgaccgctccgctcaaggcgaaccgcacttcttgttttattcgctcttcttactgtcgccggaggaattggaatccttattgctggaactatcacttgaattctccgagccggcaggtttcttgtggttcataagcttgtgccatgcggatttgaggaatccttcgctcttggattcatttccggacatcgctatcagcaagaagagcagtactaaggctgttagttattattcatcaataataggattcaacggaagtgcaatacatacccgtcccttggaatgtccatgattcgtctggcagtcttgtcccccatttcatcggcgagaacctcaaaaatagtacgctggttactcgtcagatacttgggcatcgcaaccttgaactcgaccttcaggtcgccaaagaaaatgaagccacgggatcggccgccaaatttcatcatgcccagtcccggaagtgaatccagcnccggtt

SEQ ID NO: 1997 - DNA, 1924 bp, Emericella nidulans
ctttaatcagagatcagatacagtccaaccaacttcgcggaggacgtatctagtttttctttccctgccttatctgttggcgctgcattggcgccatcaccattctgctcttttcgagcgagccctttctccagctcacgatcagggttcgccccagtgtagacaaaaggctcaataatgtttgacacaatcatttcaaccacctcgtcggccccggcacctgcgtgtttaatggcgaatgcggtgactcgtgccacatcacctttgcgtagctttgcatgagtggtaggaagtcgtgccaggaggtgagccaacttcgccttcttcaaaggattcatatggcctaagccttcatttcctgttccaatgccgtcggtgggaggcggcccaccatgttgccgtcggtcgtcctctccatcggatatgtcctcatccgacgagtcgtagtcttcgtcagacacgagttcatctagtcgagtagtatactcgaatgtaagcttgtcctgaggaatccacattgcgccgccttcaaagatcgggaaaggattttgtgagtgtcctcgttggtctttggagcggctatttgtgataatatcccataatttccatcgatagtatactccgccggggcttcttgcatcccatagccacgcccatttctcctccttctggacttctggtcggctcatgagaagggcctcgaactcggggccgtagtttagcaaattctccaaggttttgtggataagtctaagctgcttcaaatcagagggtgctttcacttccacttgcagagtagagctgctgccaccataagatggcccataggagctcggaggagcgaagccaccccgatgcagaccaggcggtggtgcacggttaagtcgaccccccagctccggggctaccggctttgctccaaatggaagggagcctgtggaggagggcccgatggcaactgtcgaaccaatcgcagcggatgatagatgccttgaaatagacaaatagtagccccacccgagataccggttctgcaatgcactgacactgctatcaatatcagatgcagcggattcacttgcaagggtcacaatggctgagaccgacttgcgttcggtggcggtctggcccgagggccgtaggaatttgacattgtcgacggtcaacaccgtaggtattagagccttgaccacagattgagaggtcccagggggaagagacgcaagatacaatgtcggcttagccgcagccctctcagcctccttcgcgtccgcactaccctcatcctcatcgtccgatgcgcgaaaagcggacttagccgcaccggctgcattatcaaatcccagcgtcccctgcgcagattcccaattcctatgtaatggttgaaagccttcgtggttgcgttttcgagagagtgatgttggaggcggtcccagcgtcccaggaccactcatgcgcggaccggagctcgtgaaatgtcgttttgcaggccctccaaagccagtgttcctgttcgcaaatctattctgctttccctcaaatgtcgagcgctcaggggccggggaatcatcttcgaaagatttgacaaagtcctcgtacaccgcagctgtctcggcgcgttcgcgggcacgtttggcttcggcttcggctttctggcgttcaaagagcgacttcttggccggggcagacagcttcgacgagacgtctgggaaagccttgtgtttggagttgtctgccatgttgacgaagctgcaggagcagcagaccaatcgtcaaggatgtcgcaaaatcgaactcggatgtcaaatgtcaagtctcaacttgtatgcggcgacagttcgtgaatggaaagctgtttggggcctactcggggcggaggcggaagggctgctgctgccttggggctcaggccaaaatttggtgc

SEQ ID NO: 1998 - DNA, 3239 bp, Emericella nidulans
cgacagccaatcttctgatccatcaatgaccacagcgtggagcacgtggtcttcgatgtcgacggcgcatgtgtttctaccgacgcctgtcgcaacgccatcagaccgagtcctaggtgaccgcctgcgcgccaacaacatcacgcctcaattctttggctatagttggatgacggccgctgagctggagttcacatttctgtccatatcagagcgacatcggccctacaagcacatcctcgaggcggtcttctatcgaactcttcatatggcaggggtcaaagacccccgagcgctagctaccgagaccgagcgcgacgagtgtatccaggggtactggagtctgcagctccgacctgggatcagcgagtgctttgcgaaattaagggagtcggggttcgccatctggtgtctcacgacaggcgacatcgcacgagtgaaggggtattttgagcgaggaggcgtggacttgccagcagagaatatcatcagctgcgacagcaagggggtagccaagccagcactggatgcataccgaccagtgttcgagcagtttgcgcctcgcgacgagaagtggttcgctgcagcgcatatgtgggatgtctcggcagcagtcaaagttggatttcgaggggcttattgtacagtctacgagcaggatccgtgtctggtgatctttgatactaagatggatgttattgcagatagtctggtggatatggcggaagaaattgtcaaggcctctgcgtcatgatatttgtatactgtctgctagatccgaaatattcaatgatcatcttgaccccgaaaaggaagagccagttctttctaaaccgtcaaggctgtcgtcgacaccaaagtcagtgtcaaacctgtatccgggcattgcgagaaactcctgcaagaatcgaagctcaggttgaatgggcaggctgccgttgtcaaagggcagtgcgtcaaaggagcacggggagtgtaggttgggcatatcctcggtatgcttcattgaagaggagactccggtttcgagcgactggggtatgtgctcatccaagtgattttggctcgcaaataatgtcaagccgggggtccattggctgtgcattttctctgggtttgtgctgccagtagacttccacatggtttcccactgtttgaaaccctcatagtcggcaccagatttgtttcttggcgtatctccatgcccggttccatctgcctcattcgcgcaatgcagacgtgtcaacgcgcgctcaagcgactccaggagtgccacttccgatctcgccgagtccccagcagcagccatctcgcggatcatctccaggccctggtgcagttcaccctgaaactggctcgattggccttgaattgagcgggcaatgagtgccaataaagatgcccggcaggaactgtactcagcatacgaagcgcgagcgaggccaggcccattattttgcaggatactgcacagcctcagggcttccttagcagcttggatgcaggaatcaactagctgctgacggtgctttgtatggttgttaatgacactagtggccactgcgcgggtgtcactgttttgtgtttctggtgaagcgggcgacgagcgagaagcagcccggttcagaaggagtggccgtccaataaacatagagacaaggcagtattcgagccggagatgtatacatgaccgataatgaggatgagtctgctggtagggtacgtccttctgcgcctggacctcatccggcagcgtattccaccaagcttccagattattcttctcgttcacaagcctcaacaatatggatgagcgctcgtgttttggacaggtgcgtagtaaaaacctgtagcattgttcagtcgcaagcgagaggacggataacgagcagacgtacatctcccggcaaagctcctctagcctctgtgtgagctggatggacgcgaccatataaggtataatctcgcactgcagatcgtctctatgcgtgggtaaaggagcgtcgacgtcgaatcggtgtgtcgacaatggccgaccatgaaagatggagattttcctgtctttcatcagcactcacggtattcaaatctgcagcgttatgccttgccctcgtacctttcaagtgtgtatgctgtccaccatacgcggttcctcatctcgaccatggcggcgctcagcccggtgccagtgtaccttctgtgcaacccgttctgcatccctagtcggtttgtgagagtaatgtaaatatatccaagaccagaggcgtcaagggggagcgcatatatagcgaaaagtaagcatgcctggacgctttcgagggaggatgcttcaattatttcgggtaagagccgaattgcttgctgatagaacatcgttcctagtgcatcttcagtgaattccgctgactttcgagtgggcgagtcgaggtatgcgtattgggtggcaatggcgaagacagtgaggactatactcacgaccgcagcgctcttatttccaaaccgcccgcggtcgttgtatagagcatccactttatctgtaagccactccttgtctaggacgtagtagtacgtctctgcatgcttgaagaacacattaatcaagaaatcagcaatgtgacgcggcgggcagcaggatacggctgctgcaatactgtttgcgcccgagtgcagctgttcagcacgccaataattggaaacttggagaggatcctgagtttgctgcgctgccattagcttctgatactgggcgtatgtgaagcatgaaatgtataccatgcggtcctcaatgtgccgcttgacacgcatcgagaaattccaatacgagaactcgccagagtagtctaccacagtcattactggcctccattctcaagagtagattgacttacgcgtcgtcgtatcctcgaccggattgatagtgcagacttcgtcctcaattgaatcttcttctggcgctgctgagctgttattctgttcatgctcatctagtgccctagccattcggcgtaggctgtcaaggtcgaggtcgatgccttcaaacttgtgcttcaggattctctccatgtacattactcgctctaacaactcatggatattgacctccggcgccggtgtcctagtcatacagaattagcgttcccctttgcaacgacaagtgtccaaccatactgcaccgggaccggggaatgatcatgatcgacggatgataggcgcttgaactcgcaagtgcgacggagatg

SEQ ID NO: 1999 - DNA, 1288 bp, Emericella nidulans
aaggcgatgatcgagcttgcactgcacggaagcgtagatagcgagcggatctacgggaatagccgcatcgttgagctggggaggaaataggctgaactggactggccagctgaagcagagaaatatggagttggcttggagaaagatgcaggacatttgtacgccacaactcggacccaaccggtcaatttctccccactctcgaagtacgaataaacaattctgaagcttgagccttgcctttgctggagacccaagtcaatcgctcactttgcctcattgctgcgaggtaataaaagcagtaacccgttaattcgcaacagcgcagattaccgcagtaaaaaaaatccagtgtctatatcttcagtctcatgttggcggccacggttgaatactatggatatttggggaaatagttgctacacctgtgcatcgcatatctcggcggctagggagccagtcgaaacgtgttggacgtataccactttgatcttcaactattacagacgtcacagagtagagatagtctagattaaaactttacagcagaaacgagagtatctggcatttgcagttctggagtctaggtacaagcaccaaagcgggcataagcgaagcaagggaaggcactacatacgaaataaccatctacagctgtgataagatcatttctgctgctttcaaagacaactctcagtcaggctatgattatgatattcgttaggcgagaggatcgagtggacctcggtggccggttaaattgttgcacacaagttagcctgatcaaatcgacagacagcgaatccgaagaggctgcttgattctcaggttgacacgaactgtctcacaagcctgacgtaagccctgtaatataatagacctaacctgagacctgcacattgcctagacggaggttactcgaaggattcaataaaccctgggacagtcccgccttaggtagcaacagtgtttttctgaatcacccgcgattgggatcgctatatacgatgtaattactcctgactctgcaacggcgagcatacgcaggtgtatgaataacgcagcgagtcagttgaacgtttttcaacgtctggtaggacggctcggccgtcaccgtcggatctgggaatacacacttttcgcccatacatgtaaatactgtgtcatgccggctagtcataggctatcaaactacatgtcttatctagcaacagaatcagcgcacgcgccctcctatcagagtaccaagaacatgctcacgagcaaaggccggcaacaaacaattggg

SEQ ID NO: 2000 - DNA, 1196 bp, Emericella nidulans
caggagccggcgctggttccacgtcttaacagatgggatgactctgtacatacatacatggactctccaacaaactccacaacttcggaaaaaagccgcgacggaccgcggaagtacgcgtacaaccacgaaggcgcccgtgagcgggaaacacatctgtagcctcccactccctgcaatatttccggcaaggcctaactataactgcatagatatctaccctactggggcttctcagtctccgagaagtatgcccaggagtctgtcggcaacaaccccaatgcctcgcgtgacaatgtcctcaccgtctttgcccagttggctgcagttcgcatgaatgcccagcgtgcgatgatctccttgtttgacagaaagcagcagtatgtcattgcagaggccacaccgagatgttgtctgcgcggcgagagtggccgcgatcaggctgatggcttatggctgggtgtgggccagtttccgcggcacgatccccatgtgctaccacgcgatgaagtcgtttattgacgatgagagtgatttttttgtcgttaatgatctcaccaaggacgaacggttctgcgaccactcgtgcgtaacgggtcatccgcacaataggttctatgtttccgtgcccatccagtcgccggacgactatatcatcggagctgtggcggttctggacaataagccgcgtgatggtatttctggtgagcaggagcgtttcctctcggagctcgcggctacagtgatggatcatctactttcacaacgcgcaatgcgggaagagtaccgagaagaaaagatggtccgcgctcttggactgttcgtcaaaggcaaatcgcacctaaacgagtggttcgacagcggagagaactcaaactcacgacagcgagaccagatgggccgaatcaacaggaaactggagcaaatgcaggtttctgaatatagcagcggtgagaagggtaatgaacaagggaagaaggcgagtagaccaccgcgagacgaaaaatccaagcacgagtcgcctgtccagaagtttattaacgacgacaatgagcggagagactcggggattgggacccaagacgtacaggcgctgaagaagcggccgaaactgtcgccaaccaccagtcacctgcaggacactctcgctccaacaaatgttcgatcagtggtcaaccgcgcagcatcgatgctgt

SEQ ID NO: 2001 - DNA, 2797 bp, Emericella nidulans
ccccaaaatcctgtacaggcttcccgggcacaagggcactgtcaatgttgctcgattcacgccaaataatgagcctattagtaagcccagctgttctgaaattccgagtttcttatgctaactctaacctccagttgtctctgcatcgtctgaccggaatttgatgttgggcgaattgggcaaatgaaattggagcattttaaggagagcaacttggccttggtttgcctctagaagcccatttctcaaaagacgattgatctatggatattcacgactctgagcggactgaccgctaccgtgggataaatgcgctgtgagccaatcaagtcgtccaatgttgtggcacaggatttaccagagggaatacgaacagttggacgcacctcttcaaatcaaaggggtgggccttacactggacgtcttccgggagactatcctatcgcgaaattaaaaactggcctattccacgagctgggcattgatttgatagcgggtaaggatccgctcatctgaagatgtcttattatcagagctttggactagggatatcctcatgtacactgcatcacatgagcaactttgattttgatagtactttcccatggatgaagcatccagatattcctcgacatacatattccatatgctggactttaaccataatcatctatgatggaggagttgggctaacatatcacctcagaccaaagcccaaatgagtaccctgttttctagcttcgaattcggtataggggagaaggtttgttcataggaaatgtcacccgttcaagaatttatgctacaatttgctctactttcggacatgggagatggaaaggacttggtagtagaggcaccttgaagtcacctagcccctgggccggctttgaattctggtcggctttgaggcaaaattagctatttcaactggcgttttgagtgcctactttaacattttgtgtattcaatgaacgaggaacgtccgaacatcataaaccggccatggattagcaagaaatgcgtctaatacgtacagtcggacgcaccttctctaagagcactatcgaccacctggcattacagtttccatttcatttctatcagcatgtcagtcttccgagatcaatgcgaccagggtcgtgtgcgaggtgactccacacgcatccatggctatccggtctcttccctttattccgataccaccgatgccattgcagactaccctcacactcccaacttctcaaacttttgctccaactggagcctgcagctcgcatcatgagggtagacgcagtgtgataccggggaggaaaccctctgtgcgggcttgtacctcaataatccgagatccaaccattcattggaaactttttaatttagttctctccacggtccttttccttatcaaccttgctatctgtatgtcttgatttgcatgtctgctcttttggtcctactaacatccttagttatcacgttcgtcgttcttcgcgctattcaagggccctggatttacattatcttgaccttcatacttctgacgattggagtagtatggtgtcacgctttgtgccgtctagttgccgcagtttatcagtttccgaattatgctgccgattgcacacttcctatcgagatgacagagactgctagctatgtgcggccaaaccatcctattagtgtcactttagctggggacgaggagcgctccaccggaagtcatagtactggccatgctgtgaaagtgacgacaccaccgccggcgtacggtctatggagagacagtgtggtaagtgacgacactctgtattttgaaaccgcacagctattgatctacatccagagactcgatccttgcctacttcactggcagtgccttgagaaccagccggctgcactgcaacacacggaaaggaggaatgagaatccaaatcgcgagccgcaaggacaccggcccccaagctacatgtccgacaacagcgtcgagggttgaagcccaaccacatcgttcaacgagcatttgcggcggtgttagctggtcgctgacctgggtgcaattcctgtaccgattcagaagccgccacgtcctctacatgacgcttttctttaggagctatgggtcaagaacattggctgaataagtgtgtttgggcgtccacttaaaatctgtcctctcatccccttttccgtacttattaagcctaaacagttagtagcataattaaaaaactgagaaaccgctacgacaagacaatgtagagcaccaacaatcagatgtaatagggccaatgtcaataatgtaagctggggtggtggagagtcgcgataagataggagcggagatctggtctctggatccttgaaagctcacgtgcagtctcgactctagccaacaattgtattggcattgtcagccgcaacctaaggatttttgagcaggacacctgtgaccatcggcgcaaccggctaccttccgaaatagtccctgccacgctcccatgccgtctgcggccggttcgtttctgcggttatgcgcttaggatgttggaggctgcagatgtccgtctgttcggtggggatgacgggcttggtcttgcttctgtcactatgggtgtctacagcgcagggcatgaggtctggccagatcagacacctaaggtaggcttatgcgcctaggccagattatatgaatcgtggaggtaacctttcactggaaattagggccgtataaaagcagatgattaccacgggtatagagctacctcgagcaggccgtccctgagacgaactaggc

SEQ ID NO: 2002 - DNA, 2904 bp, Emericella nidulans
taaaagagatcttgccatcgggcttaggatactcgatcttctcgcattcagatgccagcttagtggctgccgcatctgtgccgtggtgtttgagcgtccacggggtgtggccgcggaaaatgtaagcctcaaggccggaatacaaaatacctccgtagataccgaggggtgtgctgaaagacggtcgcatgtttcggacctcgtacagctccttccaaatcgaagacttacggagtgagtcctcgtagtcgaataggaacacagtgccacccgcgtcatttctcagggcggcgaacgtagactctgctgccaagatcgccgacctcatcgccgtatgcgtgcccttgatcttggggacattgaggaaacctgcgctatcaccaatcaaggcacctccggggaacgcacacttagggattgactggtaaccaccttcgttcaatgctcgagcaccgtaggaaatgcactttccaccctccaagacctcgcgatacagaggatgatgcttgagcttctggaactctccatagggcgacaaccacgggttcggataatcaagaccgactactaaaccaatgctgaccatgttttcaccaaagtgatacatccaagcaccgcccgtagtatcctttggcagcgggtatcccatggaatgtgtaatctcgcccgacttgaacttctccggctgaatttcccacacctccttaataccgattccatatgtttgcggctggctgtcccgtctgagatcgtacctcttggtaacttgcttggtcaagctaccgtgacagccttctccaagaagcgtgacacgagcatggaactccattccccgttcaaacgtatctttggcttgaccatcccgagcaacaccgagatcgttggttgccacaccctttactgaaccgtccgagttgtaaacgatttcactggcagcaaatccggcgtatacttccactcccagctcctcagcccgctcgccgagccactttgtcaactcgttcagactgatgatataattcccatgattgttcatttgtggtggcgcaggaatcgggatcgacgaatttttcgtcaagaaccgcatcttatcctccttggccggggtggcgccttcaaaacgggaagggttatcctccgacagccagtccggaaataactcttccagagctgaaggttcgagcacattgccggataaaacatgagcgccaatctcaccagccttctctaggacgataacgcgaaattcttcgtttccggcttcattggcaagttgttttaatcgaattgcagcgctaagaccagcaggacctaagagggaagccaattgtcagtcacatgtgtgctttgcaagcaaatgtgcaaagcgcaaccacaagacacaggttgcataccaccgccgacaatgcagacgtctacctcgtccgactcccgctcaacctgccggggatcaaagtgaccgttctcatcggtgagattccttgagatcgactgcgaaaatgcgcgaacctggatcggcctggagtgtgctgagcagcggacactcgcccgtctacctgatgttgcgattgagccgcgagaactgatgcataacgatgacgatggtcttgaaagcctagaggggctaggccgagtctcacgcctcaataggcgcagcacgactcctcttgaagccatgaagaatcgcggcgaaggggcgtctggctctcgagggtcgaatggcggaacttgctgagtctacagagcacagtgagacataactcttgctggagcaggtactaggttgtaagtaggcgaatgatcactttgggctaatggggttcaactggcgagagacccgtcgagaaaaaaccatagccgcccgccgacctcggttacctgggtatacgaccaataagagcagcggtaatgacattcgctaacggagtaaccgccaatttccgaccgagcagctggagtcaggcgttgggctcactctctgtacttgccgcacccgccgatagctaggaaactacagacgcttacgatcggctcacctggtgctgccccagtcgtatgtacgatcaaagtacggggtagtcgagaagacctctacgggcgcgggtgatcagaggctacttcctctttggagagcggagtacaagtatggatttcaaggctccaattcttcatagcagttcctcataggtctaaagatctcaatattcttgctcttggttgcttaatgcaagcgaatccattttgcccagccgccactaagcacagaaaatccagtccatcgtcatagtctatgaggctcttcgcgatcggatctagttaatatggttcgctcgcaagtttgatgtcagcgaccaggattacgtatacatataataataatggcgtatatcatccatgcgctgcggccaaaatttccttagttgaaaaaggaaaaaaataaaactaaaactaaaaaatatttcagatatataacgtgcctgtctgacaatccccaaggaagatttattgtttactatgtctctacaggtaaagggatccacctgctcgctcggtcaagggagggtgcaagtatggctgagatcggtatggggtatgcaggatacctgaaaaggccacggtggcatgtgtcgaacgacagatcacggacaactaatccggatagccgcggtgatgagcgtcgctttctcgaaaattctctttaatttggatatgacctatgcaacactctaaatgttgttgcaatgctaggaaaaagtcaccggtcgttggtatgataagaagcgcgagagcggtccaatcagcattatattgctagggagcgcccaggagtgaggcttgcatttgcagagagcgaaagcgatagccgccatggtctttgcttgaaagacgattaaaaacacgatt

SEQ ID NO: 2003 - DNA, 1110 bp, Emericella nidulans
acagacatcggccaccggtacttggtcatggtgaggttctggcaatgaagatcctcccagacaatggtcccggcctgttgcgggtctcccaagccgattttgcaatgtcgcgagaagtgaaggaacttgcatacacctgctactggcgcgttgctgtcttcgccggtatggaccgtgagatccgccttgtgcggcgtcagttgcgagttgtagacatggtagaggtggttcttatcggcatccgagacgcggtaatcataccggatgggcgtatgatagatgtgatataatcgtgagtgggcgagatcaactccctgccagcccgcggaatccgagccccttgacggtgggtcttgggatataacggtgctgccgcccaatgatttggtttccgaagaagtcatgtttgccaccatttattgactgtagaagctgtgttttgatcaggaggcaggctgcgccctccttatatgctctctcgccatcctagaggtaccatccctcgatcacccgaaactggaaatacgagcttggcatggaggctgagccgtcaatcttattattggtgtttgtatatccatggataagacgattctttcccaaagacgattcgtcatagggatgatcgtctatgagacgaagacgggcgattaagatccagcgagttcaagccttcaacggtgctggccagccggccgtttctgttgaccaatcagagagatccgacgaatacgatcatcctaaagggttagcgtatacttccagccggacaccgggcagaccgaggtctcttggcacagcttacggcccgcaagggttgtatccccgaattggcctggtcatgcaagatatacaagatgaattctgaatgggcattgtacgcagttacaatccatagaaataggtactacatgtgcaacactgtatgcctattctgcctgagatttgattatctctttccccttgtgcatagtggtcgccctacgcccatccgtaaataccaagtatcgcacaacagttacggtggatcctcctttattagagtctgctaagcagcacatagcccacctgggcagggtcacgtgtcgatattctctagacagatcaggc

SEQ ID NO: 2004 - DNA, 2622 bp, Emericella nidulans
tacggtcatggcaaggcattctcaccaatagtatcaatccaggaaactactctgttcaaggactggagataagatggtgccccgtgcagcaacaaagcatacggggcgacgttagagcgcttgcttaccttgctcaggactcccaaccaaacaccgaatgcaactagcagtgctccccacttaagtaataggatatcgtaaatactgggtcgcaagaaaccatcttcttattgctagccttactttcgggctttacgtatggggctttgaactatgcagtatggaggaacgtggcatgacatggacctatacagcattcgggcttcctctgcatgaagatcggaggagagcttggtctctttcgacggaaaggaagatcttgctgctttcctcttgattcagaatcgtttaacctggacatcatatcgcatctgcatgcaataacccaggcacctgaacccccacatcttaccacgccgaggcattcatacaaccttccagcagtgagcccctccctcctggactacaccaacagtgatatagacacggcgttaagtttcagcatgacctggttttggcttgatcggcaaatcgtagcagggcgtcaaagaaaacaaatcggatggtaactggggccttgctgttgttgctattgggggacgtcttgcccgccaacacaccacccacacctgctgcaccacatggattcttgcagactgttcggtgtccactatgctccactgccagacgcagtatgctgagcctgtccagtcagagcaccaagggtaagctgcgtaggtcgtaaccgtgcatgtgcaggctgcaatatcggcggttgtaggcgtgggcgtgggcgtgggcgtgggtgaaagaaggctgccatactgaggtgaagtcagtgtcagatgtaacaggcgtactcttagtgaggggaactagtgtaaggtagcaatcctagtccaggatagccaggaagaagagatatataaggagcctcgtccccaaggttctcttctcttccctatccatctgcatcctatcgcgacttcctcatccaatcaatcaaccaaccaaccaaccatcttccaccggtttatctaccaacaaacaccatcaacatgtctccctgcacctgcaactgctgctccggcgagtgcaactcctgctcttgcagctcttgcaaggtctgtccacctgtcttcccacctgacctaagccttacctgctaacgtcacctcacagcactaaattcgccaaccagttcgggtccgagcgagcatctctcccgtcaataaatacctcgaggtcaacactgaatgcccggcgatgacaaccgacataacaaggggcattcatggtttctgtctggtccggtagaggttgaggatgtttgttttggacgctggggcttctgattttcaggcaccttctgtgcctcgtttgtttatgagtagattattgaaatgaggaatgagatacgtgcacctgcattagcttcttctgggaagtattgtcttcgtagttttcgagtgggttgtgaacggggtgtagcccgtacctgaacacggcgtctagttggtcagctgcctagtcgcttgagatgaattgttttcaagagagctcgaatcaacgctgtatgcaattaaataaagcagtagtgtcatgtttgtgtattctagatctatgttatcacagctcgtcctttgccctaggagccacattgcccggctcctcgccgccagcacaaacagccggtgttgtgacaagcatcgaataaacacacttttcatcctcagcgaccttcaggatctcgttatcctcgccacagtctaagataacagttgttgagcgtgcaggtccgttccagcacccctggccattcttatactccaacgaggtcttctgcacctggatgatttcacctgcttcattgacctcatcaacgctgacggacccgatgcgctcgaacctgcccatccgcgaagatgagccgcctttcttggggatctgcttcgtttggtcgaggaaacagtgctcgtaggtatactcgccagcgtccttctggatacaaacccctttaagggcgcggaagatggaagcagtgccgtagtcagtttcaaggtcggcctcttctttcttgagcttgttctttgcgtcgttgaggtccttttcagctgatttgacggcgtcgcgggccattgtgacggccttggactcagacgctgagtctttatccttgggaggtaagatgccgctgctttcgaggaagcttgtgaacgagttgaacttgtcttctaggaatgtaacaagagacggaggaagataggccgcaagtttgtaaactgataccgtcagcaatcgtccaggaaaaaaaaatgtcaacatacctatatcaggttcatcgtcgccctcgttctcccattgctcccagtttatacctgattcctcgctgtcgggctgggaaatagcttcccagtcgcgatcacgcgcactgttgaaaacagtgtccgcaagtccacgagctgcgtaatcctcccagctgcgcacagcgcgcttgactccctcatcattgaagttcgggttatactcgactttgaagttggacaaaatctcctcaagttc

SEQ ID NO: 2005 - DNA, 711 bp, Emericella nidulans
atccggatatctagggccgcccgtttcatcagcggcgccggagacgcgatgtacctccagacgccgtgtccatgaacgagatccacttgtccgttgcaagcacaagctcggtcagcggttgctctttaaccttccccgccgcaacatcccgtcggcgctcgcggcgctcgacgaccagttcctcgacgatttggcgacacgagtgcgacgagaaattgcgcttgatctgccgtttgaggctcgtcgcgacgcagtaccagaaccgctgtggattatcattgtacaagctctgatattccaagcagcagttgaccaagatgagcgtctcgttctcctgcagcttcctcccgcgacgtttggtcatgggcggcgacccttgcgcgggggaatcgaggctctgcggtgtgtgcgcgaatgcattttccttgttatcttgtggtgtggactgcggctgcggaccgggctgcgaagccggtgatacggtatggggaatattgaagggaggagggtgaggagggtacggcggttggtagtgggaggtatgtgcctgactgcccttgttgacgaattggggactggcgctcggctggggcgccggagccggcggagggaccgttttgctgaggcgatagatcggagtgcggccagacaagtcggggggcttggtgaacttgacgggggccatcgccatggtccaggagctggctggag

SEQ ID NO: 2006 - DNA, 207 bp, Emericella nidulans
gtgcgcgcggtccactcgtcagcacaagctcgcgccagtttcgccgccgcaaagttgatttccgccgacagggattccatctggtaatccgccatcgcaatggtcgtggagttgaatgtgttggtttcgatgatatccgcgcccgcttgaaagtaggcgttgtggagagcggcgatcacttgcggacgactgagtactagcagatca

SEQ ID NO: 2007 - DNA, 2562 bp, Emericella nidulans
tcagcgttagcctcttcgagtaggtaaacggcgttcatcatactgagctccgcttgcagtccccgaaatgagccttggtcgatcttgtccatcttgatgcttggttctggtagcgaactctcctcgcgtattctggtgaagatgcgtttgcgtcttgttttcaactcctcttatccgagtcgtctccctattttttctagacatgtgaatgtcgcatcggcagatgggacctgacctacgctacatgaattgggagactggagtgactccataatcaattgattattgatttcgaagaatcttcaggctcaggctcgtccatgactcgaagttggataaccgttgagacatcacggccgcgtcgtcccactcgcatacagcctgtctcactcgagattgcgactgtccccatcatgataggatacgaggactacatgtcctggcctgtgcgccttgctcgccttgcttgacaggaccacgccgaatagcgcacactcgagggacctcgtgcgaggagcagacaatgggtcggatacgtagccgtttggatatcgagcactggcaactgcagggagagcgccgttgaaataaacttgccctagctgaacgatgcacggccacttgtcctgatctcgactcgagtcggtcgcccgcggtcggaagtggagcgatcaaggcacagatgtcctgcttcggcagcaaggtgagtataacggctggctcgctgggacggtgtcggcggctggatggacgatcctgttcgttgtccttcacggagacggcagaagacgagaccggactagctcaattgactcgactgagtccactgagcctagtggtcttcttgaagggatgacccgaacatggatttcttgcctcagccccagacgcctgacttggtaggctctggccgtcgcgcgatttgcgaaatggagtcagtacacttgagacctaccagcaatgaattgccggagcgcgttcgcctatagacatctgggcttgccgtcagccagccgcaggcgtcgccaggattgccgtcctacttgctgagtgtcgagttgatttttacctcgtttctgctcggagcaatgcgagtgtcttgggagcgaatatatggatagattggactcgaatgtcgctgcacaaatcaatctcagcctgctcaggtctgactgacgagcgatttcaagcgtctaacccttcgctagcaatgcgtctacgtgtcccgacgacagtacacaacggctcgcacgattccaccatccaggtagtctaccacatttcgcatcggacagccttcagctcttgagaaccacaaaccggccgtcgtcatcagctctgtcctcctggtacggttggcggtggccatttaacagatactttggccttccgaacgagatgttccatgtatacagaacagataccgatgcgagacggccagaggcccctctgctggtcatagacgaacagatcagaggagaaccgggacacagcataaggaagggtgcttgggaatgagaagatgattgagtaaggtctgcttcacagctccgctgcttatgtggctgtcagagacgactccaagtgactagtctacacctgctggacactccatcccgtaaccgtatgaatgtttggtccgcggttctggggacgggtatgatgccattacagggtactctaagcgctgcaagctccctaccgcgcagtgcagttgcaccggtcatcattaagacggagattctggggtgtcaactgacgcatcgtcagaattgtctccgtattcactaactctccaatcgaccactctaaagtttgagtcaagtctcccatctaggcctggttgtataaagacatttaaccacgtgagtattgtgagaagttgcagcaccctcacgttcacctgccatactatcaggattaatatttaaagcgaggattgagcaatctagcagaactggtgtcatatctgcacgcaacgccccccgttggcaaggcctcgagctgctaagatagattctccagtaaaagggacgctacgcgtctgatagcataccatagccttggatgtgcgtttatgacgcacgacatatagtccacccccttcctgttcaatcaggaataatcgtcctcccttgtgcctgcgacgtaatgtctgtagacacccgtgacagcgatctcaaacggacctgcaatcggcagtgttccgagcccggttgtgacacataagaccaggtacttgtcatactcatgtagggggcaaggcaccaggcgggactagacggagagcagagccaggagtgagggaatagtaggttgttcgcacgtcgcttccccctatgataccatactccacagcgaactctcgacttagaaaaccagctcacctcgtcctcgtacaaatacaacaaccttccaaccgagcctcaacggctacgtatgtgcatgtgcatctgcatatgcatggcatgaacgtctgtccatgacttcagtccaacgaacacatgcagggccgccggcgtgttgtggcactcagggctgacccgcccttgccctatctcg

SEQ ID NO: 2008 - DNA, 2966 bp, Emericella nidulans
cctgccacttaggctaccacagcactatcattggcaacttgtgacgtgtgttgttgtaccggggtaaaaaagggtcaggtctcgacataaatatcggggccgcgcttttttctgcccgtgttcagcacatacggcttagaggcgtcaccttcaccacgcctccaactacgagaaagcgcaaggcggccctggcggcgtctcccacttctactaccgccacccaatcttgcagccgctcacgagccgccaccacaaccaccgcggattcatttttggacattcctgatagcggaagcgctcgcaagaggcagaaaaagactaggaaacagtgccctgattctgctgccgagttgacttcaacgaactcattcaacttcgagagggaggtgtcggaatctccggcgaaggtcgaagcgtctgaatttgttacctcaacgtcaacaactatggagtctgatgatgatttcatgagtgttgcatcgagtgcggatgatttcctgggcactcagggtagcgatgatgaaagcttaggagatggtaagatgtccgtgggtttttgcggaacttggttgctgacttgggctttgtcgcttcaatcagatttcggcgacgacttcgacggtggttttccaaagacaaagatatattttcgaatacgcggaaaccatatgaggtggacttcaaagtccttagcccggaagatatcgaacgtgaacagaatttgcagatcaacgaagtctcatcaatactcgggctgcccccagagtcgtcggcaattttgttgcgatttggccgttggaatcgggaaaaactgatcgagtcgtacatggaccacccggaattaacactggaggaagcaggcctcggaaccaatttcgagtcaacaccgaagactgaagtggtaccgggtttcacatgtgatatctgttgcgaggatggtgatgatcttgagacctatgcgatgcgctgtgggcatcgattctgtgttgactgttaccgacactatctcgcgcagaagatccgggaagaaggagaggccgcgaggatacagtgtccgggtaatgactgccacatgattgtcgattcaaagtcgttaagcttactggttacggacgatctcaaggacaggttagtcttccttattacttgactgcctatatgttcgctggcatatcaactaatttcggggccagatatcaaacgttattaacgcgaacttacgttgatgacaaggagaatctgaagtggtgcccggctccaaattgcgagtatgcagtcgattgccacgtcaagcagcgtgagttacatcgcattgtacccacagtgcaatgtggttgtaagcactacttttgcttcgggtgcactctgaacgaccaccagccttccccatgtagactagtcaaaatgtggcttcaaaagtgcgaggatgattcggagacagccaactggatttcagcaaacactaaggaatgccctaagtgccattcaacaatagagaaaaacggcgggtgcaaccacatgacgtgccgcaaatgcaagcacgagttctgctggatgtgtatgggcctatggtcggagcatggcacgagctggtataattgcaataggtttgaggaaaagtcaggcgccgaggctcggactgaacaggctcgttcccgagcgtctttggagcgctacctacactactacaaccgatacgccaaccatgagcagtccgccaaactggacaaggacttgtatctgaaaacggagaagaagatgacgagtctgcagtctcagtcaggcctctcctggattgaagtgcagttcctcgatacggcgtcgcaggcactgcagcaatgccgacaaacactgaaatggacgtacgcctttgcgtactacctggcccgaaacaacctgacggagattttcgaggataaccagaaggatttggagatggcggtggagagcctcagcgagcatgtttgagaagccggtgggagaactggcgaatctcaaggtcgacatcttagacaagacagcatactgcaacaagcggcgagtcatcctgctgagcgacacagcagagaatctgaagaacggtatgttcggcgcattgtcttccttagattcttccaactaacagacctggctaggggtttggcaattcaatgttgaatggtagacctagagtcgtatagatttagcgagcatgcttgattatctgttgaaggcaaggacagatgggagtctgcggttaattatggatatcttggccgatccaggtcggtaaatgggtactagggaactggatcgggacgggaggggatgggatttaacacttttttttttttaacgacgtacatgacgagcagcacattacagcgagatctggatctggtttgcatttcatcgcagggcgttgcctactattccccacattatgaagcttatctatactggaaggagagtgcatatcctttcacgggtgtatcaatatgcatctttatgtcatccatctttccgtctcgcctcagcacttacggaataagaaagtggctgcctgcctatcgtgggtagcgaagtacgagtagttgccactagttctatgcttgggcttacgtagcactactggattagtatgctgggggcattgtgttcccatcagataaggccaagagctgttagtcggctccgcggcgtaacctgtacctccgcggttcggaggttacgagcataccggaatggcaggtagattagaactgcagctccgtcatcggacggacctcggtgtaaaatcagttcccatcggttgttagtcatgggtcattcaggcttgggctgattcagcttgaaatctcgagttttatctttttgaagtatattttcattatgaggtctatggatttaaatttaataagcggaattgagattgtagctgtatgtagagcgtagatgaaagtaacccatagtcataatcttttgac

SEQ ID NO: 2009 - DNA, 1581 bp, Emericella nidulans
aataaatggcttgccccagcacttcaaaggacatgctctcgtgagttagccgaacgagcttcgtttgctaaacgtcatcaagaggcaacgcctcataactgtgctttgcttaccgatgactcggcccctaccggagaatgtcagctagggttcctgatcgaggataaagatctcccagaggaggattaccaatgccattattgcaaggcctacatcttcttgactcaatttaaatgccacaagtccgggaaaacactatgcctggtacacctggatgcacatgattgctgtggggaaccgctgtcgaaaaagttgctgggcccggaccacacactacgctacagagtcagcgacacggaattgaagagcatggtcttgaaggtccaggagcgttccaggatcccggaagcctggggacagaaacttgacaatattctggaagatgatccgaagccccagttgaaggtccttcataacctacttaatgaaggtgagaaaatcccataccatttacctggtctccaagagcttgcggccttcgttcagcgctgcgataagtgggttgaggaagcaaccaactacattacgcggaagcagcagaaccgaaggaagaacgagaaagcttggcgcaagactacttccaaggcctcgcagctggaagaacgtgaccgtgaagttcgcagggtagaaaacatctacgcccttcttgcagaggctgataaactgtcattcgactgtccacagatggcggctctggaagagaaaacccgcgagatcgagaaattccgcctggacgttagcgctgcgctcgcgaatccgcatacccggtcaatacaggaagtcgaagagctcgtggaaaactcccggaatttcaacgtggatctaccggaagtggaggacctggaacacattgtcagacaaatgaagtggaacgaggatgcaggtcgcagacgtggccaatatctgactctcaaggactgccaggagcttatcttagctggtgaacagctgggactctcggaagcgaatgaacaccttgcgcatttcaaagacctgtgtcgtcatggtgaggcttgggaagcgaaagctaaggaattaatgtcggtcgaggcggtccactaccaacagctggaagccttgtcggcgcaggcaaaccgagttcctgtctccccagagacactcgcagctgtagatgcaatattgaccaaacaacgtgaagctcagaaacggatccaaagtttgtatgagaggagcaaggacccggattacaagaaacggcctctttacaaggaagtacgagaattaatggagtcgctggaagagctaaatagtcggccaactggcgcaattgacctggagcgtgaacagaaacggcatgaagactggatgaggaaggggaaaaagctgtttgggaaggctaatgctcctctgcatatcctaaaatcgcacatggagtatgttgagaagagaaatttctactgtttcgacctcgaagatcgttttcggcctcctgtcgagccagcgtcaagggacaatagccctgacggccagggaggggatgtgcagcagtactacgggcag

SEQ ID NO: 2010 - DNA, 3492 bp, Emericella nidulans
tagtaacggccgccagattgtgcatgtgaaggttgcccatacaggacgatggtcggaaagtcgcatgtctgaagcaccatagccgctttgtcgcagatctggtcctttccacagaatcctgtcgcaccatgcgggaatacgtgatttatcactggaaatcagcatcaaatatggcatttggttgagttacttacgaagtgtcataggtgtcactgcccacgtcatatttgtaagttggggggaacgtgacaagaccctcactgtagaattggaaagccctgcccgcgagcatttgcagattcagctaaccaaggtcagtgaagtacggatgccatgggaagacatagcttacttgatcattgtcatagagcttctgataattgctctgtcttaccaagtccctaaccgtctgattgggaaggccaatcctataattgaagtctcccagccatataacagcgtcatgatcctcaataaatctattcctctgaaagcgaagtccctggcaaatagtttcgtagtcattgttccgttcatcataattcgcaaagccagcagctaaatgagcggttacgaagcaaagcctggtattcgaatattcgaagcggatggcacagcctcctttgttaccagctattccagaaagcccggtctgcagggaccgaattagtgagttttataagaggatagcaagttccgctcaccttctttacacttccttccacgttctttatgtctctgagaatatcctcgcgcacgtagatcatcagagctgtcccaaccaattgacctgatcgcagaagtacatacttcggtgatccccgcgcagctgcgcgtgagtttaaacaatccatgacggcaagctcccaggatttacgggttgtagggtctgttgacatgatctgctgagggctcagggtaacaatctcctggaatccaacagcgaatatagtcggacacttgcgctggtcattgtcctcgggaaataaccaaggactcaagtcagtaccgggtccttggacacgtccattcacgttgaacgttccggtccagatatcggctaatttcttggaagtgaattctgatgatattcgatccagcttagcagagaccatgtcattgattggatcgtagagatgcactggcagctgatctggcaggagacccaacataagatcgattgtcctctgtcgagctttgtctgagaagttgttgatgtacaatctggcggcagttttacgcgcatcggccaaggcacctgcaatggacatcttcccatgtcgtgtatacgagcttttgagagcaccagtgcccgcgtagatctttgataaagcatctccattatcagcccagagtatggagtgccgatggtgaacttcagagtatagcacactgttttcttgcgacaggaacgattcaagggccagtaagctaatgatggtctgcacaagatttgtccggtcaaggcaatccaggcaattggtgcggaagactccttcttgttgtagaacaacggatgttccaggtatctcagacggacggttttgcttagagagaaagtacgcaaagccattgagagattgtgtaagctcgtgctttatttgatttccggccccatatcctagggggccccgagcttctgcatggaaatcaaactctgtagtacgtaacagagcatgatctgaaggcagatttgattttttgctgctgagattcctccttatatgttcgcgaaaccttgttgaaagttcaatttcacccggttttgattcacatagaaggttgaccacatggacagcgccatattctagctccaaaaactggatatgtttgtcaaacgcgtgttgagtagcctcaattgatcgggtcacttcaatcttttgttgcccggggagaaatcctgtggcttgctcccagaagattgggacggagccacgcacttgcacataagagaaggccaccccggatgttccgcaaaccaagattgtctctgtctcgacgaagttggccacatttccatcgtcgtcaagaccgcgagcattaaatcgagtgcctgctcgtcgtgaagacaaacgggaaatgagggtcagcattgaaggcaaatgtgccttgggctcggaatgtaagacgttagcattagcaggaatggctattgtcccgcagaatccccggataacacatgtgagaatctgagaggcatcgagaagttgtttttcatacggtggtaggtgggatctaaacatgagaagaggttggatcatatatgcattccacaaaacatctttgtcaagggaatcgatatcaaaagctgtcaacttgtctgaactattattagttagttatcttgactcttgtcctggactattagcctaccgatcctgcagtcgatctgtaagattgaagtcaagactgtagtaaaagctaccatcagtcaggagtttcttcagggctagaaaaggatctttcgccgggagtgtattagaaatggtgtcttcattgacagaagactccgcgtcataatagggagtaaattcatattcggaacggttcaaacaatcttttttccttggttagatagcagcgataacagattgattcaagatggtagatattttacagagatctacgttctcaattcttaaaactgtctctccaggcctgactgtggctgccttggaagagcgcgtgacaacacaaacaaacacatcatggtctatagtgaccagcccgagggtaccgtacccagatcctaaaggtcggtaacttgccaagtctatggaagatagactggcaaacttcaccaagcagcgttgcctgtcatgattgactgatgaatgattgttggcagactcccgtaagctatgttggaaaaccaacgcatcgtctgaagtggccaaaataagagtgcgaacggggtggtcccgactgaagactcgaatactaggcattatcaattgagatcctgaatgatgactttgagcatggcgggcagacgaacgccggaagtagttagagtagcactagctttttagatttgaagggccctataaccattgcgttggggaagcttatgaaccgtgcgagatagacatggtgggggaaaatccaagaactatttaggaggttcgacgactacaattgttgaattgctacactggaactgatcaccgttaaagcggggtttcaatatcacgggtgattacgaactgtcttcctatattatggtgattaagtccccccatgaatcctaaattggcccttgaacacacacttatcacaaagtttcttggtctcaatccttcagaaataaagggctcaggtgtctgatttaatacaaatggtataaagaggactccttaaacactctgcttggtttattttccgtactactttatttactttcctaatcatcttattattttcccacaatctcctcactatattttaactttatctatattatcatcgtgacttctctaaaatttcttcttt

SEQ ID NO: 2011 - DNA, 1567 bp, Emericella nidulans
gggagtgaaaagctgtttagaagatctggagacggcagttggcctttaaataatttccgagaatttcgtcatagcgatgataacatgcggggttcccttatctccgcatcagagcttttgcggtcgcttgcgcgactgttttcacccggcacaatatctgctcacttagggctacttccagtatcgtaagcgtagattaaacagctattcacgcgcaactaaattcagaatatgtagccgtgccggatacctgagcatgaaggtaagatttgcagcgaaagataatgcgtcttaccgactgctgtatcaaccatgacaccaaaagagcccctgcttatatgaacctcgcatcagaaaccaataaacttcctaatttcttggttcaagcgcacggtagcaaccgcctagggcttgactttgacttgccaagattcccggcggttcgcatcaagccctaactgccagcccagccgcaacagctaaaagcgggctttgaacagcacggctagcttgacatatacgacagtcagtcatgtactctctgtgatattccaagagctagatgggcttgctgtttgagtgggatatttgcgcacagaaacgtactcggggttcggattctctctggtcaattggcaggctctgcggcatcgcgcagcatttcaaatggacatactacactgctcgcactgaatttggttttatcagcgctcgaggtagacctgatatacatcaagcggccatcagatgggcgttaagtgcttgtagactatcaggacggcgctaagtacgcagaaacggaagcagccgggtagttagtaggtttaaaagggcaaaaggctgtttcgattaactgaatggttgcaagacccggccgactcgacgttgcggaaatctgctaggtgaatagaaataatcaacgagacaagaataaaaaaataaaattatgccgcgaaagcagtatcttatattgtgcatgctttgtccggaccttcgtcttgtcttgtcctccagttaattatttttccaaggcaagagaagagcttctcgctggagacatggatgtcatttacggtgtatccatgattaatatttcgacgaagcacgagaatttgttagatctagatgtttgtgaagattctagctgttgatagccagtgtatggacatgaggcaaagataataccaatactgaattgcctttgtgtgcatatgaaactattcacaagcctgttactcacacagcagcagatttgtctggagggaatatatactatcccgcttctattgacttcaaagtgcttagtttgtaggtgttaaagacaagtaacatgataaggacctgttcacagcttaacacgcacactataggatcgtcaacttggcccggcttggagctcgatgatattgatacgacagcactaccttgaaagtagaaaacgacaactgagttgagaaactcatcttgtagccctgaaccttcctgattccatacgtggggggtaatcaatccttaggctagctgacaaaagggaccaactgctggaaaaaagggcgcaccttttcca

SEQ ID NO: 2012 - DNA, 1553 bp, Emericella nidulans
  unsure (1)..(1553): unsure at all n locations
ttagcaggtgtacgaagaaagaaatcattccaaaaaggtgaaattttcgctcaccagaaagcagcaccaatttggttaccctgtcacgcatccaagtttagtattctgttttcagagacaaccaattcccctgtttctgccacttacacactggccggtctgaaggttaacctatttggggaaacacatggtcagcatatctgagatcgtggtatgtagaaccggtggggtccccggtatccttaatgggaaggggacccctcaagacgcgtcaaacagggagtgtcaacatacgatctcacgcattgtgaagggtgtggacgggtatagaggattaaaaaaaggattatttgcagaaaccgtaaaaagaatcgaagtcggatgaagatagactggggaacagccggaattgaggggaggagggaagaggacaggagcgagatcaggagaaggaaagttgggttgggggaatttgagcggtgaagccgccagcaaagagcgaggccagccaactaagtggatcgcccgtagtaaaggagaaaaagatcaacaacaacatatgtcacgtggcaaaaggggaaccgccaggtccggattagcgcctggattagtcatagacctcaggaacgaaccactctttggtctttgctgcgcgaaccacgccaggtatacttcagtacagctgtatatgacccgtggtccaagcacgatcatacctttctaggtgcttgaaaatgactctccatactggtagcattttgtccctctcttgagatcagtttgacggtcaggttgatgaggacaatggttgaggacccaaaaaagggacactaccatggaatctcagggcgctgtgaatagcgcatcatctatcagtttatcgtaacagtaagacttgttcatcatttggatatgtgcaggtaggacctactcgtaaaatgccgtgctgacagttggggttatctgttgcagcttgtcgggcaggcccaataccagcactaacatgccactaaggcataccttgtttggcaaaaagcccttataaactgtgtaactgcgttatcggtagtgcgctccttagacggccgccatgaggcaatatcctgctctacaacacaggctccattgaatatgtctttctctgagcataattggtgctgtatcagtcagatcagagcgctgaatcattctaaacagcatacaaacaggtcttgatgtgcctcaatatagttcgaggcgagccttctttcaagtccgtaggccgatggtaactcacatatgttgaggcatatcacccacagtccgtaacactccaacgtcttcaagatccgtcagatttactcccatcggcattggcagacctgcaaacacaatgaccccatcacgcagaccccagaccgatcatcctggttgatgacttaggccctgacatactcacgggcctgcttacgttgtgagagattgagcgtgttacacctaagcgaacggcattcgagatcatacgatcgctntacacgtngccgcagaagattactgaaagccatgaagacggc

SEQ ID NO: 2013 - DNA, 2331 bp, Emericella nidulans
cagcagagtctgacccgtggtcaactttcagtattagaacagaacaatttaacagctagctatacctatgtagcaatgtcaacttcccagttcattacccctatactctacgtacattgcacattggggtcgttctccactgtcgacccacgcgaccgatcagaaccgtcctgcgtggattggtccgtcatatgccgcccgcgtccaggtgtcatcggtctcatgcactagataggaggttaacctactggggtggcaaacatactagagacttggcaactgcacgttctgacgtgaatgtaacgctggggacagctgggcctgggcgtggtgctagaggcccgtagcggctcggctctttgaattagggtccgtcttgggatttgcctttgtgaccctgtgctagcctccgcccctggcaaacaggctcgtacatattagtgttaacccccttccctgcttctctgctgtgaaaatttttatcagagcagctgcaatcatgcgctaccaagggacctggctccttacaattgggactttgggagcgaccctagccacctcgtcttcctcctctactgagaaaaacatcctcgaagtagacctcgtcttcccccagaacaaaacgtacaagcccacagaatggttccccattgtctttggtttccagaatccgcaacgcgcccagtacctcaatattgacctcacctattccttccacccccacgagaccaatacgcagaacgacactatcaccctcttccacgacctccgctgggaaaactggtcctcgcacgacccgtacttcgcgcacaatttcctcgacaactttaacagccccggacgctggaacctcgcgtggacggtggcatggcaatcgtgcgacgaagagggctttgagaaccggctcatgacgtctgacatgcttacaaatcagacggacttttcaatctggtttactattgccgccaaggacgctgaaaacaagggtattgatgcggatcttgtatctgctacgtcaggagagacctcctgcccagacctgggatttgagaccgccattgccatcaacgttacggaaaagaccatgtccgtgcccgacttcgtagactggtctgccgccgactggacaaaccatacttgttctgttgttgctcctacattagtaattccggatccttgcagggtcaagttggaccagactgttgttgagagcatccaggcttcgttgacggcacggcgatgtcaagggctcaacccgccagatgattgccctgagaaggaggataatgagagtgctggcgtcgcgctccctggttcgggattattgatgttggctttgtcaggtgctctagggctctttgcttcaatgtgattgaatcatgccatatatctttggttctacttctgttagagagactattagacttgttaaaccacgggttgggtcgggttttcagcatacactgatccgcccggcgggtttttggagcggatcagtaaataagcaacccggcccatggattatcgaaaaaactacaatccaaaccaaaaaccccataaaccccgccaagcataacgctaaccatatatggttagattgggtcagtggagctataacctacccaaaaacccatagcccagagcataaaaaatctaacttggttaaattctaccagtatcgagatcttgacagagatatagtagataatcttgttctgtaaatatcatatattttttattttagactaaaagatggtgcacagctaggaatataagatctaagattatagactatggatataatatatatgtaactttgagaagataatataaactaaccaagttagtttttcttcttgaagtattttttctctttctttccatgggcctgctcctccagagtatgcttgtacttacaagtaacattatttttttcatagaccttattcctattactaccatcatcatcaactgcaattaagcgtcaccttccagaccctgacccttaatggtctccttaggcgcgtttttctgacagtgagaatcctcttccacctagacttgttaaaccacgggttggggcgggttttcaggcctagctgatccgcccacgcgggttttggggtgggttaccttcacagtaaaccgcccatgggtttggcagataattctaacccaacctaaataacccaaaataacccagttatgcatatcattattctaataagcagtgatctatatagttaataaaatactgtatttaaatactgtattataactatctaagtaagcaaatataatctaaatacagtaatatacctattcagatct

SEQ ID NO: 2014 - DNA, 3439 bp, Emericella nidulans
tctactcgttttcatgttattatcctcctcgtcgctatcaccagactcgctgacgctcccaatactgctcgtgctgcccccattgcgagacgaacaagagcaagcatgcagggccaagatggcatatatcttcttttctcttgcgactctctgcgaaatatatcttgcaatcgtttgcggcagattgagtatcgcgtctccgtggccgggatatccaacggaacacttgagccctgccatcaggcggaggctggcagtgtaggtttccaggtcctcagcaacactgtagccatggcctagcacattgtcgccggtgaacagtgcgttctcttcctccagcaagaagcacatgtggtcgacagcatgcccaggcgtcaggaccgctcttagagtggcaccttgtgttttgaaagtctggccattcgcaatggcctgctggcccgggtcgggcgcatgcttgtacactattatgctggggtcatgcgcaagaaggtcggctactccgccggtatggtccttgtgccaatgcgtgagaaggacgtgggagatggagatgtcgtggtcttcgagataacgggtcacactgactgcccattgcggagctccctgtgaaatagttcaatattgatcctcaagaagtggtttttacgcagatggtttattctcagaaaaccgaaagtagtatcacatcacccataaacacatgaacatcgaagaacactcaagggtgatttgggttaaggtcttacctctccagtgtcgatgagtatcctggtgcttccagtaccgactaggtatgtgttggtgccctgcagctgcatgctaccagggttgtatccaagaaagcgcacgacacagtgagacaagccatcgtcgatttctgggagcacaggtagcctgctccgctgagtctctagatagccagcccagaagggcgacgagtaaaatcccccagacatagcgatgagagttgaaagtatcgataggggcattcgatgatgaagaagttagattccccattagtgatatgtgaccaaaatctagccacgacagagttggggcctcctggggcgtaatctgggctgtgctgcttacgccctacgaactctctgcggctgtttgggggcaataagcactcccctcgtattgtccaccaaaaagcccccgaagtattcctccgtccggggtccgaacacatgaatagcaatgcccgatcatgtttggtatgtaggaacctattacctctttgccgcaaatactggtcgtagatctatatatgcccttcacttcgtccactccataccacagaaaccacagaaatccagtatacacttgctattatttccagcttctaactgtgctcatcctcctatcctctacaacattccaagatcacaaacttcaattccatttcaacatgatgaacgtcccggaaaagtgtaaggtgctggtcgtcggtggcgggccagctggctcctatgcggcctcggcgcttgcacgagagggaatcgacgtggtcctccttgaagcagaaaagtttcctaggtgcgcttccaggaatttgagagtgatggctttcattattcgtgatgttcccatattcttacacgtgcaccagataccatattggtgaaagcatgcttccgtccatgcgacacttcctgaagtttatcgacgcctacgacaagtgggatgcccatggtttcaatatcaaggtaagaaaaaagacgacaaccctccagctttaaaagaacaccactgctaatgctcagagcagaaaggcggcgccttccgcctcaactggtccagacctgaaacctgtaagcctcagctgatctaatggccacggcagagattccaactaaccatcaacgtcgtctattagacacggatttcattgctgccggtgggcccgggggctacgcctggcatgtgatccggtctgaggcagacgagctgctgttcaagcacgccgccgaatgcgcgtgccagacctttgatgagaccaaggtggcatccattgagttttcctctcccgatctctcgtctggaggcacgcacccctttggtcgccccgtctctgcgacgtggactcgcaaggacgggacttcaggaacgatctcgatggactacattgtggatgcgtctggtagaaacggtctcatcagtaccaagtacctgaagaatcggtcctacaacaagggcttgaagaacgtggccagctggggctactggaggggagggggcgtccatggtgtcggcacacacaaagagggtgctccctatttcgaagccctcaaaggtacgtcctcgcccggctgtatcttccaccttacccatgtgaagggaaacagtgctaactgattgtttggctcaacagatgccagtggatgggtatggtttatccctctgcacaacggtacccactccgtaggtgtggtgcagaaccaagagatggcgacggagaagaagcgaaaaatggccgagccttcctccaagggcttctatctggagtccctggagtttgttcccggcataaaagagctgcttgctaacgcggagctcatctcagaggtcaagtcggcctctgactggtcatacagcgcctcaagctatgccttcccgggtgtacgcattgccggagatgctggatccttcattgacccgttcttctcttccggcgttcacttggctctttctggagggctgtcggcagcaacgaccattgcggcggccattcgtggcgactgcgatgaaaatgttgcggcgtcatggcacgataaaaagacatccgaaagttacacacgctttctcttggtggtctctagtgccttgaagcagatccgttctcaagatgagcccgtgatcagtgactttgatgagggtagctttgaaagagcctttgacctattcagacccagtacgtccattctctgtgatcatcccacggcagaagcaataattctaacggcgtaacgtctagttatccaggggcaggccgatgccgatgcaaagggcaagctcactcaagctgaaatctcaaagacggtcgagttctgtttcagagcatttgcgcacgtctcgttcgagcagaaagaggctctcgtgcagaagctcaagtctctagggcacgacggagatgcgtacgacgagaacaaccgcaaggctctcgaggaaatcgagaagcagctgacaccagaggagcagacaatcttgaagacactaaagggacgccgcatggtgcgccccgaggattcgctcaacattgacaatttcactctcgactccatcgatggcctcgccccccgtttggagaaggggaaactcggattgtccgcagcgaagaaagcagagcttaaattcaccgctcatgatccgctttctttccttaacggcgaagcaatgggctgccagaagaccagtccaaatggcaatctcg

SEQ ID NO: 2015 - DNA, 4384 bp, Emericella nidulans
cagcttcggtttcaactcccaggacgcctgccccctccagcaaaacaagatgtctcgcctctccggtctcatacctgatccccagctccaaagcctttctcagcataagctctagcgccctccccgcatcagcccacccagcagaccgattgaaatagtacgatccaaatggcgcataatccgtcctctccagaacacctccccacgcccttcgaacctcatcctcctccatatcaacaatcacgctgtcatgcttgccagcgaggaaattctctctgatacggtgcgccacattgctcccttcctcgtccatagcgatccagccggactggtggtaaacacctgcatctggatctgcgtcgggattttgagactggaagaacggaagcgtctgccaagcttcaatcgcctcgaagcctaattccatatatagtggactggaatagtcggcgcggatgatcttgttgatgtcggcggatgctgcaagcgtattggacggagggtcccgggcagctcggtccaaaaggatgatacgagaggggtcgggaactcgctggctgagatggtaagccgtgctgacgccgaaaatgcctgcgccgactatgaggattgttctttcatccatggcttgctgaatcgaagcgttagatgtagttgtgatggatgagggggagtggtgatcggtgtcctatcaatggcgtagttggagtacaatagcgtcagatacgtaacaatagagcgcgcaacgcaatgacaaagtaatacatagcctacattgcaatagatccagaactcataaggtaattttattgccagccgtagaacaacgaagttaaatgcagaggcaatgagcacatgacacccaaacattatttgacttgctgcccctcctgttcttccaacttcccagcttcaacccctagccttccaagtcgagcgatatctcgtggccccagtctaccatggcgacctcagaccaagagtatttctggaccagcaatattctccttcacgcccttgcatcccaagaacgccccgactccagcagcaacaacccaacccgactgcaaacgcaaacacaacagccaatctcagactcagacagagacgcgatatgcctactattccacgattacttcccttcaagattaccgcttccatatgcgggattcgacaaccgaattgctgctttgcgtgctgacgtccacaaacgatgctatccaaggaacttgacgatagtcgaggaggtgcatcagtttttcctggagttgaggtccttgctttctgtttcgtggcattcgcaaggagctgcgagctaccttagggacatggatttgcattcacaggcgcaggctacggcgcaggctacggtgcaggttgacgaggtggatctcaatagcgacagtgagaactggccagaaagtcggatcgatgacgaagaaacgtaccatacatcgatatgggaagctcgtcggtcgaatgaatcacccagccccgataaaaaggtttctaggagaccagtaaagggtgactgtacgatctgctttgctccgttgaaaaacgatcaaacttctccgccactaaaagaacaccaaagcgaaccgaaagacgttgcctttgtcaataacgagccaggcagtcgtggtcctgatcctgatatctatgaggatcatggtgacgagggaaacaaccaatatggtgatagttctgacgaggacgaaggagacgacgacggcaacgacagcagcagtctcgtttggtgtagagatttttgcggaaccaactaccactcccaatgctttgctcagtggattccgcagttcaagaagcggcaagatgtcagctgtcctacatgccggagacgctggaaatactggggagggaggaattattgatcgattgggctgttccttggtttcctggttccagtgccggaatcatggcttcatgatttgcctgacacatgtaccgtacatgaaggacttctgcgtcaatggggatgtgatttgtgggctctgggtctgatgataatgctataaccgagccttttgcttttccatccgctgtaaccacgtagcaatggtctcaaggaggccgtcgacctcctccaccgtgtttcccgcgtgcaagcatacgcgtacacgttctttccctgctggaacagttggcggcatgattgcacggacggtatatccctgctcctggcatacgctggcgagcacacggggcacactgctgcgaagggaaaatatgggtgagttcgtaaaatgttcaacttcaaaggtcgacgagtccttgtggttgagattgtccaaccccgtccggaagtgagcaatcagttgtccgagtttgtgctggagctggatatttgttagctttcccataggcctgtaatgaaacgttgcttcctcaagcgaaggaccgtacctgctcagtttttccctcaacgagtagttcataggcagcacgtattgaagcaagaaagggaaatcccagggcagtggtatagatcaggctgcgagcgtaattgatcaggtagtctctagtatccgcacaacacaatacgattgctagcaggacagtcaatatcgacacccaaagacaacgcgcgagacttacctccatgactagcgagtgctttaccgaacgtatgtacccggacgaacatacgatcctccagtcccaactcttggactaccccagaaccgcgtggtccaaagacgccggtcgcatgcgcctcatccacaaggaagtatccgttaccgtaagggagaagctggtccacgatctctacgaactcacgaataggcgcaacatcgccgtccatactgtagacggattcaaaggcgatgaaaacgttccggcggccctgaagaagtcggggatctgcagttatttctgcttgcagtactgctctcaggccatcgggagagctatgagggaacttgatacgcttccctgctcgtgagagccgcatgccctcatgcgcgctggcatggatgagttcatcgtatactatcagatctccgggttgcgggatactcgagaaaacgccaacattggcatcatatccggaattgaacagtaggccactcggggcattgtggaacgcggcaatgaagttctccagctcttcggcataggctgaattgccgtctaggaggcgggaccctccgctggcaaacgggtgcaacggcggcgcttgttgcaaaatatccaaaaaccgcgctcgataggctggcgatgtggatagtgacaaaaagtcgtttgatgagaaatcaaccgaagacgaaggtagaatcgtcagttttcgacggcacagcttgtcttcccttcgacgtaacgcctcgcgcagtgagtcacgaaggcattttggagaatcgcccatctggacgactgtggttccaaggccaacgcttgccaataggcaattcagatagctggagacaagattcaagtaaccgtaaattcaaaggaggatctattttttctctggtgagattttgccagtattaatgctccagctcaaatcacgctctccaatctccacgagtctagaacgtcttgaagaccctgctgtatggacctgagacttggggtagagcgatcactgatgaagtagtgcctgagtctcaccacattaacacatcatacggagtagcacaattcaattcggcgggacttatttcatctgttgggatcaaccggtgggggaatggatccgacgaacgtggctgggccgctgcccggttgtgccgctgcagtgactcggtgagcaacgcagttccctaggcaagacaaaaggcttaactcgggggcctcggcctggttcctgtctcactgtgcctgttcctgctagaacgactatgaacgcctaatgcaaagggctcgagagtcgaaccacgatcgggtttctttccgcggtaaagcgctgcagccttctgcaaccgaatctgtcggtcatcattcctgttccggtcgcagacgggtgccgaaaactgcttctaaagttcagttggtgtttcggctctgtgatgcgttagcctttcacattagcgactggtttctgctgttttgaaagtctagattcaccatcatggcacctgttggtgccgcgctctggcgctccctccgcgcccaccaagtatacggggcgaacactgacgtcggcaagacaattgtatcagcatttctttgcaatgctgttcatggtctgaaaaatcaagcaaagcaggcgtatatgaagccggtctccacggggccattggatgcatcgcatgaccaggtaagactggtactgtgcccataatgtgctcccagcccgcctggaccaggcaatatgtcattgcctgcctgcctggcacttcgcctgtacgcgggcgtg

SEQ ID NO: 2016 - DNA, 364 bp, Emericella nidulans
ttctgattactatgagtcatgatgctcgaatctgggattgtctataaaagttctttaggggacactcaagggccggggcaagcctatagtaagttggcagtcgcagaacgcgcgctctgcaggaggttagccttggactggtgctactatgagattatagtacctcacgataaatactgtgtagtattgcattcatgactagaacgtccttccggtcattatactatactgacggcggacgctctgttacgcagatgaactcaagcgccgcgaaaggatcgctcaatagctagggtagtcaattagaagtataagtatcagtgcctataaaggtcagttcacatttgtgcgactgtgcctagtc

SEQ ID NO: 2017 - DNA, 1625 bp, Emericella nidulans
ccccttactcagctgcacacggagactttcgatggtttcaggcacagccttcccccggtgcggagttttgtgagctcatccttcagtcgagagacagcggttgcgattccgagttcgagttgtgaaaggtctgacggtcatccgaagcaatagttgcctggccttttgcgccagcatctgtttgcttcaaagtgtctcgttttttacttttgttcaaggccggggagctagtgaagcttcggcggaaggcataaccttggagttctatgccgcgcacggctcggattcgggatgtcttaagaaattgtggaagcgcggctatgggacgcattgtcgtgcgttggtagggaaaaataccaaccaagagcagggacagttgagtcttgacagccttttggttttgatgccaagaacttgcggagctgaaggaaatcgattaccttatacggccataggttatcaataatcgcttcttcacacaacttctcaaagatttggaaagattacaaaacagcaaagcggaaagtgaagaagtttgacaaaactcgtcggaatcattaaacctgcagctacagtcatgtataaatctagaggatacttttgataagaatcattcccgaggcgtgtcaagcacttccagcccaacgtccctatatgtccaagtctgaacaaacaactcatgcttctcatgcatctcataatctgttatttaccgcgtggccatggccttagtgatgagtctcttgagagccagctccttcttcttgagatcctcgggagtggaatcctcaatctcgagctgtgccatggcatcactgagggcagactcgatcttctccctgttgccacgcttgagtttcatagacattgtagggtcggagatgatttcctcaacgcgagagatgtaggactcgagctgttgacgggactcaaatcgtttggtgaaggcctcatcactggtcttgaacttggcagcatctgtttctgattagtataggaagcacaaaactccaatgggggtttattaccgtcaatcatctgttcaatctcagtggtagaaagcttgccgacagcgtttgagatagtgatattggcgctgcggccagaagatttctcagtggcggtgaccttgaggataccattgacatcaacctcgaagacacactccagagcagcctctccagctctcataggtgggatgggagccaaagtgaactctccaagagaagtgttgtcggcgcagttggtacgctcaccctgatagacagggaactgcacagtggtttggttgtcaaccacagtagtgaaggtacgcttcttaatagtggggacggtctggccgcgaggaacgactggagcgaagatgttaccttccatcgcgacaccaagagatagaggaacaacatccagaaggaggagatcctgagtctcggctgaagttgccttcccggagaggataccggcctgaacggcggcaccataggcgacaccgtcatcggggttgatgctctgcaaaatgtaagctttgaacaaattaacagtggcacaagaaactgaccttctcgagcttcttgccatcgaaaaagtcgctgaggagcttctggatgcgaggaatacgggtagaa

SEQ ID NO: 2018 - DNA, 3877 bp, Emericella nidulans
cttaccgtcgaacttgaaacaccctggagatgacaatgattgttttccccgagaccgcggcgactcggccttcaccgtcctttccaataatacagaccggcccatccgttcttcgcacgggatcagcaccctttcaggtattccccgtgtgacaagtggtcaccgtgcagagccaagtaggctttcactgaaagctcttcgtgtcccctcgtgccaagggctgggtagtcttaatagattgcgcggagatggattccgcttgagtctagccttgactcgtccagatatctatatttggcaccgcctcgtgctcgctggtgccattcccaagcctttctctcgtttgctggggtcgagtggaacggcgcttgtagaactcctcccatagggcagcgcctcaacaggcctcgcaagctgcagcaaatcatcgcaccgcgagtgcgagagaatgacctgacgcctctgcaaatatctccagtataccaatcagtgtcttcgctaacatcgtaaatttctcccagccacatggcgggtccgcttgtggttttccatggatagaagaacgaccaccgaaggctgcagaagatagcgcacatggccgtgctctaggatcgcggccagttgccagtacggtcgcttcgagggaagatcatgactcgatctgagttcgtggctggttgtgatagcatccatcgggcattgtctcatcgctgggaggacaggcggaaatcaggatcgcttgtcacaacacaatcgtcgaataaggtcagctgtatcgaaccatggggcaacgcatcgtgttccggagaggcctggaggatctggagtggttcttgaattagcagactgagacccgctggttaggagagttggactggcttgcagagaccgtttactcgctccgccaataattgagcacgatcgcagtgaccctggtctaggactgaatgtttagcgcagtgggcgctgagcagttggcactgagctttgaacactgactgggcgctggtcgctgcttaaacttcctcaggtgcagaacagaacctcacgacccgcgcctttccttttccttcccctctcctcttcatcttccctctcccctgcacatctctaccacatcgtcgggttctccactaccattgaagaccagtatttgatctgcatcgttttaccggccgagaattacttgataacatggtccgacaggcgctcgtccttgtgtcccaactgcccgctattcctctgcgctgagtgctcacaatcagtctcgctgcaatccgatcacgaagccaccacgctacctttacttaattaagaagtctcgtcacggctcgctattgatagaagtggaaaggggaccgaaccgtcgaattcttgcccctcgggcttctcccttttatctcagcggcactacgtccgtcccaactcgccccgttagattgacgacataccattcacgagtctaggtttcagggctgtataatttatatagtgcgaagttttaaagggcatcagtcgtcctctcctttaccagcaagcatctcgagtcggatcggcttctagcgtgcctgtttttctgcgcctcataccagcaccgtcatcgccggccgatgatccagtgcgctgtcaagatacaccgcgtttccttaccgggtggtaggcttatcgccatgggccgatatccgctgaaatcctactttgctccctcaaagctattcttctatacttggttctggggcgcgcatattgctatttttgcatacggatggttcgtcaacgtgaagcgatagagatagagcggagtactgactggttcaggtatcaccaagcgaagagcgagccattgtcgccactcaatgtcctttcgtactcagtctggatctcgcgaggcgctggcctggtattgacagtcgatggaacacttatcttgttgccgatgtgcaggaatctcgtcaggtttctacggcccaagctacggtggctacctcttgatgagaatatatggtttcatcgccaggtggcgtacgcgactcttgtgtttaccattcttcatgttgcagcccactatgttaagtaagtcgatctctagggggatcaggaagcaaggaaagctaacgttttacagtttctacaacattgagagaaagcagttgcgtcccgagacagcactacaaatacactatgctcagcccgcgggagtgaccggtcatgtaatgctgttctgcatgatgctcatgtacaccacggcacatcaccggattcgtcaacagtcgtttgagaccttttggtacactcatcatctcttcatcccgttcctacttgggctctacactcatgcgacgggctgttttgttcgggatagcgcagagccatactcgccgttcgcgggcgagcggttctggaaacattgcattgggtatcagggctggcgatgggagctcgtagcagggttcttctacctctgcgagcgactatggcgcgagatccgggcgctacgcgaaacggagattgtgaaggtggtccgtcatccatacggtaagtcagctgcgcgatagacaatcctcgagggttttactgacgagctagacgcaatggaaatccaattccgcaagcccggcttcaaatacaaacccggacaatggcttttcattcaagtccccgaagtctccaacactcaatggcaccccttcaccatcacttcctgcccctttgacgactacgttagcatccacgttcgccaagttggcgatttcacccgtgccctaggtgacgccctcggatgcggcccggcacaagcccgcgacctagaaggtctcgaccccatgggcatgtacgaagtcgcactgcagaacggccagcaaatgcccaagcttcgcgttgacggaccctacggtgctcctgccgaggacgtcttcgagaacgaaatcgctgtgctcatcggtaccggtatcggcgtgacgccatgggcctccatcctcaaaaatatctggcacctacgtgcctccccagacccgccccgccgtctccgccgagtcgaattcatctgggtctgcaaggataccacctcattcgagtggttccaagccctcctttcttcattggaagcccagtccgcgtccgacgccgcctatcagggggtttcggagttcttgcgaatccacatctacctcacgcagcgcctcgatcaggatacaacgactaatatctacctcaactctgttggccaagaactcgaccccctcaccgaactgaagagcaggaccaatttcggtcgtccagacttcaagcggctattcacggctatgcggaacgggctgcaagatcagtcatatatgcgcggattgcacacgcattccaggacagagattggtgtctacttctgtggtccgaatgttgccgcaaggcagattaaagcggcggcttcctctgcgtccacgaacgaggttaaatttaaattctggaaggaacacttctaacttaccagtctcatctcgtttaactggaccatttatgccctgtatctgcttcaagcaccaaagctattttatgcgttgacatctgtttctgatatcacgtgatgagttatgactttccttgttttacactcttgcagcgcgtcctgtaatggtctcatgcaggacgcttgcaatatcctctgtattctaccccacgacccgtatatagccacgttctctagaattcaaattaaactggataagtaattgaaatgtatctgctttcagattccatctttcacagactagatctcgtaatgagcattgcttaagtactgctacattatacgacattacatctgcaccgcctcattttcatccccactcgcagcatcgtctggcatggatataggcataccgaa

SEQ ID NO: 2019 - DNA, 4462 bp, Emericella nidulans
  unsure (1)..(4462): unsure at all n locations
ccttcttcttgctcttaggcttcttctccttggaagcgatctctcgagcaatctgcttgctcttggccttgggagactgggtagccttggtgacaccggcatccttgaccttgctcaaggccttgtcggcaagctttccagcactctcagcgcccttcttgacaacagacttggtcttagacattttgactatagtgaggtagaacggttagaaaggtgcaacatgagtggccgacgccaatagcaagacttacctaattattttccgaaaagagaaaaaaagaaaagtgcggcaagccctctagtactcaatcacccgatttgaaaatcccacagtgttcaatgtccagaagtgactaagcacgactggaagtagatctcagaagagatttacgcggacgcccacaagtaacccacaacggacaatgttcaagcccacagaaacggacaggagatatgcaactgtctatgatatgaaacccacaagaagatggtaagatcccacaaatagatgaaacagcccacagccctcagtgtgaaagcccacaaacaaggtctctgttgaagtgtatctggtaagatacacgttgcgctcccacgtcagtagaagtatatgaaatagggaagatcaaatcaaagtgatatagccaaagaataagtcgaaacttttttttccttggtgagaaatttagggagttgataggtgatgaagggaaaggaaaaaaaaattttgggaacttttgagaaacagcttctctgataagtaaaaaaaaaactcgaaggctagcagagatatgcataccgcttactataaccggtctagcttgaaagtctatgctgagagaaagtggagacctccaaaatggttctttcgaccaacaacagtccgccctgtcaaaactccagtttgctcacatactccgttataggctgtccctaccctggcctcgtttcttctccaattgctgttcctctttatatagcaggtttgcggtcaatggaagaccactgaatattatcactcaatatggcaccctcagtcccctcatcctatcgcccgcggaagaagagaaagtctgccgcgctcttcgccggctcgaacaacccactcacaatagacgcaggggaggggaaagctgcgcctgcatttccattagtatcatttctatggggagctcgcgctggcgtatctcaatggctcgttcttcctctcatattgatgacagtgggcctgtttcgctgggctgtcagtctgtggggttattcaggtaagcataccatcgagttgctgtatggattcttgtatgtatacttgggctcatcatgcgaaggctttaatacccctccaatgtatggtgactttgaagcacagcgtcactggatggagataaccattcacctgcccctgtcgaagtggtatacctatgacctacagtattggggacttgattatccgccattgacagcgtaccatagctggctgctaggaaaaatgtacgttggattttggccaagttacagacttaaccagaagtttaacttataaacagtggctcggttttcgatcccactttgttcgccttggatgactctcgtggaattgagggctctcttctgaaagttttcatgcgtgcaacggtggttgtgtccgagtacctcgtatatatcccagctattgtcactttcctgcgacgttacacccggatgcaagcggtacccgtatggtcctcgtccatcgcactcagcgccatccttctgcagccagcaaccatacttatcgatcacggccactttcagtataatactgtcatgctgggattatttgttgcgtctttggatgctataatggcaggacgcatgctttgggcgtgtattttctttgtcggggctcttgggtttaagcaaatggctctgtactatgctccggttatgttcgcatttctccttggaatctgcatctttccgcggattcggcttgtccggcttttctgcatagccctcgttaccattgcttcctttaccgccctccttcttcctctgctacttggggctactagcaccgaggctgggaaacagccagtccctgagccacctttgcttcaggctttccccgtcaatctggaccatggatcatcattatacctaattctctttcaattgacacagatagtccacaggattttcccattctcgcgaggtctcttcgaggacaaagtggcgaatgcgtggtgcgccattcacacattttacaaactccatcatttcgagcctgaattgttgaagcgcgtatcactcggcgctaccctagcatcgatcttgataccgtgtgccatcgtcttccgtcatccgcgcgcttcaattctgctccccgcttttgctactgtcggctggggctttttccttttctctttccaggtgcatgaaaagagcgtgctgttaccgttacttcccatgacactacttatcgccggtgatggagggctcaataaagatacccggtcatgggttggttgggcaaacatccttggttcctggactctatatccccttctcaagcgagatggcctccaagtgccatatttcgtggtgacttgcctctgggcctatctattaggccttcccccgacgtcgtggcagatctaccgccaccagaggccggttggggaggtagaagcggatactgaacctcatggtcttacaagactaatacatattttgttttatctcgcaatggtgggatggcatgtcttggaggctttcattcctcctcctccaggcaagccagatttatgggttgttctcaatgttctcattggcgctggtggctttgggatttcatacctttggtgtttgtggaagttgatcagcctatcccgtcggatcgattctaaagtggaggatgctcggaagaagaaccagtgaaacgtggtccgacatgtatagaataaactcagtacgcatttgaaaaatgataccccatttcctaatatcaagaatcgcctgaagagcatccttttattcgtctatttcccctttttaccgcaaacttagttaacagacatatgagcgggagaagattattgctaccagatcaatgagatgcgaagtaatgtacatttaaaccataataagcccatgaatcccatgaccgtaacaccaagctgatgccgctgaggctcacctccaatctattgtatgtcgaaggtatccccgcaactctaatatacaaacataattgctatgaacttcctcagtcgaagggtgtcgcttccctccgtaaaggactcaacctagaccttgaagccatacccagccatgcaggccttgtattgctcaatcattgacttgcactcttgcgtcgggtcatcggatttggagaagagcatgcaatcatctcgagctgtcttctcagttttgcatacacagcacggctattgcaatattagtttcggcgcgatggctgtcatgtcgcctcggtgaacgaaccttgggtttttctgccggagcttcagttgcaacgggaatgggagtcttttcagccgaacctgaggtcagaccattagcaagctgaagtgcattgacagacggcaaggccgggatatcgcaggagatcggcttaccgctggatgaaccaaagagccacgacattgtgcagaaattactgtattatagccaacagcagcgaatagcgagttaagaatgtcagagagggttccgattgtgttttgaagcttttctcgaacggaggcgtgcttgcttattaatattgcgagcagttcatgctccggtcgaaaacagcggatgtgggctttaccggcatccggagcggcgtcggggttctccttattcacattagtttttgatctgattgttgctgtggcttcggacagtctttcccccccatcaacaagccttctttttcaaccacactctcttaaaaactgctcgatccgcttgcgactattgagattttattattgatagtctaaggatacccgtttccttctcttttattcatttataattgcgacacatttctacctctcgaaatttaccccaccatggcccctccaaagatcttctcgctcgagggcaagggcctgaagttggactcggctgcggatatcgaggcccatattcaacctttactcgagagcaccgactacactgaagttcgcctcggaggaaacaccttgggtgttccagcgtccgaacgcctcgccgccgtcctttccacgcaaaagagcttcgaggtggctgagctcgccgatatcttcacctcccgcttgctcagtgaaatccctgacgccctcaccttcctccttaatgcgctccttgaaatgccaaccctccacaccatcaacctctccgacaatgctttcggtgcgaatacccagaaaccccttgtcgacttcctttctcgccacatgcctctncgccatctagtcctgaacaacaatgg

SEQ ID NO: 2020 - DNA, 1845 bp, Emericella nidulans
atcaccgtattttcggtgcagtgctatatgggtgagctctgggcgtcgaccgcgcacgtctaagaagcgccatagattcgtaaacttggccaagattgggccatgataacggtgaaggccattgtgaaaatattgttgggcaaggtagagtaaaatgaagaaaggaagaatgtagagaccgtagttggataatggctctgtgtggtcgagaatttctgtcacgagcgccatctttgatgttgggcaatggagagagggctgagcacagttggagactctctgcacttatatacagggatgttacagggtaggcgcctcactgggtgcctgggctcctcgtccgtattgctaagacgcatatcgccctgatggcctccatgcaccgatccacggcagttgtgcctgcggagaaccgatggttccataatcactctgcaagatattcgcaaggttacgcagatcctccgttatctggggttgacaggagaaatgagactgcgagactgtcctagcgtttgtggactctttccatgcggggcattagacattggatacattggttgcagccgacgttgcccggattgatgacagttggccgtgagattgtggatgccatcaaacgcggagaaactccccgcaaccaaggtaggcgggggtggggccgagcagcatagaggactcaagcctgggaatcttagcaggaggccagtaatcaggacattccgtctctggcaatttcggtaaagggtcgccttcatctaccgaaaacccacatacatctgctaatacacctggtgtccctccaggttccaaccgggccccggcgtgcggctggcttagttttaaaacctagtggcagtggatcgcttggcacctgtgtttaaaaggactatgaaagaccatcattgttttacacttgagtaacctgcgtatagcatgttgatatagctatcaagggtattgcctcaattcgccctgcaatgatgagagtaagaatgaggcaaatttttggatactctttgtaccgttgacgtgcactccggctcacgctgagttcaaaaagaataaaagctcatagccagcataacttccagggtatcataatgatggtaatgtcaaaaatggaataaccgcactctcctcaaacggtaacccagtgtcaacgccatggtcaacggcaaattggagactgtttaccggtcttcgtgagacaccgatacatctagttggtaagattcttcgcccccccacgactgagccctgcggccagacagctgttgctcttcgtcgtctggaagcttagagaagccctctgggacgaagtcatccttgctgtatggagtgtcgcatcggaaagagcgcagaggtgggaagtagcgccggtagcagaagtaggcgaccacggagcctaggatggtgccggatgtaacgtcatacacgtcgtgccggtaatcatctaggcgggaaatcgcgaccatgagggcacagacgatcggaatcaggaccaaaagacagcggcataagtccgttctaggcctaaacacgtgcatctgaccagagaagaacctgacatgaatgattagtgggtggctagctatgggaattcgcaccaagcttacaatgatagataccccagtccagcaaatgagaaactgctgtgaccgcttgggaaactcctccacccctcctgtagaatatgttcgttggtctgtgtgcaaacagtccagtagacaagcgtactctcaggagttccttttctaggcatacagcgtgatattaaatcaggacggggtcttccaaccgcatttttaatgatgtccgtgagaagcgaggtgagcattatag

SEQ ID NO: 2021 - DNA, 2533 bp, Emericella nidulans
ccattcattcgtgagcacaagatcacgtacctcaagcgcactgcctccgtcctgcaggaatacgacttctcctcttgcccatctctaaagcgtttgatcttggtcggtgagaacttgactgaatctcggtatctggcactacgtagacatttcaagaattgcatattgaacgagtatggcttcacagaatcagcctttgtgacggcgctcaatgttttcgaaccaggctcggcgcgcaataacacgagtcttgggaggccggtgcgcaacgtcaagtgttatatcctcaacaagtctctcaagcgagtgcctattggtgccactggtgaattacacattggcgggctgggtatatccaagggctaccttaaccgtcccgaccttacgccgcaacgcttcattcccaacccattccaaacggaccatgagaaggagctcggattaaaccagctgatgtacaagaccggggatctcgcccgttggcttccaaacggtgagatcgagtacctcggccgcgcggacttccaaatcaagctgcgagggatccgtatcgagcccggcgagatagagtccactctggcgggttaccctggggtacgaaccagcctagtcgtctctaaaaggttgcggcatggcgaaaaggagactaccaacgagcatctggtaggctattatgtgggcgataatacctctgtctctgaaacggctctcttgcaatttctggagctgaagctgccccgatacatgattccgacacgacttgtgcgcgtgtctcaaatcccagtgactgttaatggaaaggcagacctccgtgccctaccttctgtcgaccttattcaacccaaagtgtcctcttgcgagctcacggatgaggtggaaatagctttggggaagatatgggcagatgttctcggagcccatcacctgtcgatatcccgtaaagacaacttctttcgtcttggagggcacagcatcacatgcatccagctcatcgcacgtattcgccagcagcttggtgtaattatttccattgaggacgttttctcatcccggacactggagcgtatggctgagcttctgcgaacgaaagagtccaacggaactccggatgagagggctaggcctcaactaaaaaccgtggcgggagaagttgcaaatgctaatgtctatcttgctaacagtctccagcaaggcttcgtttatcagttcctgaaaaatatgggccgatcagaggcttatgtgatgcaatccgtgctgcgatacgatgtcaatatcaatcctgatctatttaaaaaagcctggaagcaggtacaacacatgcttccaacactgaggctccgatttcaatggggacaggatgttttgcaggtgattgacgaggaccagccgctgaactggtggttcttacaccttgccgacgattcagccctgcccgaggagcagaaactactagagttacagcgcagggacctggctgagccatacgacctagcagccggaagcctgttccgcatttatctgatcgagcatagctcaactcggttttcgtgcttgttcagctgtcatcacgcaatccttgatggatggagcctgccgcttcttttcaggaagactcatggaacttatctgcatctcctgcacggacattctctcaggactctggaagacccttacaggcagtctcagcagtatctccaagatcatcgcgaagatcatctcaggtactgggctggtatcgtgaatcagattgaagagcgttgtgacatgaacgctttgctgaacgaacgcagtcggtacaagattcaactggcggactatgacaaagtggaggatcaacaacaattaactttaacagtccctgatgcttcctggctaagcaaattgcgccaaacatgctctgcgcaaggcattacattgcactctattctgcagtttgtttggcacgcggtattgcatgcttacggtggcggtactcatactgtcactggcactactatctcagggaggaacctgcctgtgagtgggatcgaacgatctgtgggtctctacataaatacgctcccactggtaattaatcagttggcctataagaataaaaccgtcttggaggctatccgtgatgtgcaggccattgtaaatggcatgaacagccggggaaatgtggaacttggccgtctacagaaaaacgagctgaagcatgggttatttgactcgctatttgtgctggagaattatccaatactggacaagtccgaggagatgcggcagaagagtgaattgaagtataccatcgaaggcaatattgaaaagctcgactatccccttgctgttatcgcgcgcgaggtcgacctaactgggggattcaccttcaccatctgctacgctcgagagcttttcgatgagattgttatatctgagttgctccaaatggtccgggacacgctcctgcaagtcgcgaagcatttagatgaccccgtccgcagcctagagtatctgtcatcagcgcaaatggctcaacttgacgcatggaatg

SEQ ID NO: 2022 - DNA, 3158 bp, Emericella nidulans
gacattgtaaatatgtagtgactgacatggctagacaattctcaatggcttgacaggacaagttcgccctggggagatggtgagccaccaacacccatgcccatcgcagcttaggatctaacgatatgtgctatatagctactggtccttggacgtcctggatcgggctgtacgtctttcctgcgtgtgctttccaacgaccgagaatccttcgatgaagtcaccggcgagacttggtacggatccatggaccataccgctgcaaagaaataccgccagcaaatcatgttcaacaccgaggacgacgtacatttccccacattgacagtaaatcggacgatgaagtttgcgctgcgaaacaaggtgccccgccagggggaagagggaccaggggagaaggagtttgttctgcgagagcgggatagtatcttgaattctctgggtatccttcacaccaagaagacgctggtcgggaatgaattcgtccgcggtgtatcaggaggcgagagaaagcgtgtgtcgctggcagaggtcatggctggacaagtatatcagcccacagtcacgcgcatggaagttcatactgactttgtacgatgtacagagtcctgttcagttctgggataaccccacacgcggtctagactcgaaaacagccgcagagtttgcgggaatgatccggagagaggcttatgaaaacgggaagacgatagtgtgcacaacctaccaagctggaaatgacatctatgacaagttcgacaaggtcctcgtccttgcagaagggctagttacctactatggtcctcggagtcaagcccgcagctattttgaggatttgggcttcgtgtttcctaagggcgccaatgtcgctgacttccttacttctgttactgttctcactgagcgtattgttgctccagggatggaagagaaggtcccaaatacccctcaagagttcgaagctcgctaccgtgcaagcgctatctaccaagaggcggtcgatgtaatcatccctccagaaaagctggcttctgaggaggaggatcttgcaacagcagttgctcgcgagaaggggaagggccatattccccggcctccgagtgtgtacacaactggcttgtgggcccaaatcatcgcttgcatgatcaggtcagttccctagtcattccagaagcccttgctgacaagtcagacaattccaaatcatggcaggcgacaagttctcccttatcatcaaactcgcctcctccataatccaggccctggtctgcgggagtctattctacaatctccagatggatagctcgtccatcttccttcgacctggcgctctattcttcccgtgtctctactacctccttgaatctatgtctgagactactagctctttcatgggacgtccaatcttctcccgtcacaagcgatttggcttctaccgaccgacggccttttgcatcgcgaatgcaatcactgatatccccattactatcctgcaagtctcttgcttttcgctgatcctctactttatgagtgcgctgcagatggaggccggaaagttcttcacgttttggatcatcatcatcgccaatacgctatgttgcatgcaaatgtttcgtgccgtgggggcgttgtgtaagagattcggcctggcgtcgcaattaacaggcctgatttcaactatcgggttcgtttatggaggtaagataccggagtgatacgcagcctctgtttagctagggctaacatgcaatcaggctatctcatcccattttctaaaatgcacccctggttccgttggattttctacttaaacccttgttcatacgcattcgaagcaatcatggccaacgaattcacaggcctcgagctacaatgtgtcgagccaaactacatcccttacggcccgggttactcggacacctcttcgtcaaaccgcggctgttccgcccaggaagcaaaggcgacttgatctcaggagccgcgtacatccgcgaacagtatagctacttgcccggttttatctggcgtagctttggtgtactcgtcgggctctgggtattctttatctttttgaccgccgtcgggtttgagaagctgaatagccagggtgggtcgtcggtcctgctgtataaacggggcagcaaccccagctgccagaatgagcggccagcgaccgcggcgaacagggagatggctcttgcacagtctggaaagcaatccatattcacctggaacaagctcgactatcatgttccgtttcatgggcagaaaaaacagttgcttgatcaggtgttcgggtttgtcaagcctgggaatttagtggctcttatgggctgcagcggtgcgggaaaaacaacgtgtgtatagagaatacatcattatttgctaggatactgaccatttaccaggctcttggatgttcttgcccagcgtaaagatattggtgaggttcgtggttctatcctcatcgacggacggccccaaggtatcagctttcaaagattaactgggtattgcgagcaaatggatgttcatgaggggacttcgactgtccgcgaagctctgattttttctgcattccttcgacagccatcaagtgtcccagaagaggagaagttggcttacgttgaccacattattgatcttcttgagctatatgatatccgcgatgctcttattggaagtaagcttttcatggattgaaaagctggaaaaacgttaacttgtacagctcctggcgctgggctcagcattgagcagcggaaacgggttacattgggtgtggagttggttgcgaaaccaacgctgctcttcttggatgaacccacctctggtctggacggacagtcagcatataatagttagtacgcttgataccacagtctcgtacgtgtgctaaccacggaagtcatccgcttcctgagaaaactagtagacggaggccaggctgtgctctgcactattcatcagccgtcagctgtgctctttgacgcatttgactcacttctcttgttggctaaagggggaagattggcatactttggcgagagtaggatcccttcccctacttatcgacccaaggctctaactagactagctggtaaggactccgagaaggtactagagtactttgctgggatttgaccaccatgtccgcc

SEQ ID NO: 2023 - DNA, 3004 bp, Emericella nidulans
agtgtcggcgatcaacggcggagaaacactcgcacacttggggttatgattctcgcatgcagggcttgaacgaagagtggcaattttcagcaaaagaaaagaaatttcccccagtcggggaagcgcatccagcatctaatcaactccatcaaatccctagcttgactgacgtcaagtatgatcagtggtcaagagttactggacaggctcgtgattgaccatatgctgcgatctggatactcggagagtgcccagcggcttgccagagcaaagaacatagaggagcttgtggatcttaacgtctttgtacagtgtcagcggatcgccgagagtctccgcaatggtgaaactaaggatgctctacagtggtgtaacgagaataaagctgccttaaagaagagtcaagtaagtaagagccaagctctgctctaattcaaccatgacctaatatggtgtatgcagtacaatttggagttcgagttacgactgcaacagtacattgagatgatcagaacgagggacagggcgaaattcgtggatgcaatggtgcatgcaagaaggtacctggcaccgtatgacgaaactcaatcagcggagattcgtcgagctgccggccttcttgcctttcccccgaacacaagagccgaaccctacaaggtattttagcccggtccccaagaaaacctaatctaatgtgcaatagtcaatgtatgcctccgaacggtgggtgtacctctctgaactatttattcgcacgcatcatgagctcctctcattgccttctcggccattgatgcatattgcgttatcagccggcctatctgccctaaagacccctgcgtgtcattcagctaacacctcttcgagctcaaactctcattcgaccgccacatctgtatgtcctatatgctcaacggagttgaatgagcttgctcgaaatctgccgtacgccaatcatacgaagagttccgtggaaaacgacccagtagtcttgcctaatggcagggtatacggtttacatcgtttgttagacatgagcaagaagctcagctccctcgaggcaggcaaagtcagagatcccacaaccggtgagatcttcaatgagagcgaattgaagaaggtgtacataatgtaacagccaacatgacaacgaacgttgttctcggattacctcaaggcattataggaatattcgggacaggacattgcgggcatcgttcatctgttatgcatacatgtatttccataaattaatcactatctgattcatccatatctgttgacctcttcttcctctttccggtggctccgagttgggggtgatcatccgtcttgacctcaaacacgtacatcctcgccttattatttttacctcgccatccccctcttgcacgggctggtccttcaatctccccaagcgtccgcgcatgcgagtagccgcggtagcacgcccaggggaatttgaagctcgtcacgacccttaatccagcgtgtcgtgcgaggtccctaatattccatagggtgtaaggttccccttcaaacaacgtaactaatacctggccgggctccgtcctacgctcgtctttcgccttgacaatgccgttctcttcatcataatcgccatcactttcctcagattcatcttccacatctgtctcgaactcccaatcgtcatccacctcagcatcatcgccgagctcctcaggccgctctgccagtaacggaacacacgccttgaagaatgcaacaagtagctcctgattcgccctaacttgccgattcacatctgtcgaaaggccacctacatgcgggaaattgaaacagatcatgtcccacggcccacccttttccttgcccgtacccttgcccttattgctcgcggtatcttcagtagctttcgcagacctagtacttctcttattcccatcgtgtttcttccagacaggttccttccgctcttgcctcgaaaacccagttcggacgtccctcgcgcctcccgtcgcagaaccaagtttcttagcatcgacggagaacagcacttttgggcctattaaactctgaggattggcggcatcattgtcctaaccttcccgatttcagctggttcttagtctttaagctaatgatctcggcaattttcttctccgcttgtgggtatttagcgaagagtgtttcttgggagtcatagcatgttgctagtaggtgtttgcagcggtggtacgtggctagggagtgcgcgaaggagaagtcgcctggacgtggtttgtgcgttagtatcaccgtacttgagacgtcttaggtgggatataggaacgatatataagggttcttgataaggagccgcgtcaggtctaggctgcttagggacacgaagactagacaagcgtgcgtcgggttgatgagtatacatcaatcttaagcttagggcgaatcggccgcgctggtgtagtttcgcagaactcttaggtgcttgcttgcgggctcctgagtccattcgtgtatacttcttggactatctcagacagccagaatcagggaagcgtgaacttaccctctccaactaatagaatacgatcctttctgcgaaacggcacaattggccttgtgtgttgcttctgttggtgcttttcattcttccgcggcggcgcaatattcttttcattattctccttggtcacactgtttttgtagttgttcttcgtcgagagcttagcaaaggagctcatcttgcgatgcttcctgcccgtgccatggctcgtattcggaccggagtgcgcattctggtgttgatgcagggctcgagctcttttcaatctcgccatgcgtgctagttgctctcttccgtatgtggaaacaaagtgtctggtatgaaatggatagggtggacaataccaaggtaagacggtgtaattgttgggagaaaggtggaatctaatcgtggttgatataaaatttaaacaaattggttttcaggacgggcgacaacgcaaatatatttgttaag

SEQ ID NO: 2024 - DNA, 2728 bp, Emericella nidulans
cagaagtggagccagaagatttctttggcacgatttagggcagtattagtagaagaatacggcgattgtgtgcttaattataatgatacgatcgaaggccttaggcaacagtggtcaggtgcagaagtatatattccggtcaaaccaagagtcattgtggatatcgcgactgcagatagagttttatgacttgatatgttgaatggagatggaagcttagcaaattcaccgtgctaattagttcaccttactaccatcggatagttcattctgttgattcgcaatatttgatggaagtcaatatacaaaatgacataagttagtaatattagagataaggtggaattagatagccttatgaaagtattgccacccacagggtgcttggtcgagaccagatcacgggcagcccaacacgtgatgtccattgaacacacacctcagttgcctcactccagcctttgcacggctcactcgcggcaggctccaagtcgctggaattgccagccatacaggtctacgaggttgtgactgagttaaaattacaatattcttgtttcccaagttcttgggtaagtcttgctggtttcgatcgacaggccacgtttctggggcgctggtccactcgtcttcagacatacacctgctgtctgctataaccacgcacgagataatcttgggttcgcatcagtctcttgggcactgcttccacgcaccgtttaagtcgaaccctcaagagattgatttgtgccctatccttatatcacaatcgggtgatggtccttcgatgatgttgacgcctgctctagcagttcttctacacgagaggtcgttctgagtcgtgtcgccatggcggaccccaccgatctgaatctcgacgcgcctagcgatcttcaagacatcccggatatgtcaatgcagcttgtgcctccgccggaagggacatacccagacaagtaagtgccttttcttatttcatcgatgctcatagctagaaaataatcgctcacatgagtggtggtcagaacatcgcttcttgcctctgtgcaagcgcatgcaaaagcccatggatataacgtggtggttaaatcgtctagtacaccaactgaaaagaagccggggcgtacagccaaagtgtggttgcggtgtgaccgaggcgggcactaccggccgcgcaatggccttactgaagagacgaggaaacggcggcgcacgtcccgtctgatggactgtccgtttatgctggttgcagctggaactcctggcatttggacgctgacagtcttgaacggcacacacaatcatggtccgattgttgagaagccacgacaagttcctcatcacaaagttcgaaaaggccagatcgctgcggttccttatgactggccgcacgatgcaacgctcacgccgtatacaactgcactggttatcattgatatgcaaaaagactgtcagcaactgcccatgccataacttccttgatgtgtctgaccatctcgcagtttgtgcgccaggtggatatatggagtttcaaggctatgacatatcacctgcacgagaactgataccaaagttacagcagctactgaacacatttaggtcagccgggtttccagtgtatcatacccgcgaaggtgattgatcccagagtttgctcgtgtcccaatctgacctcggccaggccaccgacctgatctgtcaacactttcaagccgagaaacatatcgatcacagaataattcatccggacttggaattggctcgcccggaccattaggtcgtcttctgattcgtggtgaactgggccatgacaccgttgacgaactgtatcctctccccggcgaaccggtaattgacaaacccggccgtggtgcctttgcgtacacggactttgagcttctcctccgaaacaaaggtatcaagaaccttgtcctcgcgggcgtgacgacggacgtatgcgtgtccacgacgatgcgcgaggccaatgaccggggattcgattgtgttatccttgaagatggtactgcagccagtgagccggcccttcacgtaagcacgatagaatcggtgaaaatggagggtggaatcttcggtgcagttgccaagctggaggatgtaatgcacgcggtggaaaacttcaaggccgtcactgtgaagaagctggctcctcagatgacgtctaattagcattggctaaatacttcccattcttcaagcagtttagcgttcctctgctcgagttatagaatgaacattattaggagggcaataaagctgaaacagcataacatagagcacccaacataacgcctcgtcagaagacataacagacaggaaaaaagaatggtttataaccacttccttcccgcagccgataccttcgacctgaaaaccgggcttcgaatttccatcccccttctataaaacgggctcatcaccgtcttcacatacgcctcatagacttccgtcataaactgcctacccgcctcctccgtctgcggcgccgtcggattcgccgcgatagaactgctcgacgttcgtcctgacgaacccacccctgaccctccgaagagccctgatcctcccatccccatcgcggaggaaccaaggctcattgtactcgacccgagtcccccactgccaccacaggcaccacaagggggtagatttggctgaggtggtagaggtaatggcaggagacttgtgccggaaggcgttagaaaagcgg

SEQ ID NO: 2025 - DNA, 1758 bp, Emericella nidulans
attattacaccatgttctccagaaacaagaagtatgggacagtgccccaatatattatacagagcaatgtatacatgcgggtagaaagagcacggggaatctggatgtataaaggaagaaaaaaaactccaaaatgctaccacgtacttcggttgtactgctgctcctgatgatagttgcggagttccctctcacgctgtgccgccatccgacgctttgcttgcatcatctgttccacttcattggggcgtccctgaaaccgctgcgaagcataaaagccctgcatactgggggtcgggtgcatccttgcgccgtcaaagtcgctaatcgaatgatggcgctgagccggattgaccatgcgcgggtctgcgaattgttgttcagaattgtgccttgctgaagaaggtggtcgagaatccgtaccgtactcaggatggggacggcccaccatcatgggcatcgaatccctccgcggtgccgcccaaagtttcccactcttaacaaggttatcaatggcgcgatcgacctctgcgacggaaagtcagcaatttgcctcattgtgtttcaaggacaaaatacaccctcgcggcttcaatcttgggaaactacaatgccacatctctggcgtaccgcgggtggaaatgaaattgggtgtcgaaaaaagacaaaaggaactcgtcgtgtgcgtaccgtcaaactgagaggagaaagcggggacatcgtcacgctgggagacggagctggatcctgatcacacatgggtaagtttctgatcccgtatcgcaaaaagtccaaccgcggtgtgacagatcgattcatacctgatcgcgacggaggcacaggctgctcccaggatgcctgacgagaagtcggggcctgccagccttggggttcgtagtacgccattttatcgataggaggctttgaagattgtacgcggaggaacggcaagggtaactgattcacttgggaaaaggtcgaaccctgttctatgctgcgaacgaaactgtaagctttcgaacaagacaataaacgtggtcaatttcaaccgagagtcaaaagccggtcagatgctagtctgtcgagtactgcagcgaccgataacacaggcagttctcggagtccctggactatcccgttgagagtatgtgaaactgatttttcacctccgctcgggtgccagccaagagagttcgatggcccaagggaatccgagtatagcccaaaaacaaccgactccggtacaaaaaagaaagagaatagacttgacggctcggtttgatcggaccgagaggaaaaagcactgcggtgaagggggaggacttttttggacgggtggacggcagcttacaagaaaaggagtgattgtccccaagaaaattccaggcggctctaccacgagcgaacgaggcagaaggagcgacaaaaaggtagcaaaatctcaatcccaaggcacgacagacaaatgagtctgacgtggaagagcgaaaaagggagagaaagaggtgggggaaaagagaataagacgggggggtggggagaggaagaggaaaagagtcgggtaggagaggtgcgacggtaaaaggcaagaaaaggatagggagatcgggtgtgaggggagccagcagggagcgaagagcgaagagggggaacgagaagtggatattattttgattattattacttctgaccggaaataacgaactggtaatagcgatacataattatcagactttcccagttggcgacttgacagct

SEQ ID NO: 2026 - DNA, 2641 bp, Emericella nidulans
atatctcagaggtgaatactaagtcaagttggtcatgcatgctcaggcttcctgttgattctagttcaccaaacaatcttatagacgcatccgttacccatccagctaagcacgacacaggtctaaatttcttattactttttcaaaaaatgccagcttcaactccaaatcccgttcaagtccatcgcctgtctgaaagttatctcgaagacatttataaacagcgtccttaaagtgcgtgcccgttcgaaatcccaggttagcaatttcgcgtcgagtcagcctggtacaaaaaaccctgctggtcaaatgtctgtcttcctgcttcattttatcgaagtatgaattaataggtcgccacgttccaatctcgaaaaggaccataccaatgctgtaaatgtcgtatagcagcctgtgtcctggcgtatcctgtccttaataactaggatgctggtaaagctcaaggtcgtcggtgcgggactgtcggccagatatgcctttttcttgaggtcaagaaaaagcaaagcccatgatatgtgggtcgctaacagaccaggaagcgccatccgggaggaagtatactatgtggctgctaatgctcttgagatgccagcccaattggaagaactgaagaaatccgcgcgcaattatttgcgcgtgctcgaatctttcccccaaagatggtaggaatcgtttgaactgttccatcgaggggtaatcgtgcaatgatacaggattatggtcgccgcctgaagggctcaacggcaagctgaaggcgaagccaatgcgagggggctgaaggtgtctttgatcaacaaggccaacacattcaaaaaatcaggtactgcgttttgtgtttgtgtagtctttgagtatctgcacaagcctgttcgcttgttcgtaacgggccttgcccatctctcctgcggccgcgctattcagaagtactcgccattcgatgagagtttgcttgccacgtgctcgactaagcacctgtcagaatctgaagcccgaataatatcgtcgggcagggcaaatatgttggtagtagccgggtacgtgttgccagttacagtcggagcgacagtttccatatcctcctccaggcggaggcgggctaatcgtgccggtacagctatagactcgtaggagcctaacgtggcagtctcaatagcagtcagtgcctcgcggcgatggggccagcttgttcccaatatggcgagcttcattgcggccatttcgccctttggttacgcaccgacaacagaacgaatttcctgcacgcccaaatattcacaggctttatgtttatgggcgcagccatttccctctggctcgtaagagcttggaagatatcagagttgcaaaagactggtgcgggtaaacctcccctcgaaagggaagccgtgatcagggacgatgatgcgtaagggacaggacgtttagcggagattttattgtggcgagcaaggcatgaactactaagggattgatcatggtaaaggtataaacatacaagcaacttgataagtcatccaatcttaagtcttaataaaggcatttccggaagtggctagccagacgctccgggaaatatatagtgggactttcaaacaataggattaaaagtcaacagataaatttgttccggaataagggaccagaaacggactaggcaatgtagatggtgatattctgatataatagtcaaaagcgtcagagtgcagatgtgcggggaagaatcttacgcagcgtgtaatatattccttaaatcttaccctaacactaccctcctgcatgagtgtaaggcagatttagaattgtttgctgaagtggcaccacttatttcgggcaattccaagccagtactatatttatatattaataaaatagacctggctgccttgttatttaaaagtgataccattctaagtagtgggtgagttcagctaagatttgtaacgattaagcaggcccctatatccgttaaagtctactttttcggcagcgccctcgcttgttaccaaataaggaagtaagtttgtcgtgatttttagattcctgaaggagtatggcgccgccgccatgtacaggaagccatcaaaagtacagtcacattgcgatttcacctaccccgcttggaagtagtgacgtggctgtagatggcgaatatcccttgatttctgtacataatgatgccgcgatacatttatctcgttgttttaggtacgcctggaggctcagaacaatagcatcggatttgtttttgagctctattaaatcctggggtgaggatcctccaccttgcaggcgtcctgcgagagctattcttctgtcaaaggtcaagtttcaccgatttagagtctgactctcctcgcgttgctgcggactccgattgttggtttcttcgatatacgatgtcaccaaaaaactattatgcgatctacaaaggccgcgtagaccgacctactatagtgtcttcttggtatgtaataccaacctatgaggcaaatgtgttaatcatgattcccagggctcaggcgcaccctagggttaaggaatataacggcgcggatcatgagggttttgatactcttgaagaagcgcgcaactccatgcagataaggggtttcacgagtat

SEQ ID NO: 2027 - DNA, 1525 bp, Emericella nidulans
attctgtttgggttgagcgcctttggtacatcccgtccgtttctaccaatacataagggcaaggctgcccagcttgatcaattagtggactgatcatgcttcgaggtacaagatgctatgcagaggagatgagggacaattcgattgcatacctactcatcctggcgcacttatgcagtctgctggtacttgcaaaagaggcccctgtcacaggacggccttttcgaccaaacaagactgttcttaggccggatcagaccaagcatccgttagatactcagacgtccaaggtgcagataggaagtcgatggattggagatgtcagcagcataacttgaatcttggggctcctgcgcgtctatggacgccaggaacctaagtatacgaaagcaatgaattatccatgtgccgcatcgcaaccacccacctttcctcttcgaatctgctgatggaagtcagtcacacctcaactgggacgggctgggttggggtgtccgcttcacctcttaaggcccagtgccgacatgaccagcaacctaccgtctatctctacgatctacctacaaagttatgcaaacccagaagtatgtggtaggtcaactcgagaaggcctttgtctgacttgtcatcctttccagcgtgggttatgacactaaggcactagtctattgctatgtcttggttaccctgatgatgtcaagttcgactcgttggttacagctgcctcgaaagtggaccggtaggaaagatgccaaatggtgaagtttcagatactaggtagcacaatgcagccatgtccgatcatgtgatatgtggatgacgaggttcacttcgaagctgaaatgcattgggactctcgaattctacgtgggatcgtctatgaaaattgtggcaaattggcggggatttagggcttgttcttggatgagaggaaagtcaaacaaaagagagtaggtaggatcatagtccccgctcacatctattagcgaaggcaagttgcaggcgcaaaaaaggaagaggaatggatgatgactctacatcatttgtttcattgagtcaggtcgtacatatcattactccgtactacattaagatcttgtagtagcaagaccaaagtcttccgataccagtatccgtaccagtacagatcaaaagccagagtggaaattcggaataagaagaacagagaaagaattaagaaaagagtgaagtcacacctaaacagagcaggatatcgcttcacttcactctattgcacttgcaccactctgactccaaatcagaaaagaacgaagggcatagctcaatgaattcatttcggctgggactcctcatgcacggcaacagcctccgctctcttctcctcatcgacatcaaagccagtctgctccagcatcgcggcacgaccccgttcattcttcgtcttccaagccggcgttccaatgtacttgatcccagccggaatcgtgaaaatgccctctacatcttcgagggtcttacctgccgtctcggggaacatacgaag

SEQ ID NO: 2028 - DNA, 2318 bp, Emericella nidulans
gtcgtttggaaactggtgtctggcaatcgctgtgccagtgattcaaatgcgacgagtacccaaattataccgttccattgtgcgagctctccttcagttgcgggtcaaggcgctaaaaacagacaagtgttaacaaccgtgagtcgctacccatatatacctaatttgtcgagccatctgcttacgtccactccgcatgtcacgaagactctctcatatagtcaccgcccgtgagttcataatatgtcatgcctgtggaccgagaagttggggtctgcgggtcgatcgtcaggtttggactaagggtcagcgtacgagtaaccgggaagagtggatcgcgtaggaagggactgttttcaagcgagtcgatcttatactcaagcggcctccctgtgggttcgaaataaatttggaattcaccaaaaagtcgatgataatcaagcgtcaatgtaagagcattaacagaactatcgatatttggtccatcaagacggtggctgagcccagggtcaaacatgtctaagatgcgaaacacattcatctttgactcgctcttggaacggttagtaacaattaaaggcaattgccaacgacgtacgcaccaattctgattctccctgcgctaacgttgtcaagctgtgagggagaatgtgcgcaacttcgagatgctggaatccaccccgtgattcattgctcagaaggtttccgtcgtcgtctttagaattatccccattctcttggaagcgcttccgggcctcgacgatatcgaatttgcgggatatcacacaccggtggtgatcacgtacaagacaggccttccgtaagatagagatgcgctgtttcgtgcccacttgtgtaggtgtttgactcaaggacaatgctgtaggtgttatttgtggtgttttgacagatgaagccctgactaatgggtcccattagcaaaccaatgattttgaatggcagcgggcaaacatacgtggaagaaggaagttgtcgacaatatactcagcaaagttctcaagagcgccctttatatgcatccttctgcttgggtccatacttcggtttccagcaaaggactcgagataagacaggaccgaacccatatcagtgtctccagcttctccatcagcgttgagaatctcatagatatataagaaaaggaaccttagaaacgtgtctgtggatgtcactcgtttagacatctcctcaatgagctttgctggcttgtaacccctctgaacgctttgtccgaggccataatcctgtatgaagagatgcagaagcgcataggccttttgtctttgctgtggagttaagagaaaggctggagagaaatccaacacagtctctaaggatgattgatgtcgatgctgcgccatggtggtaggttacgataaggtcagagtcgcaaggggactgactaatctatgattaagagattatcacgtgcggcaggcccaaaaccgcttcggaattagattcatccggtatgataaaccaatccaatcattcctcctgcttacgaataaaattccaacaagcaccgtgtgcaacttcggatagggaaaagcggctgcgcagtgtaatcttccttgcagatcgacattcaacccagtctcctcagcaatcctcacgatgtagccggcaagattcgactcatcatcgtcggcggcggcttgactgttttcacagctgccgccaagctaactgaggacccaaaagtcaaggtccttatcattgagaagggcttctacgaatctagtgacggcccaattatcgaggatccaaccaagtatagcaagatcttcagaaccagcgctgaccagaacttttttaccgtgccgcttatcaacaaccgcacagagctcatcaaatctgagaaaggccccggaggatccacactggttagtggcaattcatggacatgccctgataaggcccaggttgattttgggagaaggtctttggcatggacgggtggaattgggatagcctgttccagtatatgaacaagggtgaacgatcccgtcctcccattgaggctcagattgccactggccattcctttaattcctcgtgtcacggattaaatgggaccattcacacagggtaccgtgatactggcgagccgtggtctccgctcatgaacgcgttgatgacaactgtttccgagcagggtattcacacgcagatcgactttcactgtgatcgacctcgtggcgtttctatgattcacaacaatgttttggaaaaccaagtgcgcgcggatgcagcccgcgaatggcttcttcccaactatcaacgacccaacctaa

SEQ ID NO: 2029 - DNA, 2819 bp, Emericella nidulans
agatcaggggataatgccctgaccaattggccagggagaattaaatgtcatcagaacaccggtatcgagttcgaaacccgatttttacccttgtggccggtagatggttggcattgaaattcaaagcggtaaaacgtggccttgacgactggttactttgaaagttgcgagttcaactgttcttacgacaaggtagagtcgtggcgttagtgggcttgggcatacgaagcatcactgtcaggtttgcaaagctctagcatctaaagagtcgaaagcttcattacgtcggccggcgagctcttggcttagtggactattttggattctatcacggatctagttgagttgcactcagctttccttcaaagcgtggaaggagggctgcagcgttcagcccggctcttcttgctctcgaattgccagcgtcaatccttccaaaccatcaaagtcaggtataaagttcatttcataacaccaccatggatgctcctcgtacctcacgttttctggacccgacgtcagccgtggccgcaatcacgaagcacaaagcagaggccattcggctagcacgagagcaaggtgctgccgtccgtgagatgtgtcgccgggcgaagacagagacgcccccgtatgagttcgaagagctcattggtaagggcgcctacggtcgtgtgtacaaaggccaccagcttccgtctcgagaagtcgttgctatcaaggttcttgatatcgactcattagattataaatcggtgcgcgatttcaaggatgagtcgattaaggatttcatacatgaaacgaaggtgatgaagcaggtcaaggatgctggggcgaagaatatcaatgaaatcatagaggcggtgtctattcattcacagctctggttggtttgcgagtattgcccaggtggtagtgttaggactttggtaggttgctcaaacttggacttgtgaactgttgctgaatgttcagatgcgagcaactggtgatcgactcgaggagaggtttgctatcccggtagctcgtgagctggctgctggattacgtgctatacacgatgcgggcatcatccatagagatattaaaggtgtaaacgctatgttacatgatttggtgtaaactcttgctaactcagatactagctgccaatgtccttattcatgaggaaggaagactacaaatatgtgactttggtgttgctggtgttctccagtcacaaatggataaacgatcgacctggatcggtacaccccactggatgcctccagaaatgttcactgccaagcaggatcatcagtacagtagcgaggtacgtacattgatactcgtcatatattgtcactgacaacctcaggttgacgtttgggcatacggttgtacactgtttgaacttgctacaggaaacccgccaaacgcaaatcttcgagagagaatgcagattggcagacagttgaacagaaaaacaccacaactagcagatggcggtgaataccctgagggtttgagagatctagtagcatatgctttgaactcagatccggttacccgaccatcaatggcggatattttattacacccctatattgcgaattccgaggaagagtacccaacatcatccctgagcgagctcgtccgcatatactaccaatggtcccagcgcgggggccaacgcatttctctatttcatcctggcggagctgcagcagcggaagtgccagatgttgaatcagatattgatgaggattggaatttcagcacgacggatgactttgagagaagattctccgttattgaccttgatcaattggcggcttcactagctgagctagagcaggagatcaaggacacgaccggtcagccacagcaggaaccggccgacgagccggcagagactgagatgacagagcaagacaaagccaattttgacgaaagagtgcgccgaggtgctgcagccatggaaggcctctttgacgaagaaaagcccagctacaaatacgagacgaaaaacgactttgtgcctattgagcaaaaggcccctgtatctgatcttcctcttcgcaccgacactgaccgctcctcggtcacatcgacattcatcgatattgacattccctcctttgattcttcccactatgccgctggcgccacaaccgcccagccattccagcttgctgatgcagataccattcgcgctaatagatctagcggacgaaaccgcagctttaacgaaggccggtcacggtcctcgagtagtgaagtgcgaagcagcgtggatatacaagaaacttttcaacctcgcaccgggccgcggccacccaccatggactggaaattcccatccttcatgacggctcccacggaagagccagagtcagagtccgtttcggaggttgactcgggtgcagaggctgggtctgaatccgagcctgaacgtattgcgcgcgactctctaacgcagcccctgacattcgccccggccgaaaaacgagccacaatggagtggacgttccctgtgatgaccacatctacagacgacgaccacgttagtcctcgaaacagttcttccgcagaagaagacggggagcccagccgccatgacacgctcaaggccagcgatgcaaggttcaccagtatcggtgagaccgggcgacagtgatagggacatctcccgcccgtcgacatatgcatcggttcagtcgaatgtttctgcaagctcagatacaggcgacgtcccctttcgcttcgcccgccctccctcgcctccggagggtagcacacaatacaagcagcagcaactagttcctagtctacgagtaccc

SEQ ID NO: 2030 - DNA, 587 bp, Emericella nidulans
ggttctttcgataaacaagatgacacccctgtcactatatccgattttggggcgcaaagcctgatcatcgctgcaattcatcgtcattttcctgatgatgatatcgttggcgaggaagactcaaagactctccgtgccgagccggaactgctcgaacgcacctgggaccttgtctcgtctactcgacttgaggatgatgagagtgagaaactcctctcggcaccgagctcgaaggacgagatgcttcacctgattgatctaggtgcgcaggggagctgcaagcccaaaggccggacgtgggtccttgacccggtcgacggaaccgcaacctttatgcgtggtcagcagtatgccgtgtgcctgggccttgtggaggacgggaagcagatcattggggttacggggtgtccgaacctcaacctcgagtttggcggtatccaggaggaccttgcggacgtggcagggcgcgggttgatggtgcttcgctgtcgccggtgaaggcgcgtggacaaggccgatgggaggcgggtccctcgtgcctgcgacaaagattcagccggtcgagcagattacggaccctaaagata

SEQ ID NO: 2031 - DNA, 3249 bp, Emericella nidulans
  unsure (1)..(3249): unsure at all n locations
gtagggcttattactatagaacgggacagtcatagccaaagcagaatataaaacggccgggtattttcatgaaacgagcacacgagcaggcgagcagacgagcagacaacagaccgctggagtctggagaaatactgcgagagggccggagcattgcaatggcagagtggcgcgaacactgtgctttgctcgactccacggtcgcgctcacaccacgagctcccattctgcaatgtacgcccacgccatccccacccggccgacctgtcgctgatactcctccaccgtcactccacgtgcatcttccaagtcgccaaacttcgtcaataccgccagctgcactttctgccccggcgcgcccagcgttcgcgggtccaagatgtcgacataccatacatcgcctccgccgccggacccagaccctcgccagtgtgtcaacgggagccggtcgtcttgcctaccgtccaagccatggatcatgagcaagaacaaccccggcttagcacgactgtgtcgttccagcgaccagtgctcgcagatcaggttaaactggaaacgcatgggtcccggctcccgaatcgagatccgggccgcagccggccggaacgaccggtcgccgatactgtgtttctttgcgtcgccaaagaccatcggctgcgcggccccaagaggtgagttcgggttccccagaatgtactttttctaggtgatctcggtccggccgacgtggcggtagaattgcgagcggtccttggggaaatgtttgagcccgaactcgtcgttcgtatcggtgaacattgtgggcgtgaagctgcggacgtacggcatgtctggcccttggacgtgtccggcaccccagcacgggtcgatcagtttccactgcccgttgtcgatgcggactacgttccaggcgtgtccactgggagagtagggtgggagaggtgcgccgggcgccgggncggcgtanccgtagcccttgccgtgacaagagaccaccttggcttctaggcccgcatgagtagctagcgtagcanatagtttcgcgtacccctcgcatacggccagtcctgaggcaagagtgctgtcaggcgtagctggctttacattattattgtagaacgacactgtatcgtagtctatgttatgatgcagccatgtaaagatggcccgagccttgtcagtggccgaaataaagggcgtggtgagttccctggctagccacccaagatcgtgggtcggcagcgactgtctcggataccgcgcggcatgtgcgtcaggcgcagagaagtcgcgacatttcaagcacgccgctgcggccgcaggcggcgcctcgtttgatacagcaatgcgtggctttgtcacctggatcgcagagaggtctggacgagaccccaaaggcactggcggtggtgcaccggcaggctctgtggtagtgcccgatgtcttcttgttcagtcctccaagccctgcccctctgatcttgtccaatgcagctcccgatggaggcggtggagggacccgtctaccctgagtccgcccgcttgtctcatcagctgggggactgggagacttgtcacgcctctgaggcagtgttggaaccgaccgcggctgaacactgctctccgtcgaaacggtcaacacaccctggccggaagaccgacgaggcggaagcgtcggtcgcggaggcggcaaccgcccattgctccccgatgtggtaggtttcggcctcgatggcgatacaacggactgcgtgctggtgttcgtgctcgttcgcttcggcggcaacgggggaagctctccaacgccccatggcggcgccttcacgaccgaccctggtgttgtagctctagtgctccccgttgaccttcctgtgctcgtagatgtcgatcgagacgcatcagacgttaccgagtcgatagacgctgcagacggtctcgaggtggacagcgatggggcgagttggctcgagcttttgcgggcgggcagcggtgggggctttttttgctgttgcctagaggtgggcggcggagtcgcgatgccgtccgatgttgagacgcgctgcgaaacattggacaccagagactctcctcctaccgatggtggcggtcggatactataaggagggggagggctgctgacaccgtttgactgtgaaggagttggagctggacggagagcaaaggcggtcggctgcgatcccgagagcggcgatcccgctgcctcagaggtaccggtttgtgcctgcttcagggcccggatgcggtcttggatggagagaacctgggtttcttcagccatactgcactcgattgttgttatcaatttccagtcgggagagactgcaatcgatcgatcgtttccagttcaagagcgaccaagatcggacgtggcctggtgaggctcaaaccgaatggggcgcttggcgggagaggggcgctatcagagcctttacggcattcaacgccatacggaggagagaaggagagtaaggaaaggaaaacaaaaaaaagaaagataacgaaagataaacgggcgaggtagggatataagagatgcagtgcagtgttggccccagctcgaaaagattggcagcctctgtaggaatgcaagaaacaaggctgagacaacgaccgagcctggccctgaaacgaatcgaaatcggttgcctcgtgatttgtgcctgggttttaaggtgtcaaaagtccgtctgtcaggcatcgacaggcgcccatttccggagatgcttaaagcatactcactactactccttgactgcatccagcccagatcaccttccagtgacacatcagctttttaaagaaaaccgccgtccattatgatctaaagcgctagttctatcgagttcacaacataataggccagtaaaaatgccacccccacttgaagctatcacgacatcgcgggcaaatcagtgcaatcagtacagtacccgttgaaaaaagaccctgccacctctacagcctcaatgccagcaatagcatcctagtcatcttacaatggcgctctggaaagaccagacttctcagatacagaatgaagtcgacgaggcgtcgcccggctccaaccatgactacgaccacgacccgttaaccgcaccgctgaagcgcaagctacactctcggcatctgcagatgattgctattggaggtatgctcagtcactgataacattcagtcagaaaaaagactaaagagaattaagaaatcatcgggcccggtttattggtgt

SEQ ID NO: 2032 - DNA, 5300 bp, Emericella nidulans
ctctccgttattattattgccgttgttctggacgttttgcgacaaatcctctttaaaaatcccaatgattcttttgtcgtcttccactggttcccgtttattgggagcaccattagctacggcattgacccgtacaagttttttttcaactgccgcgcacaggtatgttatatctccattcgattgacaagctctatccctgactactgtggctcatatttagtatggagatattatcacgttcgtccttctgggaaagaagactaccgtttatctcggtactaagggcaatgactttatcctgaacggaaagctaaagatgtgtgtgccgaggaagtctattctcccctgacaacccctgtatttgggcgtcacgtcgtctatgattgtcccaatgcgaaactcatggagcaaaagaaggtgaatccccattcgcttgttaggtttcccgtggaatctctatctgataaatttgcagttcgtcaagtacggccttacctcagatgctctccgttcctacgtccagttgatcactgcagaagttgaagactttgctcagaaatcatcagtcttccagaacgcgaagggtgtcttcgacgtatcgagaacgattgccgagatcacgatttacactgcttcacgctcgctccagggaaaggaggtacgtgacaagtttgactcgacatttgcggagttgtatcatgatcttgatatgggctttgctcccatcaacttcatgctcccttacgcgccccttcctcacaaccggaaacgtgacgcggcccagaggaaaatggccgaaacctatatggagatcatcaaagagcgtcgcaaatctggcgagaaaaaagattctgaggacatggtttggaacctcatgtcttgcgtttacaagaacggaactccgttgtccgacgaagaaattgcccacatgatgatcgcacttctgatggctggacaacattcatcttcctctaccctttcatggattctgttgcatctcgcgaggcaccctgagattgtggaggagttgtatcaggaacaactcaaagttttgggatctgatatgcatatgacctacgacgacctccagaagctggagcttcattccaagatcattaaagagacattgcgcatacatgcacctattcactcgatcatcagggcagtcaaaagtcctatgcccgtacctggaacctcatacgttatcccaacgtcgcacaatgtcctttcctcgcctggtgtaactgctaggtccgatgagttttttccgaacccattgaaatgggatcctcaccgctgggacagcaatcctattgccaactcgaccgaggatgaggagaagatcgactatggctatggtctggtcagcaagggtaccaacagcccttatcttccatttggcgctgggagacatagatgcattggcgagcaatttgcttatgtccaattgattaccgtcaccgcagctcttgtgcggctgtttaagtttgacactgtgtccgagtcggacaaatcatccgtcccggagacggattactcggtaagtggtcgaaaattcaagtagcgatggtctagtctaacctaaacacagtctctgttctcaagacctgctggtaaatgcttggtgcaatatgagaagcgcaacgtcacaaccaaagcatgaattgatacgctctaatggatatatgcttttcaagccacataaccagtttaaagggggcttaatgataacagcgtaatattgacatccccaacggacaagactggttgcaccaaacacttcattcattgtacattatgctgattttctaaactcaacttataaatcattaattctgcctacatttcatattgaaacttattaatatacgacttgaacttcacctttgattccgtgaaaagtcacagtgtctaagcttccccccccaaccccccccaaaaaaggtgcagtttatgcgagcattgatttctcttgggttggttcagagtgatggtacagtaaacaagctataatacaaagagactataggagatacatagccggatatttcatgcacgtcctttcctttcttcagctctcttcttagccctgatttcagcccgtcttctctcaccaccatcaaccttatgtccctttttatcttcccacatcccttcttgaactctgattatagctgcgctgccattggtacccgctattggctgtaggtaaggacccctgatataaactccattgtggattttcatgcccttgtacctcttgagctccttcgaagggtcatgtttgtattcggtggcatccggcggcagattcacgattactcgcttcattcctggagtcagagtagccgaataattcataagatccacagagggggtatctttagtaggtgccatagggacctccataacccgtaactgtgcagcgccgtccaccacgtgctcgaggtctccgccaggtccgtaccagccctttgtgaactttgagcgtttccggatcaggtagcgtcgttgttctgcagattcaattcctgcatctcgagggtcctcagatgacattgagaataatttgtcccaggaagggaatttgctggcatgttttgacatatcgcggccgattagtttgaggaaggtttcgacatttggaacgaaccggtgtcggtagaggaagaggcttctggcgcggggatttaggttcagtgtgaatagctcgtaagcattgctgtgtggattgaaatgacctgaacgtccgaaaaatcgagaatggattgcgtagtgccatggtatggcgagaacgaaaggaggctgaaatgagattacttgaatgatgcgttcgagacaggggcacgaattattggcaaacgatttatttttaggtgccgaagcccagagcacttatcaagatttgcccgtcagtcttgttatgcttggatagatattgttatgatgcgcagcgaaatttcggcaatgcctgctcccctggaataatgaaaatccggcgctccgtatctcttcagatcatcccaaccatttttctgagactgtcgaattgctcttaccttacgggaaagatatttgtatcctgtatatccttcaagttttcttggtcgcatcggaatactcgggggtgggtgttgactatctatcagttctagctcattcaagctacagagcaatggcggtttcgccgatgatagctccatcgcattcaaacacagctcctcagaagagcgctgactctggagccgcgactcagctatcacaagatgttgttgatcgtgagatcacagaacagatgaacgaggaagtgaggcataagtacataaaaggcatattattacgtccgctattttgtatctggctaactctgtcaaagctaaaaaactaggtgaaggtacatacgctgtagtctatctcggccacgtccgatccgatcctacttcattcgtcgccataaaaaagataaaagtcaatacggaatacagagatggattatccatggacgcaattcgggaagtgaaatatctccaggagctctcccatcccaatgtcattgcgctccatgacgtattctcgtcaaaggaccagaatctcaaccttgtcctggagtacttaccacgcggtgacttggagatgcttatcaaggacagcgatatccactatggtgctgccgatgtgaaagcttggatgggaatgcttatccgcggggtctggttttgtcatgagaactttgtcctgcatcgtgatatcaagccaaataacttgcttattgcctcggacggggaagtcaagttagctgatttcggtctggccagatcgtttgctgacccttatatgaacatgactcaccaagtgatcacacgatggtaccgaccacctgaacttctgtatggtgcccgccaatattctggcgctgtggatatttggtcagtgggaatggtcttcgcagaactccttctgcgagtgccatttgtcgctggcaattcggatcttgatcaaatcagcaaaatttgcgaagcgttcggcacgccaaccgaagaaagttggcctggtgtgtcgaagctgccaaattatattccagcagataataacatacctttgcaaggccgagagttcttcctcaggcaattcccgacagctggtcctgtcggcgcagatctactcatgtccatgtgtaccttagatccaagacggcggaccactgcgcaccaagcccttcagcatagatggtggactacggagcccagaccgacaaataaacaggaccttccacaaaaacctggcggcaccaaaaaaatgggagatgatttgacaaggcgtggcggagagcttgatgaccaattcaaaaatgctgctcggcaactagatttcggtgccataaaagggtagcactttggaactccgaaacagccttgcactagaggattttgcggcgcgttcacacctgccattgacggttctttaacagaacagaagctgccctgcatttcacattgtggaggacggggtggagaatccaagagagtgcactatagttatcctctgggctgcagcgatttcccatgggtagcaaactacaacttgaagtctggcctgaggaactgatccaccgccagacaaagccttccgcgtatgagactatacaaaggaactccagcgtattccgtatattcactatggacctccacgtccttgattgtctcccaggcgagctctgagcctgttaacgctggccgaaattccgcaacggctacggtgttgtgattggtcccctttttcaccttgcgtctcaatatgtccgcgccaggagtgatatcgggggcttatcgaggcacgagtgtcctcctattggcccaagggcaaaggactttataatgagatcgacgaccccaagttcgatcaaataagaagaatagtattatcgatttatcaatgatcaagtctgtgctctcgagactccaggataaaacgggctcgaacggtccaacgaatttaagagtgcaccgccgatgtaaacctgcacgagacttcgagcttcgagcttcgagccaagcgttgtttcaatgtcaaaccctcactgtagaacctagcttaagattcaagacaatgtgagaattgctgccaacttataatcactgattggcttgtagaaccagcgtatgaaaatcggtatcggagcagtatacagagagttgaactcggaaagactcatctctcagaaagaccagggaattcgatgccagaatacaagactcaagtatggagtatagcggcgacttctgctaataggcatgtgc

SEQ ID NO: 2033 - DNA, 1489 bp, Emericella nidulans
agtcccaagtccacgagagcggcgactctcccgtcgcctcgatcgaggagtttaccaccactcccttcgactttatcgtctgcggcggtggaacagctgggctggccatcgccgcccgtctgagcgagatttcgaatgtcaatgtcgggattgtagaggcaggaaaataccgcatcggcgacccgctcatcgagacgcctgcgacgttcatgcagatgtttgaggacccagagtacgattggtgtctgtttacagcgccacaggaagcgaacaacggcaaggtccatcatataccgcgcggaaaagtcctcggcggatccagtgcaatcaattacttgatgtatgtacggggatcgctgcaggactacgatgactgggccgcgcttgtcggtgatgaggggtggtcagctgcaaacatgaaggcgtatatgcgcaaacatcaggctcgtaatacctttgcaaatccatcctatgagatatccctaacactccccttcttagaccctagaaccggtcaatccagagtccaaggcggcagcatctcccatcgcccctgagcaccacggtacgaccggccccattcgaacgagcttcaatgagtcaaacctgcccatcgaaaccgactttgtcaaggcttgcgccgagacggcgaacttgccaaacatgcctattgacgcttggagcggagaaccatatcggttctaccataccctgggcgctgtcgcccgtacgggtccgaaccgctggaaacgaagctactcctggatcgagtattacgaagcgaacaggttgcggccaaatctcaaacttttctgtgaagcgcgtgttaacaaagacattctcaacggtactagggctaccggcgtcagtataacattccgaggacaggagtacaccgtctatgcaagatgcgaggtcatcgtttttggcgggaccatccagtcccctcagattctggagctatccggcattggcgacccagaaggtctggctgcctccggcgtccagagtatgcttgagaaccctgctgatcggtgctaacgtacaggaccacagtgtcagtctgaaaagactgcacatgcaaccagtgtggtgaccagcgacacactgagccaggttccttaatcggagctgaacactgaataattcgcagatcccgacaggccatttagttaatgggacccacgggtttaaaccgaaagagatctttaaacgcgtttttgctgattgcccagatcctggttcagccagtgggctccagaaagaattgatagttattttataaaaggaacttggatttagtttttcttctctggaaagaagttgactcctttttttcccccaataaactttttttcgcttttttcctacgttttttaatagggggatttttttttttgcttcttgttttatttacaattatatttttctctatataataaaaatttttatatttttttttttttataaaaaactcttttttttcttt

SEQ ID NO: 2034 - DNA, 985 bp, Emericella nidulans
ctatcagaaaaaaagctattgtatgtgtatcgcagccgatgaaagaaatactggccttgggtgttctggaaccactacacagctggacatgtcttggcgccagcgttgaaggcggcgagattctccccgactcggcgtcaacctctttactttcggagcatcccccagctgttcttcggcccaaattgaacggtcaggttaccgttttatttatgccaatgcatatcaaacattaaagacaattattgatatacaaggcgacaatgcatgcttgcttctgacagccgaaacgtgcgcaaagaatcacccggtttcgaatctcatttcccatccgaccttcgcagcaaatattactgttactactggcaaagagagcaatatggacaaccgtacatttgtctccgattctctccttcgcttggcgaacgcgtcggatcctactgtcgtcgacttcatcctcgccaccgcgacatccgccaaatcgtcctcttcgctccaagataagatagcaccttttctggatgcaggtgcagaagaggttagctcattttgttcggaactctataaacgggttgggaagtctgaaacgagcgcaattactaatgctgggaccgggagcgggaatcgagatgggaaaacagttgcggcggggacagagaagaagaaatatcgccttctggatatggatgaggtcgattatgagggtgtaagtgggactgggagttcgctagggcctaggagtgttgagaccgagaggaaagacagggggaggagggcgcacgacaagagtcgggatggagatgggaatagtaagagtcacagtgatcgttgggataagaacgagaatcggaagagggaacgcgaaaatagccgcgaccggcgtcgatcgaagaagttaagacggcgcgacgttgacgacttcgaagataggtggggcgatgaggagattctggaggaggaagagcaggatgttgaaggggagttt

SEQ ID NO: 2035 - DNA, 3352 bp, Emericella nidulans
atcacataccactcacaccgtttgcgctcaagacaacgcaaaatacgtcgaaattgcttccaataacgccatcatgcatatcctcccaatcatgaaggagtgttggaaggatccaatatcaaaacgcacaacaaaaatacgaccgccataatccaacccagacgccacctgcccctgtaaggatatcaacaaagaagcaaaaaaagcaaccatcgtaaatcacgtaaacatgcgtcatgagtcgtatcagcgatgtgtaagcaccagtggtcttcctcatatatccatacgaagcgccgatcatgcagcaacggaataaaaatcatacatttcaagtcgcaacatgatgaattggcaccaaaatcagtgtttggcccatcagtcgccctgagtcatacgcgggccgaggaacttgacagggctggttgtgagtttcccctatctgttccaagcaagcccagccgggtggcgggatctccaggactagaacgaggtggtgacgacgacgaggaagacgatgagcatgaaggaagtttggaacattcaacgctgcattctgggtccggtgagaagaagttgctctcacgatacgaagcgaaagatggcgtggttccgcgctcactgctcgaaacaagctccatccctctaggttcaaacccacgggggtgtacccacgtccagtcaaggtcctctttcaattgtgtggactcgaagctatgagatagcgatctcccgaccttggctagacttggtcggcccatccggcttgcagcccctttcctcctctcaatctcgtgattataggaacctctcctcttgcgacctcggtctgtgctgccgtcgtgtgaatgctggaaaatggcgttcgccatgagttgttcctggctatggctcaaagcgaccctagcacgcattttctgaatagcagagtccaatgctaactcgattgcgcaatgattccggatgcgtgcaagctttggccatgtcgcgcgctctccacagaggcacgcctttagcataaaatcagtggtggggttcttcaataatcgaggaaagtgcgcataatgaatctcagatagatgttgatgtcttcagagtacttctgattcataatcgaaattgacttggtgaaggaattcggaaaaacgccaagctccgtcaatactgccatccgatgcataatctcctcctttgcaagatgtgaaacagtatggaaaagtcgagagaatcttgacgtcgggaccgccacactcttcggctcatcggctttgggaagaaatggtacaatgtgcgggttgacttgtgatacaataaagtggttgacgttgaacatttctgacaagcgattcataggcagatctccgtcaacggagccgtctatatattgcttgtgaaggtcattccacggaacaggttcccctgtcagcgggtctttggccatcaaggtaaagggcgaaaatactaccggcaccgaacatgaaacggccctaggcgaatgttagtatggctctcaaacaactccgcagttcacgtacacagcagaccaaatcaatacgctgggggctgtaatgtagtttagaagctttggtagctcgtacaccccagcgctagatacgcaaatgttgagaattctccgggttcggttatacgcctcctgaaaggtgatgtcgcctagccaatttctcataactttggccaggtgtgtgatatccaaaaacgctccatgcttgaggaaccgcgcggttttttgcaggatgttttcctcgcgatcgtcttcatcaaacacagaaaagtcaccgtagggaaaagaagctaacaacgcaggaagctcatcctcggtacgagtgcaaaatactgcgcagacgatactgccagcagaggcgccggagatgatgcggggcagaagattcgccatccaaagcgacttcaaaaccccaatgtggttcatcccaaaagtagctccacctgagaagaggagcgcgcttcgcccaaaagcctgtctcgcagctagaagctggtctagtatatacctcgactcggccacatcacaccgattgtctcccgacacatccactagagacgatattgtttggacggcggtcgttatatattgatctattaaattcttggtaccagaatgggtgtgtttgtacagagaggcattgctcatgcctcccaaatcacgactcaacgaggtccgaatcaggtatagcatgcgactgacatcacagctcagacgagccgcttctagctgctcgaggcggctctgtacgagatgggggtcatactcgtcgcattcaaaagtcgccttccaggcgttattatcctcgagtttatcaagttcacaggcacattctttccattcttcggcggatacagcctagcaacgcaaacgaattagcgcggggtgtggtagtgtaacgcaataggcacgaaacagactcacattacgcatgcgcaagtatagcacttgcttgcgatcctctgtcttcaagtggagttcctcctcaaaccctcgcttcttcctggatacgatatcttcggagctgcaaatgctgccggcccacgagagggatcctctcacaacagaagccagcgaaggcacgggatccaaggtgagccgcggacggtggccattttgaggtgcatctttggtaacagtgtggctgttcgagtgtttacccttactatgccacgtcgaggttatcagtggggagtcgggaataggcgacatgacaggttcaagagggatagtgccagccggatatccattcggtggaggaagtagctgagtgtgaaagtgtcgactttctagccgaaggggctgctgtaattaaaattataagaaatggccgtcaagcatgggacgagtgagatttgaatgctggggaagagaaaacctggggtcaggcgaacctggaaaagagtcacgagcgatcgccgtgcagggagctggcgcagcattcagtccgtagccttaccgcttacgctgctcaccgttaagggtcccaaggctggttactggccacaaccccacgaccgcctctcttggttgtgacgtctggggaagacagtcttcagtggtttctagtcgtgcaatttctcgaaaatttcgcttgaagttccccacagttgtcacaatgtcaattttcctcagaccgatgtcacttttgtttatttcaacatcccctgggactcaccttggggtttatggatgataccctactcgcactaaaagtagcaacgttccaccttcgcttgattttgtccttgcaaaggcaatttttatggactgggcgttatttccgagctttttagaaatctaataccaaatcatgggggggaaaagtat

SEQ ID NO: 2036 - DNA, 2711 bp, Emericella nidulans
  unsure (1)..(2711): unsure at all n locations
atttccgaatccagcggattgctgtgactgaccaacagcctgggacgaagggtgggataagcactgcatccctgcactgctccacttccagtatccaatcatcgacctgaacggatcttttgatctcgtttagggcggagaaagggaaaagaaaagcatcgagaaagcatgggcgagcgatttggggcgatgtggtcagcgaacaacactaggtttgtttacttttagcggctgcccctcctcccagatgatcctttctagaagacgaatagcagagaggcagcagatattaattctcttctgaagcgagacgggaaattaatccttgagtggcaaacataaggctctgactcactgctcgcatggcttgacgagaagagcggctacgtcgccttccaggattattatccgaagagtctgcctctcaccgaattgtgtctaaatgtgttaaagtgaatgcagaatctacagagtatacgattagcgagacttcaaggatcgtcgaagctcgtgagtagcaatatgaatcaccaatgaagatgaaagattgggcatgttttaccgttagtttgctcctctgctgtccctccaagccttgcaccgtccttcgtttcttctttgagctgctggacacatcttgaggattaggttgcctggattgatggagtcctactgagggcactgtatacactctcgggtgttaacgggatgaagaaatttttcgaatcttcaccgagaggccgccttcaatcatgctctagttgtgccgtatgatttgtaggcgtccaccattatcattgattatttagacactgcttgctcaggtgaagccatgcagatttaacgatcctagtaagacgactaccataagcgtcggggggtctgtaaaataaagtggaaatacgaataccagctccaattgttccccttagcgccgtcttttgcattgctttctgccccaccggcttggatcttgacgtaggagtaacctaatcttcttgttaaagggttgaaaagccactatcttgattggctggcggtttcttatctctcacctgctccccggcttggagacgtccatggacggcctcccgctgtcctcatcgtctcatcccgacgtatgcagaaccacaaactgctgaacggcagggaataaccccacgagtctactctgaatacatttaaaaggcgtgaattagtctgtacaattgggttaggggcggatgcagatcctggaaggagagctgtacaacagcaaatctgacttttgatactggtcttgcatgtgaagttttgctgaagttatgctgacctagttcctggttcccaggtactccaaagtagcgtggtggcggacattttttcgtccaggagcggaagccgccgaaaacagctctgtcctgctggtgtgccaacgtagtatgattcacttagagcgcaaagggtctgtctgcttctttgctgtgcattgattattttttcctgaaaagccaagtcgtctactccgcgcgtccactgcagttctccagagtaggcattatacttaagcaaacggaaattcgccacggatcattgtcttgtcgaccgtggtcataattccttctcgatccccaccattgtatttttcccagttactcctgtacagggtgtccgtcatcccgtgatctcaattgaaacatcctccggcagtgtatgggtgatactccataatacgataccgaaactcggagaccagacgaattccccggacctctttctcccgtgctcctcccgccgcccactgcccactgcccgtagccctgtccagtcacttttttccctttactacgcaggccccctccccctcaccctgctcttatttctacggttccccccatcatcttccaccttcttttccctttctctcactttactacatcttcccggagctcgacgttgggcaaatatcattgcaaactctaagctattgcccaccgtccgccattgacgacatagctttaatctacccatcacgactactgccccgcagaaacacaacagcggcggccgatcccaaaatccatcagcaatcccccggtttctgtcattccattctctgtcggccaccggcggaagaatgggtctgaacttggaggaaatctatggccaaactatagttgaggagcagcgcccgaatgagtattcggaatatcagccgaagaagggttatggctgggccaacactctgcccgagcggcaaggtctctatgacccggaatatgagaaggacgcttgcggtgtaggctttgctgcgtaagttgatttcctacctgcaaccggtctgagaaagcaggtcctaatctgtgcttttctgcagaaatattaaaggcaaggctagccataagatcgttagcgatggtgagtccctaagagcagaaatgcgggagattatctgctgacatggcgtcctttacagcccggaatctgctctgtaacatgacgcaccgaggtgcggttggttcggatgcgcgagacggtgatggtgccggtgtaatgaccagtatccctcacaagttcttcattaaaaactttgcgcgcgaagtgggtgtggatcttccccccttggccagtatgctgtcggtaacttttctcaaacccgacgaggaggctttgaaggagccatcaagcagtttgaggagacnccacgtcgcttggactgcgcgtacttgggt

SEQ ID NO: 2037 - DNA, 1542 bp, Emericella nidulans
aacccgtccttgaccatgtgttgttttgcggtcgatagccggctctggaagacggaagttcttcctcatttcggcttccacgtaagcagaagcaagcttgaatcgtctatcgttgtacttatcgtaaatagctgaatgatgcttgcggggcatctcacagcactcaacaatgagagagacgagcgggtatagctgagagtaagtataaccggcgtaatgcacatgagcaggagactaatgaatcgtcagtcacgtatacataaacagatcaaagaaaacatacccaggtgcctttcttgagcattaacctcgccaagcaatgagcgccggcagcaaggaaactagcaggactaccaacgaatcgctcatccatgatagtaacctccaggaaatatttcgcaagggggccaggtttcgaggtagtaatggtcagctttgctgattatgcgaaggaagctcataggtcctgaaaacccaagctcgaactggagcatgcttagcatgaaccgctctgctttcagaatttcatcgacagtgtaaccgccgtcaaccatgtaaacaatctcctggacagacggacagttgatctcttcatatttcgcggcgataaaaatagcagtcgcaccaacaagctgcagcttgccaagcgaaacaatcttgcatgagaggaaacggtcgatatagttgacgcaaagaaaaagagtttcagggagcagtgagaaccgatggtggacctgcacaagccagtccatgagaacagaccgcatggaccattggatctcggcttggttgtccatataatgtgcatttggcagcatcttgatctacaaagatattgtgagcttagccccgtttgatagttgcggatatctgtacatacctcttgctctctgatgtactcgaaaatctcctcgctgtattcagccaccatacttgtatcacaatagtcgtcctcgatatcttccacggtgcgggtagcctcgactatctgctttgcgagagccagctcacgtttgacctgctggttatatctgggaaacagtagggtcgttgctccgccggtggtattctcgctacgggagcggtatgatcgggcagtgatatagtcgtcttcctcgttctcctcatcgtcatcgtcccagtattcttcaggttccgactgatgaggtaagtcatcctgtgaagcacgggagactgtggtggatttgcaagtgaccctcgagctaatagcgggtccgttggagtccgctgcgatatgagcttcgccggtttgcttcggcataggttgcactttgcaatcgtcgtcctcaagatccgggaactccttctcgtcttcttcggctccaggctgggacaacagaacctcgagtttgcacatttcgctctctaatttttcattcaaagagacagtaccctccactttgccgtccttctgcagatgttcccccaagcttggttttgaatggcccttcatgttgccttccttaggttcgggtttcgattccttggatgtaagttctttgctctccgtcaatggttcta

SEQ ID NO: 2038 - DNA, 3198 bp, Emericella nidulans
ctctcacgtccctcttccacgccctctcaaacacttcactggcctacaagtgtgacacaataacgtctgtcgccttcaaccagactgagacgtccgtacttgcgtctaccggcattgaccgctccattatcctatatgacctgcgcacatcttcgcctttgtctaagctcgttctgaaactagcatctaacgccgtctcttggaacccaatggaagccttcaactttgctgttgcaaatgaagaccacaatgtttacatgttcgacatgagaaagatgaaccgtgccctgaacgttctaaaggaccatgttgctgcggttatggatgtggacttcagcccaacaggcgaggagctcgttaccgcatcatatgaccggacgatccgtctttggaaccgggctactggtcactctcgcgatatctatcacacgcagagaatgcaacggtagggcacttaaacttcacacttttcttaaactctgtgactaacctattcaaagcgtcttttccgccaagtttactcctgataacaaatacgtcctatccggttcagacgatgggaacattcgattatggcgtgccaatgcctctgaccgcagtggaatcaagagcgcccgccagaggacgaagctagagtacgatcaagctcttgtccagaggtatgcgcatatgccggagatcaaacggatcaaacgccagcgtcacgtgccgcggactattaagaaggctcgtgagatcaagaatgaagagcttgcggctatcaagaggcgcgaggagaatattcgcaagcatgctaagaagagtactttgcgcgctagacagagcgagcgtgagaagatgattctggctcaggagaaatagatgcggacgctacatcccgccgcgattggcaagctggaatgtgcctaggcgcggcagtcaagacgtgactaagcaagaagctcattccatatgcttagcatacatcgcgagctcatgcgttcacaagatgtctattttctcttgactgttggtttgggatttccaggctgctttgtttgagacgacgcttgtggtacggcgaagtcaataccggtcaaacgtcgggcgatctgctggagacctgctggcagagccgcatatatgtcgataaacatggcgtatgccggcaatctgataacaccgcttctaccattgtctatcagggagacgatcttttgagcaacacgaatgggttcgaggacaggtgcgaaaaaggagtttggcgttttgatgaacatgaacagtggcgtagatatctggccggtctcgaccagcaccattttcactttatccgcgtttcctgatacccggagttcagcctccaaggcgcgatgcagggcgctgaggccagccttgcttgctgagtagtctgcgagaccagcggcgcacagctgtccaaggaccgagctcacgttcacgatggtgcctccgttctcgcgggacagcatatgtgggaggaacacttggcaggtgtggaagaccgctagaagattcgtctgtatggtcttttggaatgcttcagcagagagtgacaggagcggctggccgttaattcgggtcgctgcacagttcacaagcaccgttggcgtgcccaactagacatcttatagttagcgaagcaaataaaaagtactacaacagcaaccactaggtcgtactacggggcgtagtcaaaatcaagcaagtcggaagagaaacatacatcttctttgattctccgcgccacttcctcaacttcacccctcaccgtaatatcacacttataatactcaacccctccgacgtcttcccagcctttcacatccttctgctccgcaatatccaacactgcaacgctcacgccacgcaaaccatagatttgcgcaatcaatctcccgaccccgcttgccccgccggtaatcacgacaacttcgtcgctcagatcgacctgtctaggcaccccatatgcaatctgatcgtttatcatgaacgcgacattgagaatagtcaaaaatgtggcgtaggcggtcgcggtcagaaacgctgggtgcgtatagggagtagcctgggcgcggaggcagaggacgattatccaggcgatgaaggggtggaaaaccgagcggttcaggaccgttacgaataggtcgactgtgaggtgctcgtgccattgttttggcgtggttggattgagggagggagagggggtagtgaggatacgttgaggtgccattctactgtattttctcctggacacgtttatagcgattgtccgaagcagaggttgttcgagtaacagaataaccttttttaccttttcttgttcagagttgggatccagctatgtcgacgagaatcacattatttaggtgggaggaaagggccgagattcgagcttctggttggctatgaagaataattagcgtagaacgaccgacatcaattttgatatatactggtcctctggaatacaaggaatgacttgctcaattgcgagatggagtacggttgatattgttcgcttagggatttccagtcttgtgttagaattatatattttggaggtgtctccgcacccacccctcgtactccaagatgctaagataagggaaataaattatctttaagatggatttctctaaaccaacaaatcactgaaaagttatggacccgtatcttcaactcatataagaaactatgccccctcgacttggatatcctgtgaagacaattcacagcgtcaagcttgccgcaaccaatccagaaaccacctgggatatcgccattggatacctaccagactccccagagggagtcatatcctccataaccccagattactcgagcacctcatctcgtccattatcacctcttgcgctgcccgccctcgtacacccccatatccatctcgacaaagcctatgttcacagcacgtcctcctacaccgatctcttcccctcaaccggttcattccaagaagccctgaccctcacaagcacggcgaaagcctcatttacagggcccgacctcctacaacgcggcgaatggctccttgccgaatccgtcgcctccggtgtaacagccatgcgcgcctttgtcgaggtcgaccacgcagtccagcatgcctgtcttgacgctgggctagacctgaagcgaaaatggcaagaggcatgcgaaatccagctcgtgtgctttgcacag

SEQ ID NO: 2039 - DNA, 839 bp, Emericella nidulans
tttaatctagcatagcacagatcccgtcctcgtcaggttccagcgtcatctgctagatcagcagagtagcatactttatgtacagcgcaccataggagtcatccttcccgagtgtcctcatagtatgccagatcgcatgggcttccatttccttaccagttttggggacgacactgggatacagcagcatagggaaaattccgccgtaaagttggttgtcgatctgaatccatttgatggtggtgttcagagtctggtaagccttcgattccttgaacttgacctcgatatcacggaacgtcatgtaaagtaactccttcattttctggttgattaaggagataccgataccaccaaggtgaagctgagctttgaaattgacatcagagtcaaattccttgacttcgaagccagtattgatgctcgtttgcgaggtttgtgatctttgctgccgatatatactctttgatgctttgaagttcgataaaaccagagtctgcgtcggaccatcagcaacaatattgatgtcgatgatcttctgcgcttctccaggctgactgggaggaatacgcataggtatcaagtttccaatctcggtcagcctaatccgccgttctttgcccttgcaagccaacacgagagacttgttctttgtcgccgggaagtcccaggcatatggcatgatgctgcgaggaggtagacggtagcggatcggtcgccaggtatttgtccggtcttcctcgtcatcttccaagttcgggttctgcaaaaattagtaaatgagactgatagaaagccagatgcccggacaagataacataccgtgttgataaaacatg

SEQ ID NO: 2040 - DNA, 2701 bp, Emericella nidulans
aaacagagctagcagcttggctcatagtacttggatcctatcgagcgatcttctgaaattggcgcagaatagtcatagctgctcgcagtgacaggtgccgcgataccgccccagtttgttcctccgaacatcatgtatagactcatcgcagatacccgttggccgatgttccatctgtagaacagattcgcaaaatcggccccagtatcctcagtgcaccctccttcaggtccgtcccacgggttataagatccgccttgaaactcgggcatgaagaacggcatagtcggttggacttcctgaaaatagtcatagtagtctagcaccttatatggcacatattcaccgtttgttccagtgcatacactgacatcgcagctccagcactgatccgtcagaaatgtttagcaatatagatataagccacttacagaagggtacgaatccaagcccaccgtatcaagattgcctccagcatctgaccagtcactgccccaggattttgtgttcatattagggtcgttcccggtcaatggaacagtgataccattctcacgagccgaggcttgtagcaattccatgtaagcaatagctgtctgattagggttcctgtcacgcggatccccaatccattgctgtccgtattcgttctcgatctggtagcaaagtgtataatgaccatcggtaacctgatacttgctggtgatttcggacacttccgcaaaatacggttcccaggccgctgtatatctggggtcgtcatttctcgtcgagccatatgcgcctgtcgtaagccagagtgggaaccctccagcgctggcttcggcgttgacatatggcccagggcgcacgatgatgtacattccaagctcctttgccaagtcatatatcggggtgatgtcacgagcaccagtcgagaaatcaacagtctggttattgggtgcgtggtaagcccagctagagtagaacgcaaagccagtgaatccaatcgccttgattttctccaatatgtcccgccatagtgctgggactgggatacgccagtagtggaactcccccgagaacaggaatatccgctgcccgttgatgtaaaagctgtaatggtcccattgtacaactttgctcagcccattgtcatgtataggccattcggattgggaactattctgagctgcagtcagaacatggaggcttcccagaaggaagagaagcaaccagaaggccgtcgccatggccaaagactcggacaacaaagtgtgggctgtctaccgtgcatggtacctggctgaagctcggcccaatttatgttctgggacttggtgaagcgggttgagcatcgcttagaccttacgaccaagcctccgcatcctagagtagggtggacgcaatacaagacgatcgtcagttccagaggccaagtggagtcgacaatcgagccatgttaccttctgtggtcaaatccatgctgggatgaagcatagatgtggggacaatgtagattttcctccattcacctggcaggtcggtatggtttctcccgtcagccggcaggagactgagaatagcagccgagcagggggtttatccagaattatggagcgtgtgaattaggagattgtccgatggagaggatgaggggttcatcttcttgccgacaagtcacatgatgcagcgccttcatacaaggtactactgtacgatggaggcaaggagtagtggcctgtggtccaattaattgatttctatcgcattgagaacgaagagatcatcaactatgcgttctgacaggcattatcattttctaccccaggccaacttctgttctgattgacctagcggcacatacagtttccgctcgatcgagattagagaacacatgttgagagcctggtctgtgatcctcgtagttctattaataagatacatccttttatcgcctggaacacggcccagtagtagagacaccgtcgaaaacaccatgtaaatatgtacagagcagaaaacaaccgcgaaagacataaccgactcgcttttatacaggattcacagggcatgcagacgtaaaacgttgaatcatgctgccgggggcccatgcgcgccattgcgcgacgggccgaccggatcccaactcgacctctatagggtctccaacacactcctgaagctcttagatgaaatacaggaatatgtcaagatggttgtcgttggggtcgagccggataggatatggatagggggggtggataaagatatgccactctaacctcctaattcaccacactacttgtagggccaatttcacttcctgcttctcgcaattcatggttggccaaatgaattaatgttcccaacttagttctagttgcccacaactccatagggattacaggtctttacttcagcaccgccgccagccctttgcgtttcttcttagctcattctctcggccccttttccatcaggcacaccggaaaacccttgatctggctcttgcttactatcagtcgcacgcccctttattgtcaactctacatcgccttcaaatggtccactttacgatagaattcactccctggctacgaatacacccatacttgccattggcctcctcttcacaggtccaactggtttccccgataacttaccccgctcctttatacacagctttaatctctatagctctccaaaccctcttatcgat

SEQ ID NO: 2041 - DNA, 2969 bp, Emericella nidulans
cgccccacgatcttcgcgagatcattatagaacttccgtccgacttcgatatttgaaatgatctccttatacttcaggtacccgttctccagctcctggagcgccttctcactgcacctttgtagaagcatcacccgtatgggcgcgcgtaaacgcacgattcgcgtcccgcacctgcgcgacgatctgatcctgatcgtgcatctcctgcgcaaccatatctagatcgacgtcgtaatcgcgcagttgtgattcaaagaggtcctcgaattgactagcctggatagcctgcattggaactcgcgctctaaacgtgctgcctcgcggacaagtgcagaactgatgtcgtccgcgcgcgctttgtccttgacggcctgagccttgcgctttcgccggctttcgagtcgatttacttcgctgatgcagctgcggagccgactcacctcgcgttcgacttcaggcggtatcgttgcgcgtcgactacttgggacaaaagcctcaaggtcgcgattcgtgccggtcaaaacgcgaaagacagcttccgagtcgtgcagtttctgctcaaccaggttgtcactgctctgcgctgaggtgaagtagccgtcgatttcccgggcggtggtgtagagtttaggagcggcggcttcagaggcctcgcgcgtccagcggtcggtgccaaatttccggcgcgaagcgtcgtcctcagctttttcagcggcgaggagttccacgccttcggtatagacggcgcggtcgttggatttgactttggcgatgtcgagaagggacttgcggaggcggttgaggccgtcttgttgacgcatttcttcggcatgggcgaccagtgatggcggcaggcccaggggcttctcaagggcttgcagcgagccggggagattgagcgatgatagtagactggcctgttagcataaatagagaatgtaaaaggatgtgacatactcgcgtagcttgtccgtcatgttctccaattcgccgataatccgctcattgacaagacggtctctcctgtccgagtaaatgctcgccgcaatgtgcacggcatacgggacgagcttcgaaaagagcggctgtcccaacggccctttttcccccagcatcgagattgcgtacgggacctgcgacggcgccttagccgcaaccatacacgcccgatcaataagcttgagctccgacttgggcggcacggggttgagataaatcatatcgttgtccttctcggcgcgcttcaaatcctccgttactctattctttaacccctgcaaatcacccagcaccgtgcgattgatccaccggctctctttgagcgcttcattcacacaagccacagcgtcccgtaaccgtgccacctcctctccatacttgcgcttctccaggcaatccagcgactggcgatactgcgctgcagctgcaaaatgatgctgtttcgccgtcatatggtggatccattcggggctgatcgcattcgacttgacggcgtgatcgcacgcatcgccataaaagtccgacacttggcccgcgagtcgtgcaattgatgcatcctttagcccatccatcacggccttctgccagaaacattcctgagcttgtgcgaggagcagctcttccaggcttcggagggtcatctcgtccatgtcttccggcggggcggagcgcatgtcagggacgatgtctgttcggaggtgtgctaggataccggctgcctggcagaaatagttgcatgcttgcttgagaccgtcggttgttgtgcggtttacggcgaaggcgagctgggagtagagtgcggcgaggttgaagatgacgtttgccagctcgaagcggatgttatcctgtgagactgtcgtacattagccaacatcctagcagattcgctgtgagaaacgtcgtacctggccgacttgtgttgaacccaaaagcaggataccaggggaactcgaccccgacctacgaccgtcaactcagcccggaatatctatgatattattgatacgtacatcaactggaaactttcccccaagccatttcagttgcgcggcgtaagtaaccagccggctgattccgctgacatgtggttcctgcacgtttatggcctcatttcgtaaccgatcgataatgagcaagtcatctgcaaacatgtcagggcgctggtcatatttggtggaaatgtattgggtcaaggcggtcgagagggagacagtgtgcgagcggcggaagggaatctggaggatatttctgtttctgtcaataggtgatatttttgcaaagtactggacgtacgtacgaggccattttggcaatgcgcggtgttgcgcttggatggagcgattgttgttgacgggatgctaaaaactgtcccgccgacgaccccacggcaacgtaggcgggcaaatgacgtggtagtgccttaggcagctatctgtatttactacttcggaaaaaattataatcaatgtgcatttaacaggtcgttatttattgctatgttcagataatacaatactcctggactccagtcgatgggaccgataatcatcggtctagctcgttgatgcgcatcttaatatattcgaagatgctgagcagaatcatgttatttactccagtgcggatcagaataatcgacagacccttatacatgcttgatcgtgccaccgcagcggaagcctcgccgacttccttcgatttgcctaaaagcacactttgcgcgcgcgttttgcgagtatcgagggggtaagtctgcgactgtcagtacggtaatagctagctggggttgtctagacgtacgcagaaccacggcacagtactgcagattgctccagcaatcatgggggcaccgaacggagacttgtccggtcccagctctctggcagcaacctgcttgactatcacatagactgcaaagtacaggccagatccaactgtgtcgcgcgggcgatcaggccataacagta

SEQ ID NO: 2042 - DNA, 2292 bp, Emericella nidulans
ccaactcaccaagtacaaggcccctacaagctcaaggaagacaagtgtcgtcggtactgcaacaaagacctgctttctggcctcagagtaacgagtctctaagacgttcaaagatgaagttggccaatactggcgagcgtgcttcaaaaagtgtgaaaggaagaacggtaaaatagagagaagagcaggaaagaaactcagggtagcggcagatagtctacctaataccatgagtgcatttcctagaaacctgctcagatcaccgcgacgcgtatcgcggcaaccttaccagcattgaaaagggacacagtgccgggatgacgataacagtcaacgactaatcgtgctcgaatatagaaagagcatctgatagatgccactccccgattctctacccaccttacctactcttatacgccggcatggcctgaacaacacctgcaatgagataaaccagctattgaagcagcccagtgaagacaaagaaacgtttcctagcgaaaaagactagctgaatggaccaactaagccgaaaagaggaatacagaggatgcgtactttgactatagatggattctagtggagaaaagatccctactaacaattccattcctatctgtaggtagcaattcgaagatgcgcgcaagacaaggtattaatgaaaactttaagagaccagagaagatacacaaaatggaaacctggttaagactatctcacatacataccctacccaccaactaggtagacaaatcgatttttatacgacacagaatttataacaagcaagcagcgctaaatgtctattcaagagggataccctcgtactcgctgtatccgagggcgaggttcatgttttctgtacgccgtatgttagtagggcctaaggcggatggggatatgtgcggggacttacgcaggcattgagtggcagcacctttgagaaggttgtcaatggtggcgcaaacgacgacacggttctccttggagtggacggcaaagccaccgacttcgacgccgtgacgaccagcaatgttcttgacaaccggaggctcaccgacgatcttcacaagcttctcgccagcgtaacggtcctggtagatgttgcgaatgtcacgagatgacattgtctccttcagaggaatgttgatggtgaggtggatgccctggaaccaaacagcaacgtggggcatgaaggcaatgggagtaccgagctgagaactaatttcccgctcgtggatgtggtcggtcaaggagtaagggatgatgttgttagtaaggttctggacgtcgttcttggggctaggcttggtaccagctccagagtaaccggaaacgccaaaaacggtgggttgtccaccgaggtgaggaacgataggagcaatggcaacttgggttccggtggcatagcaaccagggttggcgatgcgagttgcctgggcgatcttagagcggctgaccagctcagggagaccgtaggctcagttctcatcaaagcggtagtcggcgctcaggtcgatgatcacgttaccatccttggcaccctggtcaacggcatcaacgaaaggcttgcagacgccgttagggagggccataacccagcagtcgacgtcgccgttggatgacatgcgcttgacatcctcgggactcaggttctcgtagatgatctctcgcttgtcgtaaccctgcagcttcttgccagccagctcgcgggaagagacatgacgcaaatccaggtgagggtgggcgttgatgaggttgatcagggcctgtccagtgtagccacgggctccgatgagggcgactttggaaggcttagtgttggagttgttcttctccccaagaggagggttagggttggttgtggcgtaggtgcggacagtctgaacgggaactgaagggcgtccgaaacgggcagaacgaagggcgttgcttgcagtggagaaagtacgcttctgtccagcagcagcaccgaggggcttgccgatattggcagccgcatgagcagcgcgctgaagcctggactcaaggttgatgtcgccgaacatctggcgaccgtgctgagtgaattcctgaaccaacagcttcacctcatcactactctcaactccgtaccagaagagaacctcgccgtctcggcttagactgccatcagccttgtcaaagaaccatgtgaggttctcgtccccctccttgacggtccagacaagcttgggaaagtccttcttgatggcggcgaaaacgttgtcggccacgtttgctgaggcagccagacttagtatggtaaggtat

SEQ ID NO: 2043 - DNA, 1711 bp, Emericella nidulans
ttcgacatcctcagaattgctctcaactacggggctagtgtccataccgtttcaaatgaaggctggacacccctccatcaggcggtttacgtcggcacaggcgcgccagaccatgaattcccccaaatagcagaatatatccaccttctagtcagccgtggtgcggacattaatgcccgtctgcaatcccccgcaagcaacagcgaaacctcactccaccttgccatcaccgccattgttactcggcccgatttagtacagctgctaatccaatgcggcgccgatatcaacgcacctacggcagacgggaagacgcctcttcatctcgcggccgaacgagggcgcgaatcaattttccgaattctgtacgacgcaggggccgacatgtcccttgaggtcccggatagtgcgaaggctgacgatgggcacgacgggacaggggtgggaagaaccgcgtatgatattgcgctgagtaacccgttcggtcggcattggttcgagagtgacggaaagcttaagcctgttgtcaaagaggtgaagaggaaagacagtgtggagacacttattgacgaggatgagtttcatggagaaggtgaaggggacagcaacgcagtgatcatcgaagataaagctggagaaggctccgccactgaggccgttgaacgtccccaggagccattaccctcagacaacgccacccccaacccagtcttcgcaccccggaaatcagtctcgagaagcgggagcttgagcgggagcatccgctcctcatctgctctcggccgcagcatcgcccagcatcccaggtcaaactcaatcgggggcgtattatcgcctgcatcgtactcagattctgcctcgccatttccgacgctgcagaacattaaccagaagaccgggagtcgaacttggaagggaaacaggagctttgatcgtgaagcttggggtcagctagagaatggagtctccgtctcaagatctgggtccgggtctgcgtctgtgtctggatctggggaatgggctgggagtggggactgcgatggtgatggagatgttcaaagtctgaatgagaaacatgagcctgtctcgttcgttcaaaatgaaacaccatatgtgattgtttgagtacgaccgcgtatacacggctaggagagggacaggtaagtcatgcgttctagcgagcatggcatggcatggcgtcgcttgagtggtaccttttgttttcctatctcaatccggatttgtcaaggtatgcccggtatgtctgtatatagtatgtttgttatagcgtggaatgataccctatgtagtgaatgaatcaaaagtcgagtgcatatcgatttgcagtaaccaagtatacatgtatgacttccaacaacagaatatataggtattaatgtcattcggtagccccagttcctacctaaactgctatttttcggtgcctcccacagcccccttccctcacccacgctcctacacgcagaagccaactggaagaaggttgagtgcaaagatagaacacatcgctcctgattgacactagacggctaagcgaatagagacttctccgttcattcgctttgaagagatccaacccaaatacccatacatatgcaggtgacgagattccgatataaagtggcctccatcaaatacaagtgccccttttaagcaatcgaaagactcgacttccactcccactcacacc

SEQ ID NO: 2044 - DNA, 2000 bp, Emericella nidulans
aaggcatggcagattacccatctatctagataggagattgccactatttgtacctattgtacttctctgaaacccctttgctcctaattagactagaaacagaacaggtcgcaaccagtactgtattagctataatcaggcatgcagactatacagcaggggaccctgataattctcctggcagctcaagctctgatttaagttcaagctctagaagtaattcagagtcaggatagtcccagcaagcacagtactgatattaaaataagatatcagcaaaggaaaagttttactagaagcttatagtacttatttaacaaagcttggtaaagtaaatcccagaattggaagtcaaggcaggcaagatgcctatattcaaagaaaaagatcctactaagcttgaaacattcctcctagaccttgaggactgctttattggggcgctgaaccagtataaaatagagaagaaatagatccttcttggtactagtcatgttagtaaagatgcttgatactgttggcactccaaggtcaagtatataactagagagccaacctgggaggatttcaagacctttatatacttctgggttgatctggaggctgatcagggccaccaagcagccttttacctgctaaataaataacaggaaggatactctattactaaatagactagccaatttatagaggtgttgccctacctcactgagcccctgttctatgctcagctacttattaaaatacttaataaggaatatcagcagcacctaatatatataagacatctaccctagactgttaaagaggtcaaagtagaggcaattcagctggaatctattataaaataggaaaccaaagccaaccaaaaggctgacaataagaggctgggagataaattagaggggaataatccccagctatagacaaaatagcaccaaattaatagctcagaagagccacctgtctctactaagaacaagaataaagggcaattaaactacaagccctgaaggggcaagaagaaagataacctagtgtccaaagaagagcaggaccactatagagaggaaagactttgttttaaatacagcaagtcagggcaccaggctaggtactattactccaaagagatgccagagaaaaagatagaagctaaagaataggaatttgcagctccagagttactgatattgcgctgtctaaacaagactctaaccttccctattcttgcaagcctgaaaatatactagaatagctctaataaacttctcaaggtgctgctagatactggagctaatacaaatttcatctcttataattatcttattaaacaaggtatctatacagacaaaactgctatggcgcaatctgtctagtatgctaatagagagatagtaccctgctatagaaagtttattaccaaggtatagatatttgactctacttaaaaactttaaaccttgaatattatgttctatattatagatatagccctaatataatatcaggctatcttaggatagccatagctgggccaagcagatctagatattctcctgtctaccaggtgctggcattggcggcatcaggatccaaagactatggtagaaaaacctacaaagtttctttatttaataaaagacaaccctgtactgctggtcatgtataaaccagagattagcagagattagcagtgtaatagaaccagtcctaccctgatgttatgggtcctttgcctatacaaggaccttagaccttagtgactcggccaaggcctgcgctgtcctgaaggcggtgagccacctacaagacttccttgcaacaacaatccttctttctcatttcttctttagcgattccttcttgaacgtacggcacgtcttagggttagggttagggttagggttagggttagggttagggttagggttagggtttagggttagggttagggttagggttagggttagggttagggttagggttagggttagggt

SEQ ID NO: 2045 - DNA, 1311 bp, Emericella nidulans
gctctcagatctgtgttaattctttgtccatgcctaatatgctacacatacaccgccacatacatcggctggatgattgttctctgacagctcgggcacttagtttccagcttattccagttaattcaaaacatactgcacatgtataatatcaagaccgcagaaagatagataaaatgaatacgtacctgaactggattcgatcttctcttccactatactacccatagtctgcctcagctcgtggaaagcacgaagcaaaccagggcccgggcggccggcggcctctacgacatgtcgtataagggccttgaaatgcccattcacagtccacttgagactcccatcttttgtatctgctcgagtccaagccactctgccccatcacctgcccttcacctcaccgcctcaaggccctgatcatctttttgttcacttttttgttcccacccgctcgatgatatagaagcctcctccttctccttacttccaccggataatagcaggcaattgaccctatattgactcacttcgaagcacacaagtagtcacattacccacaagtaggccgagaaagtgttggatgcaactacagaaagctcgaatgtccgcatcccattcatccaggtcgcttggtgtttgcctagcttggtgacgcgaagcatccagtgaaaagttcactgtaataccccggccataaatcatactgctcaggggaaatattaatggcaatatttcgtacttaataatactctaatataactcagagtcgcacgtaatgcgtacaccatggttcctgaaatcaaggtggcagtcgatcttcctcttatcccgtgttatgctgcctagcccgctcgatcatagcttcagtaactctgattcacaggctgtcctaaaaatgcgaacccaggatgtccctgggtaacctatcccttgactgggccaaaccgtccaagtggcattacgagtcgtccaattatttgctctaaacccgtttaggtcctctacctcgtcttgaaaagctgcacagagactgatttacatccctgactgaaagaacggctttgtacggaagtggtagtgggaattttgaactatagacagtgccctggactgggtagtcctaaggaattcaagcaaacggcgtcggagagctgagttgagcacgaacataggtaaattaggaaaaaatgtaagatggatagtggctattgttctaagataagacacaacctcactgatatttcaagtcatactgctggcatggtatataatagcatttgaagtgtgcgcatttaggtaaaatagcat

SEQ ID NO: 2046 - DNA, 1216 bp, Emericella nidulans
agaataaaatgtctagtatttcttttttaaatttatggagatccaaaagtttgtcccatacatatttcgcctggtttggcataaatgtcgagacccggcctccctgtggccaaagatcaggactctgtaggagcgggggtttgcggcaaactgaagacaaaagcggggattgaactgtaatgtagcgggtcctgaccgggaaacctataaattgatattatctccttcgggtttattggtaatgacgggcattctaaccttcccgcgtttcgtatgttaaaaagtcgggtcagatgtaggggcctttaaaagcttctttcgcggagctgttatctcggtaagccctgggcctggacagaccacgcagcattggggcgcggttcagtctcagcgagcatggcacgctcccgtcaaaaatagtcgtggacttggggcagtaggtggtgttcacagtgcccggttcagtgatgctctgttgggctctctcaaatgcgccagggtgttcatcgacatcgacagcgccggccaggaggccggtagcagcagcgaaggagaacttcattttggctgagtaagagagaatcactggttctgatgttttaaagagtgtgggtgttgataaacaacgggcgttgagaaaagagtggaatcggtatagaaaccgggtagtgagcgagtgcgtttggcagatggagcagaaacgggctggagagggagaggaagaaggcagacggacccggggcgagagtctcatataaatgatcatcaacagcgccagggctggcaaactgggcgctcagtgctgcaggaaccagggcctacgagagtggactagtccagcctagcgtggttgcagccgccgaatcgtggcagcgtcaggggctgttggtggaggcaccgacggcctaatttcctttgacttactctgatcttaatttcgctactctcatccgctgtctttttaggggctaccggctcaagcggctcctccacgttctgaaagatcgatgattctagagtctggattcaatggattgcagtctggactctggacgctggactgtgaactgcagtctattgttaatagactgaggctttccctatccatgtcgccaaaccctcagctcgctgtacagactagcccgggggtggcttgggtcaggaacatgtttaaattgccgggggccatggaaccagtcaaaggcatctcctgaac

SEQ ID NO: 2047 - DNA, 145 bp, Emericella nidulans
gaaggcaaacaagaacggaaacgacgacaagaataccgattatccggaagcaaaagccagagaccaggccaccaacagcgcaccaaaggccagaaagccaccgaacaacaacacagacgcacaaaagaacagaaccaggagagaa

SEQ ID NO: 2048 - DNA, 2556 bp, Emericella nidulans
tttatagataaaaaaacataagattgctagtgagattggaaaaaaatttataaaggcttataaccccgctctggaaattgagagattcaacacaccaaatctacccaataaccaaatatcctgaacgaaaagactagtcaaaccagaattaaccttcctttctcctaagcgcctgataacgcaatatgcctcgcaaccgtgtatggtgaggcccaaacttcagctgcacagctgcgcaggcagtttggaagcggcacattacgaaaagcagcgatcagcttaagatatgagaaaacctcctcgcgaacttagggtctccaatcgtcaaaatggttcgtcaaggacggtgctggccatcgagtcggaaggctgacagagggcgatgcgaaaaagctccttggccgtcctgttgacgaagatggcgatgtcattgaccagcacggtagcgtcaagggtcacgcagaaccctacgaggaacccgaagaagagcagcctgaagatgtagacctctcggtcctagaaggaaagacggtcaacaaagccggaaatattgtcgacgagcacggaaaagtctatggtcgcatcatttccggcgatgggaagcgcctcgcaggccggaaagtcgacggtaagggccagatttggagtgatgatggcaaagtcatcggcaaggccgagctcattcccggtgctgagcaggagaagccagaaggtatattctacggtttcgagagcctcacggttgggaaagaaggcgtggtccaggatgcatctggccgtattgttggccgtgtcgtcgaaggagatttcgccaaacttgctggtcgcaaggttgacgaggacggcgatatccttgataagaatggtaacaccattggaaaagctgagcgctgggagccagaggagaagaaacgaaacatcaatcccatggcaaaccgcaaggtcaaccgtgagggtgaagttcgcgacgcggacggaaacctcatcggcaaattgacttcgggtaatctgagcagcctcattggaaaggagattgatgacaacggatatgttgttgacaatgacggaaacaagattggcgagtgcactttactcgagaatatcccggagcctgaacctgaagaacccgaaccagaaggcccgtctcctgacgaattggaagctcaaaagaaagagcaagaggatagagaattggctaaaaagatgtcggccatcgtttctggaaccctggaccgtatccaacctgtctgcaggatgattacagatgtgagtccgactgatcctaacccagagatagcttattgacgcttcaaagcacgttgaccgggcagagaagacgccgaagaacgagcttgatgaggaggagcttgtcaagaatgttaagccgctgcttgaggaggccagcaatatcctccaggagtgtaacggcgccattcgtgccctcgacccagatggtcgtatcgctgccaacgcaaaggccagagccgcgtctcacgaagcctctcccgaagaatataatctggccgagaagctaaaggagctttcagactcggttctcaggaccatcgagaacggaaagagaaagatcgatgggatgccccatgcgaagaaagagctgaaccctctctggggactcctcagcgagccactcttccagatcattgccgccgtgggtctcctcttatctggtgtgttgggtctcgtcggtcgattgcttgagggactcggactggggcccttggttaatggcctgctcggtggtctagggctcgacaaactgctgtcgaatttgggattaacgtcgctgacggattctctgggattgactggcaagaagaaatgaaggcgagctgtggaagacgaagctcttgggccggaattatgataagctaatgctaagtcacggatgttaatgcctgcttaagtaatgcatattatacagactagttagtaatgtttcaatgacagtgacatattcatccctacgaatctcttaccgcacatcacccgggtgaactacgagaagacaacgacgagcctggattcagccacaggaaactggatagtggccggtattgagacagatctccccggatgcagtgatgatgcttggtttcggactgaagctgactcgcaggtgacaaagatggtagagggagggcctgggtaaaaaattcagggaaactgtcgactgctttgactgcttcaacaagtccgagccgttgggaattcttcaagggcgaacccagtaagttaaaatatctggactaaacaaatggtgttgttaaatcacctttaggtgttcggaagcctacgtgtcagcgcgaggcttctgatggaatcatcggggaacggtcacccggactccgccgcgaatgtgccttaaacttgtgccttacgcctcgattgagaagttctactgggtcgtgcaatagtgcaaggctcattaaccatcgaggcggcggcagtgctgctggattcagactacaacgcctgttaatgccacatgagcataaagagtctataataccttggcaggcaacttgggttaggcaa

SEQ ID NO: 2049 - DNA, 2871 bp, Emericella nidulans
tggggttcaacttgggacgtgggggacacggcgtgacagacatcccgggaatggaaatctcttctggcgcttatgatttgtcgcgatgccgagtttctcccggtaacgatcccgacggcatcctctcagtcggcggggacgacgttctatggctggcgtgattggaggtcgcgctcaaccgactggctccccgggcagctatctactccgtacagtctttcggttcgcgtctctccggatttcggatatccgactgtctggatagcatgtcgatgactgcttgtctggtggacgggccatctacgaccggtatccgccgacagagggaccttcgacttggatatgtctacgattctaccgaggagaggccgatgatgccggtattcggggtctatcatgccactgcactggcatcactggcattactggcgtcacaatgatacccttagcctagaaaccttgaagacagcttaagttggctaaggcatcaggcaagctctgtcttcccgaccgatggttcgcagttttgcattttgggaatggaattacaaggtttagaagtgttgaggtgttaaggtgttgaagatttaaaagatgttaagatgttaaggatctaaagatgttgggtgttagatgataggtgtaggtgtaggtgttatcatgtgtcagattggtctgtagtaacacaacgctgcatgaggccacgccctggtcctggcgtagatggcaccccgtagcagttctcttcttcctaatctctctcttctctactttatgctcgccatctcaaccgcatcacggtatcgagtcagttgctttcggagtattgttcaaacagtgtgacgccgcgtttcatgatgtccttgctggtcacggttcgagatgaccaggtctggtgctctaccccgccatcaccactgtaaccctgcggcaacctcgctctctcgttcatcgaccacatggacctcggaggctttatcatgatgatctcttccccagaatgccatgagatttcgattacgcggtagcggattcgtcatggagactaaagccaagcttcagggcgcatcgctaggcgttcagtccgacggcgatggatgataaacagggacaccaggaacctaaatcagacctcgtggatgaagagtcgggcatgaagattatgccatggaacgagtcgactctggagatattatagtctggagttttggcagcagcagcgtctggggatattttagctgcctgcgctgctccacctgctccctcctgggacgtctcgccctgcgtcatcgtcaacgtccaccgctcctccaacaccaagatcgcaatacacggcatcgatatttatcatccggtataatcagtcggtcattgtaggtcatctcgaatccgtgactcgtgcgttgtccacagaccatcgcctctgcattccaatccccctgcattctcatcatgggtgattcgcgatagtttgtttagtcttcgagtttgtgcaccatcctgacttcaggtagacccacattctcgtggacgtctcagtctctggcatgcgcagttgagcatacttccactcagttgctgcgccgttggctcagattagccagattcccatcagctgagtctggaatccgccgacaataatcacgtccggtgagccttctttttattcaccatgctggccttcactcctgtcatccaaccccatcccatctgggccattcgttcgttgctgtacctgggtcaaccatcttgggtcccgtcacgctccttttcacgctctttcatccctgtctgttgctagagtataatattttcgttccatacaacgctccttaaccagccctgtggggtgcaagccgctctttcacatactgccctggttgcagtgtgcaaatgggactttgatatccaccataatcatttgatcaggccttctaaaagaagctggctcctgtgtctgatttctgttcactttctgtatcctcgattcgaatttgcctgttccatactttttcagaatggaggccaagtgcaagactcgtctagcaaacgtgctaatgttgcttctcgccgcaaggactgtgtgctctgcgccaactccatctcaatcctctggggtctcagagagcacccagtatcccccttccacccgaggcgcaagactgctgccgcccgagacacagggcgtaagtactcacgggggcttgataggaccgcactgacgatgacagttctaccctaccaaacttgagcgtgagggccacgaactggagcagccgacgcccactccagacgaatcatttgttggactgaacgacctactagacaccttgggtcagcctgagtctttgcttaattggctacttcccaacccggacgaaccaacagacgttccatctcagccgccagctgcaccaacgtcagaagcctcttccacacctctcgtggccgcgacgcctgttcctactacgttgcctgctactcacaacattatcgagcagcccactactgtcagttcagtacccagctcgttcgaggctaccacagtcacaacttctagttcagacgaaaacagcccagtagtgagcacattcacaacgcatatccaaggtatgtaattctcccaccgaacacaaaccctccctaactgataaggtcctgccgaaatggtcagccaagacgtatttgtgccggtgggaactggtccgattcctgccgccatcacttctcggaacgaccatcctgttcgcaagaatggagttgtaagtgcgcctacgaacattcatgtagtcgcactaacaaggctagaattcttcgaatcccattgaaacgaacaagttccacagtgcactcttcctagggaccagacga

SEQ ID NO: 2050 - DNA, 573 bp, Emericella nidulans
cagacggattcgctatggcgaagaaaaccccatcagtgcgacctttcaaatctgtgtcttgtgggctggttagagagtttgacgatcgacgagagctgaaaggatggacggtcggaagcgacggaagacagcgcttaaaggaggcgatcgaggagaaaatcggtgagcggaccggtcttgtcgacacgtctgaagggcgaaatcgatgaagaataagcagtatttctggagatgcagcaaaagacaaatgcaggcgcctcgcaggagcgaagagagggcaggcaggacgcaagggcgaccggtggagagcggataaggagagtgtttggaacagctgctgtgatagcttggtcgagagatttcaatctcactgggaaagaaaaaaaagaagggtgcaggacagaaggaaagaaaagaaacagtcagactatggcgataatgattgaatgacgagaaggaaagaagcagatgaagatcagtgcagtcacaggactaggagaaagacgaggagggtggtgaatggtgagtagtgagtggtgacatttccgagtccctacgcgactagcccgtcat

SEQ ID NO: 2051 - DNA, 6490 bp, Emericella nidulans
gacatgagcggcgagcagatgcaggccaagattaccgccgccagacgcgaagctgaagggctcaaggacaagatcaggcgcagaaaggatgatcttgccgatacaacctgtacgaaaatcccctttgtttctttgcatagtgtggtggaaaacggccatctttatcgcgtctgccatcctactgtctccggagagttgctgactagagcaaattgaacagtgcgtgatgttgcgcagaatcagaccgacgccttgcctcgcattggaatgaagccccggcgaacactcaaaggtcatttggccaagatctatgctatgcactggtccaccgaccgtcgccatctcgtgtccgcctcacaagatggaaaactcataatctgggatgcgtacactacgaacaaagtccacgccatcccgctcagatcatcgtgggtcatgacctgcgcttatgctcctagtggaaactatgtcgcctgcggtggtctggacaacatttgctccatttacaatctttcctcacgagagggcccgactcgtgtcgcgcgcgaactctccggtcattccggctacctctcctgctgccgtttcatcaatgaccgtcgaatcatcacctcttccggcgacatgacctgcatgctctgggatatcgagtcaggctctaaagtcaccgaattcgcagaccacctcggcgatgtcatgtcaatcagcatcaaccccactaaccagaacatcttcgtctccggtgcctgtgatgcttttgctaagctctgggatatccgtactggaaaggcagtccaaacttttgctggtcatgaatctgacattaacgccatccaattcttccctgacggcaacgctttcggaaccggttccgacgataccacttgccgtctcttcgacattcgtgcagacagatcactcaacacctaccaggtgagacccggttgccacactcattgtaggacagtattgttaacaaatgccacagagcgatcaaatactgtgcggtatcacatccgtcggtttctcggtttccggaagattgcttttcgccggatatgatgattttgaatgcaaggtatgttctgttctcgacgcctgtgattctggagacggtgactgaccgatgaataggtctgggatgttctccggggagacaaggtggggtctttaagcggccacgagaaccgtgtcagctgccttggtgtcagcaatgatggcatcagtctttgcactggatcttgggactctttggtaagtaaagcaaattctcagttcatgaaaaagccacatactaatctgcctttcaataacagctcaaggtctgggcctggtaaacggtttaaagaataataaaatcacaacgacgcgataccctgtctcagtcatctgcgactttccccatttgaaattctatttctacttaccgagaggccggatgtccgcattgtacgataatcttgtttgtcgggatacagtctatcgccttctccctttattcaacgactgtgggagcgcagactgattcagcatggaccggaagacgcgagaatagagaggatatgtgcttcagcccgtctcgtatacccgaacttggatcgcgcaagccggatcatctggaaagaaaaagaaaacaaatcttatgcagcggttgtactaatgttgtcttctcaggatggttacaggggctccggctggtgtctggcatgacgcggaatcgtcgagattcatacggttgggcttcgacgatccccaagacttttcaatttgttctatgatttctttcttttcctatcttttctttgctccttatatccccgcccaggttccttttttgatcaattacccttcgctatacctttgattggattgttttctacgcattgatcctaaatgtacttttggtgaggcaggaggaatgttttgtttcggccacgacgttaattgagtgcatctggattttattgcttttgtcttctattttctaataacagcttacattggagagttagtgatttgaagcgaactttgcctgacttgtgattggatatgctgcattgcagttggatctccaaccactttttattgtttgattatctcccccaaagcgatgtagagcagtgatgaatccaatgcgaatttcaggaattgcggtcaagaatagaatatgccaggcaataacgtaatatgggggttccgtatcgaagctgaaacgtgtttccagccatcgtcgtccagagcgtcgggccagtggcttagatctcacaagcctccacgtggaaaagtaagaataacatcatcaacgtcaagatatcttctgcaacttccatgacggcggaattcttggtgtcttctagctgcagccggagaccgggacggcaggaatcccccacccgaactacacgaaaacgaaatacggggcacagatgaaacaccgttgagttgtcacaagcacacgatcatcaacagagagggcccgcctctcgtttcagttaccgccccctcgtcctccgtggctccgctcctgaactctctcccacgtcaatcggtagacacgacgcaatccatctcaggtttgcttttgcttttcctgctccgtgctccggaatccgatacgacctctcaaacaagtgccctgctcacggatgctgcagaccttacgtatataagtgtttcaccacccccaactacaggcctcctctcttttcaatatgtctacagcccaagacgagttcaatcagctcttcagcaatcgagagaagaacttgtcccatcccgaggacaggaacaatctctctgacaacgacccctcccctgacccgcacgaccaagaccacttcgagcactccgactccgaggacatggcagccatgacctcccgaacaaccagctacacagtccccaacacccgattcgaagctaatacaggccccaagggtgtcattgcagacgcccaggctttcgagcgtgcccgccgaacgaatttccgcaagtcatttgtctccggcaactcggccgcgcagcgctcacaccaccactcatcctccaagtcatccggcgacgctcgactcctccacaattccccaccagctgatggatcaggtagcgatctcgacgaggacgaggacacttttttgcgccgatggcgcgaatcacgcatgcaggagctgcagagcatgaaggctaaacggcctagtgcccggcggagatattatggatcgttggaaacggtcgatgcggcggggtatctggatgcaattgagaaggtcccagcggaccaggttgtcgtcgtttgtctttatgaccccaaggtaggtgcctcctgcacccgccggtcacggcttctgctgttataaggagcgttagcgtagcttaccagcacagtccaacaccagcgccctcgtcgaagactgcctgcacacgattgcttctcgccaacaactagtacacttcgtcaagctccactacgagattgcggaaatggataacattgaggcccccgcgttactagcataccggggcggagacgtcttcgcaaccattgtccagattccgcagcagattcccaaaggtcgaagctgcagcgcggatagtcttgaggacttactaaaatcgtgagtgtttctttgttctcgtatcttatatttttgcttcttctgccccggcgcccccactgctacacctacgtaagattcgctgagtgacatgaaactaactctcctccctagacatcgagtgctgtaaagtgataaacatagttctttatttcgatgtctctgaattttggagcacggagtacgggttgcctattactttaaaacggtatacccgtaacgagattcacgctatagcctacaggatctgaaaccgacagacgtgcatactcctgtgtcacagtatatcttcgcatcttccttcctatccctccgctctcgctctcaagttgctcatcatatatccaggcatgtccaagcgcccgtctttcatgtcatagaagctatctcgtcttctcccattttcatttgtcttgtcatctgcgtacatacattttttattgttttgcttcttcgtttttcttctgctcggagttcaggataggacaggtagggtaggcaatttggctttactggtcagtcataatttcagcatgcgtcttatgccgcttactagcttctctgtttcagctgggctatttttgtacatagcatactcacaacgtaatatgatattcgatcagcttcgaaccttattctatgctcagttcaagtagttcagctgcgcagtcagtttacgtgtatggtgttaagcctagttggctgctattcttgaggtatccatttctttatctacacaacgcgcaagatatatatgtatctaaagcatgtacaacattccttttttactaagttctaagtacacgcaaggatatagcatactacattgaacctcacaatacgcccattgaagggatagtttcaaaccacgatgaagggagcgaaaagacacctacactgccagacaagcaggatggtaaggtagacagccgaaatatgtcgcccaaacacccttcccgtgcaagcgtgtaacttgagaccgagacaagacggtttctaagcagctttctttacattaggagttaccttacgctaaaagacaaaggacaaaggtaagtgactacagacggcatctgacatatatattgagacagaaagatgatcaaccttaataatgtacttccatttcctagatgggatcaagggtagtaaatagacaccaaccaacatgttgtgagcttccaccatgacgatggcccttcattcctctagaacatccagtttagagagtaaatcagaatgaataccagtgataacatgaatagtcaatatgcgagaattgcaaaatggacgtctggaactctcagaacaaaaggccaagtaaaagagaagaatgagggtacaaaatacggttggatagggtagtgtggagtaccggcacgttgagcacggcgtaagaaggacctgaagctcattgttgatataaaagaggaaagggaaataggagacgagacacatgaaaaactacagagctcctttttcctgtgtaaactcccaaagcattttgatcaatgggtctggcagtgtatagaggtcgacatggaattctccttctgttagatgtggttagtggttggtttttcggactagatctgactggaatggaggacttacgctcgacatcattcttggtgtaagaatcaggggccttattatcgtgtaccatttgtaccacttgcaggaggtcatcttcccccagtcgctggagaccatcggctagtttatccatgtcaacctgggagtaagaatgtcagacgtcaacatttcagtctctatattttcattgactcacgctcttatccgttcgcttcttcttcttggatccttcttctccacctgcagagcgcttcgacttcactccgttctcatcgccaggaacaggtccagattcacgaagcgccgccaataaagccggcttggggttcttgaacgtctacagaagatgtaagcatatatgacataagagtctgtctggaagcagtcgagacgtacaataacgtgcttagactcataacgcgattgcgcaaagttgagatcatgtgcgatgaagtgctccttgttgtccgcagcagtgaggccgatctgcatatcaaactcaccccatccctcttcttgaattctgaacggtgggtttttgaatactatcgttccaggttagccctagctgtagtaatccagtatgttgcgtttatcatccgagctctccctgtaatgagaatcgggataaaagcagggtataaagaccacagaagctcaaagggaaagtgactgaccttgagtcgctcggtttccgaaactaggatgtaatgagtaagtcaccttgtcgaagacattggctggcacctgctccccatgctcattgaggagatacacctcgattgaccatgatcgaagagggaaaccttcgacaccggagtccttgttactgtaaaggcgcgaaagtcaagcaatcagcaagtttgtccatatattatccccaagatcatgatgcgatgtttcatataacacgggtagttgtcgaggaaaccgcgtataaagcccataacgcgcggaaaaggagtaatttcgcatgaccggtgaaattgacggcaggattgacacaggaggggaagagttggctgtggatcgggctgttctcgacacggagatgaagtgacaggatgggtttaacgtacatgacgtgctgctcggttacaagcttgacggtcctcttaacctgtatgatagaacgtgtttgttagcgagatgcgagagcagggaatgtcaggccatgaaaggagatgatatccagtcctggcggctgtaccgccgtagactggggaccagtacgggtcaaccgtgcgggaaactcacgtcgggcatggtgatgatgagct

SEQ ID NO: 2052 - DNA, 2559 bp, Emericella nidulans
ctgtcgcgcgattgcggccgcctctcctgctcgtccttgcgcaaggctgttgagataattttcccgaccggctaatagctctttccgctcattttcgtattcctctttagcggcctggcgccgcagacgtgctagctcttgttcttggttctggcgttcttggaacgaggagacttctttagcttcgagagcttggttggcacggatagacttcatgttctccgatgcatagctctgaagatcggcctcagttttcgcgacgtcaatcctgttgacaaggttgaatataatctcctctctctgctctaaaaagttgtcccagtctagcttggaatcgaactcttcttctcggcggttaaggctaagcatggttagcactcaggggggaggcagacaggagaacaactcacacagtcattaccctgcgccgtatatcaacctccctctcaacatttatatcctcgaatgtctgtttgcgaaaccgttgctttctcaatgtcttgtggcacccggccacaggacagttcgccgggcctccggagaaaatcctgtccacgcatgactcgcacattttatgatagcattctgggtttataaggaatcgcatgtccgggttcagataccgcgaggatttgcagacagggcagacctctaggaaggacgtggttagcatggattaaagcctcatggtccgggaacagagcttaccatcttcatccccgcgatttaccaaagcctcgcgagaaggcggcatgactgtagtaccagtgtccagtaggatggacaacgacaatatgtcttaaacactgttgagagagtgacggagttaagagcaatgcaggtatctgacggtcattgatatgtcgcgttacccaatcagattgatgccccgttgttccgcgcggcgagtctttgcaagtgctttttgccgcccgctccccaaaagttctcttcactttacttttgcatgaaagtcgcaacctttttcacttcctggcattcgattgagtgatagctttcgcttattactcgttctgaatctgaaatgggagttccggacagcagtattgaagggctcgaacgccagcgtcgcgaactcgagagcaacattctacaactacaacaatccctttaccactggaggacatgggaagcggaatatgaggggctgaaagaaggaatcgccgacttaggcaacgatgctacaacaaacgatttcctgcgagtcagccgcaaattcgggggactttcgtcaacgaagacgagtttcgagtgattattggtgagaaacaagctgtcggcgaaccagacaacaagttatcgaccttatttcgaggcgaatagactacgttaagaccaatgtggcatcgatggaaaagagactgcgtgcagccgagccccaaatggaagctttagactctgcagaacacctaactcgaaatccagcagacgactttcctatgcgagaaatcattgaggagcttgacgaaaacggagaagttatttcgagtacgactaccaacccgggggatcaggcctcgagtctattggagattctaaaaaaggctggtgttaaggatataccagaccttcccaagcgggacgcttccgcgtttattgagacacactctccggacactgcgtcaaaagatactttcgccccagcagccgaacaaggtgaacaggcgggccagaagaaggaaggtcaagaagaggctggtcaggagcttgcctcatcaggaggcaatgagccctcttcgtctgcatcggatgcgggtgggactccggcagaagttggaaaagagacccctgtcgtggatgtcgacgagtctccagaagatgctcagctacggcgtgaaatgttgcgatatggactggacgaggtaggcgctgtagttgccgagcttgagttggatgatgatgcaagtgaaatctcaatcgaagaagaatacgatccctatccatacgacgacgaagacgaagaggaagaggaagaagatgagtacggacgaagtatccggcctgttctggacgaagactaccaccgtcagatgcgtgaactggaggcgaaattgaacgctcgtggtatgtggaatgtgggcaaagactctgcgtcgcttcctgcggatgttaaagaggaccttgaacatccggttcaggtaaaggtagagaagacaccggaaacgaatggtgaaacggcttccaaggcaaagcctagagaaaaaggttgccttcgctgataatcttggcattgcgccaaccccaaagccccctgctcctgaaagcataaaggttatccctccaaaacccgatgttcctgttctgtcggattctataattgagcgtacagcagcagagaaggcttctgctgctgttgacgcacctaccccgaagaaagcttcccgattcaagaccgctcgtggctctgcagcgacgattgccaatgcaagctccgctgcaccctcgacctcattccaacacaaacccgcatcgctcgaaccaaccccgtcaaaaccactgtttcctgccaagcctgcagaaccgaaaccattctcccgg

SEQ ID NO: 2053 - DNA, 2078 bp, Emericella nidulans
tacgtccgtgcttattgttgcgctcactgtggtcaagcagagaatacggacgacgaactatcttgattgatgttggtttggttgggctatttggtatgctttgctggacatcatcctaaaggaatattgctgactgaaaaggcgggtacactgctctgtcaaccaaaggagtctcatccctactgtcatataccctgtggcatgtcatcacatttccgatcacctatttgttggtgtttatccttgtcttcagtgctctaatgcaaattcggtatatcaacaaagccctgcagcgtttcgattctacgcaggtgattccaactcagtttgttctcttcacactctcggtgatcattggtagcgcaatactatatcgagacttcgaatcctacacagcgtcgcgtgcggggaagtttgtgggtggttgcctgctcaccttcctgggtgtttattttatcacaagtgggcgcattcgtgccgatgacgagtccacctactcaacggatgaggaagaagctatcggactcctacctggagagcgatatcaggacagagtcgatttgtctcctcctctgcaagctcaaacgaagaatagaccacgaccgagaagccctgatttagacggcactctccagtcgcctccagggtcgcttctcagcgagggccttaggaaccttgatgatgatgatgaccagagcactccccgagccgctctctccgccgagtctcgctcgcctactgggtcggtggttgccgatctctctgaaccctctccaggctcttcatcctcatcccgccctttgtcacttctaagaaacccctgggccgagtcgcttgaagagacagcgtctgaaccagagatcgagcgaccaagcacccctccagaaccggccgtgcacaaaccagccagctccaccatacttcttcgcttccctcctgccccggacgtggatggagcgaatggtacaagggttagtgcccggaccaatcctgcacccgagacgccgccgcggagagtacggaattcaatctcttcacacttctcaccaggacccttgttctctacactatctggcggattcagcgctgtagttgctgactcgatccgccgcggtgagatgagcccagtgaaagaacgaagggcaataaagtcacggggccgaaggaagcatccgagtacgtcgattatcgataacatttcgcgagatgcggatggtgctgcaggggaatcgagccaggacccggatgcgctggtggacagttctgataacgctatcgccgcacctgctactgcaggacactctactcctgctatggagtacggagaggtctcgcgcaacaactcggacgacctgacgacaatttctcgcttgcgcagtttaagcgactcatggagtaaaacagtcccctggctgggaggtgtgctgcagaaacgaagcgaaagccagacaagccccggcgaaactgaagttagcgagggagctccaaaccagtctgatcgcccagcttcaggtgacgcaaatgcttgagctaccagcggtcctgatctgttcaggtacctgccattattctaatgttcttagtacatagtgcctttcctttcaaccttgttggtatatcccaactcatggcgtctcttgcacctttgttcatagcatattagtacccatagtgcaattgtaattagagaaattcatttcacctcttcgttttcatcatcatcatcatcatgaacccagccatttttttgaatccaatagttaaagggaataatgcatagctacttgatgtccggtggttgcaggtgataatttaccggagagtcccaataggtggaaaaagccaggactatcggatcccaaggaagcactaggtcccaaaccccaattggcgaggtcattacgccgtcgccgtcaggggcctattttggagtagtatacatacaccctatggtgcactgagctcatccccagtgtggacctccctttcaactccgcagctgcatttagccgtccttcttctcttcttcgctggggtcgcaccagctcatcgttattgactattctctgatataactg

SEQ ID NO: 2054 - DNA, 2465 bp, Emericella nidulans
tacctaattagaagcgtttggcgtgtggggccagtacctcaaggccgtccctgacatgagagccaacgtcaagcaccacctgtccgctggcaccggtggtggccttcctggcgacgctgctgatggtggcgctagcactggcgatggggaggtcaagagactgggtaacggtctcgaggtcctgggtgatcctggtgggagcagccacaacggaggcggcaagggccgcgagggcagtgatgtaggcagtcttcattgtgatggaagtaaatgagtgtagatagtttggtaaggaaagactaaagttggaatcggacaatagagaacgactggctggttggaaggaagagaagaaagatcggcccagggaaattctgacttcttatatgccgccgggaatagggatcaccaacatcgaagctgtgatgatcactaatatccacatcctagatgcaaaggagcgtttggcccatagccagttggcgggtgaacccgtatgctgggttgtcatgggaccgacatcaataatccaggtacgtatggagtacgtctagggtgtggatatggatatgatactatttgtcaattccacatggtgtaagatgagtgctatatgggataggaatcttgcacgagatagcccgagtccatcagacgaatactgctcttccttgcctgctcttccttgcctgctcttccttgcctgctctttgactgctcgtgcctgcttttctctgcatcttctttgcctcttctttgacggcgattatccgagcctctacggaatacgcaccgttgcccgaacgaaagcagacactagcagaaactcgcagccaacgttgagcctgcaggacagcatgcgtacctattgtgatcaacgttctcgttctcttgagcatcgccgtcaaaccctcgagcttgaagccaccagtcagaaaccgtcaagcggcaatgtagatcggcacctgaaaaatggacgaatcatacaatgtatgacggtcattagttcagggtatgtcccaaggtacatacgcggtggagcgtacggtgggacctatacgacggacttgacggcggcgtgttggccgcaatggatctataactctttaagagtactcggagtatattggaggtacgcactagcaagacatctcgtggatcatttgctggcgaattttccgatagctctccgtctgttgactcagagacatctagcttcgtagccggccatcgagtggatgtctggatatctggctgtccctggctgggacgactgggagtctgaggtgcctgaagcatggggaccgaacaagagtccgtataactctgacctcaacttgctcccgatgccgagtctcggtctgacgccgtaacaggcttgacactttccgaacctgtttttggccccacagaaatgatgagccaagttaagcaatacctcagcgaagcggaagctctggagaccagtgctgatcgtgcaaatccggtcatcctcatttaaccatcctcaccgtactgtcgggcaatatccgccgcccatgtagtaagcttgatcatgcagggagctagggtagcagccagtctccaggttccatcgactcatacctcgtgaggactgactctcggcggtatggtgcaattttactgattctgcattccggttatccacaccccagatgagatggagtccgtaggcattgtggctgcgggagcgcagctcgggcgagcggcaggcaccgccttctcgcagccttgggcaccgtgaatttgagaaaagccgtgcccacgcggaaatgaccttccgagttcttgctttttgttcctctctatgatctcatatcatttaggacctcaaggagaaaggggttggaagctttcttggtggtggagctcaggcacggtgagtggcgaacaggaaatactccgctgtgcgggccctgcggactcagtttgggacaggcgctgacgctgatgcggatatgcggatacttcatactaaggccagactctgatactaaggtttgtttagtctgataatttagtattgactatttgtattagtacgccactttgtcaagatgagggccaattcacctattattcccaagacccaacttgcgcgttaaaattcctgaccgtctcgagtactctatgggcaattgaatacccactgtccctagctgtgaggcaccaaatggaggcgtggatcatcgtctagggtatttggggatttggagttgattcgtactcctaggcagatgtcaagatcgcaaccacttgatgacattgtcttatacggcgatcaggggaaaacagcaagaatactgtgacgccaaaacgtcatggtgtttgaacattgcaaatctggagtcgtcatttctttttgtctatgtccacggtctatcccgtgctcgagatcaaataggctgagaccaataggctttgtcaaaggggaaagggataga

SEQ ID NO: 2055 - DNA, 3089 bp, Emericella nidulans
taaagcacctgcgacaagtcgttaactgacagttccaacaatatggagaactcaagtcgaaatgaaatggacatacgataaggcaaaaaatgcgatcaaagcaactccgactatcaccgcaaatgcgacccagcggccccattcatgccatctgtcgcaacgacggcggccatacccgtcgacccagctagaaggatggttagctcaagtttgcttacttggaggaaaaatggcgaaatggacaagactctcgacaagcttgagcggtcaaatcaccataatccatttgaggcactcaccagtctcgcggtaacagaacacccatagtcgattgacctctggatttggaatccgaatctggagtggagatgacgtcgatccagcagtgcacgagcaagctgctataggtgaaaaaaacagtaggctcgtaaggtttcacaaaaaggtacaggggccaaaaggtcgatgataaacgaaggatagctgcagaatgccactcaatagacaaaggatagacagatggcaggatgaagtggtgcaaggggagaagatcttaaaggcggctaaggcagcagccaaaaagcgactgaaagcccggcaaggctgggctgtggctgagcactagtcccatacggaggatggcgaaacgaagcgcttgacttcacgcatccgcatacgagcggggaaccgcggttaggggcgaggccatggaggatcatgaaaagctgatgatatcgaaatgttgcccaggtgcttttgagcttctcctgacctggatacttggaccctaggctgctagggctatatgtcttcaggtacactgcgagtctccatagaacgcttggcatcttctcaaccccttgtctttgatcagctcactctcatacactaaggtgtcagccctattgcatttcttcagacagtagcaatgacagatgattatttcgcctcggcaaatcagcctgcgatcccttaataatctccactcgtcgtgaatgtggtaactgtcgcatagccctgcgccacttttgaactaacctgacccatcaaccaccgaaatttccgtatccaatcatctacaaggtgtcaggtctggggtaaatgaacaataatcgccttccaatttcattgcaaggtctctaggtggtcccttcggcgccaggcggggttggcctggttaacggaagaagacccgaatggcaactaaggagatgattagttgccgtccttctgcattgccaacgcacacttggtctgtgtgttggctgatgagctggccgcctctaaagcccaccgagttagtgagctggcgacgcgataataaataggtcgcgttccctggtgactggccaatttatcttttgctttcttggattttggccttccgcgtcagaatttcctacagcttgcactactttgtcgtcgcattcgtcttataggctgaaagcctgcctagattgactggattaaatacaaaacatgctttgcttgcatgcatcttcaaggaatcacagattgaatcgcagaaaaaaaaaaaaaataaacgagtggcataagaccgcccgagattggacaatgatactgacccaggcggaaaatcgtaagacatcccaaaatgcaatcatatcgtcaacatcataattggtgggctgcgggccacagtcttggtatctacatggtcatagggcgttcagggcatcagagcgttcaaaagtcaagacggagccggaacaagccagcctgccaaacctcatatgttaggacaaggacgttagctggtcaccggctagctcgcgcaatcagccagtgcaagaccgcgtcaaggtttgtctcctcttttgcactgatgccgtagcagctcacttcgcgccgcgtgatcgatttcagattcatctgttctatcaggtcgtcaacagatagcttgttgggcaggtcggatttgtttcccagaaccaggagagggattccatccaaggtgggcttgttcatcagctcgtgcagctcctcagtcgccacgggcagagccgccctgtccgcggcgtcgacgatataactatccgatgtcagcagtgtcgcaatcaatcatcgatacctgtcttacacgatcgcgttgacgccgcggcaataacgctcccacatgggtcgaaaccgtggctgcccaccaagatcccaactgaggcggttagagagatgccctggatgaatgcaggttcacgaaccatttgagcgtcacatgtcctttttggacccgcttggtattgaagccgatcgttggaatagagctaaccgactcgacttagccagggcacaagagccttgaggcacttaaagagagaacctactctatggtgaattctcctccctataccgatcatagacgttagcgatctaggcaacagtttgggtctggctagtagggacaggcaggacataccgcgagcacacgcaacagcgacgactttccggcattctgaagaccgatcatggtaacgtccatctcggtcgccctgcagatgcataactggactcagccagccgaactctggatactgcggggacgggccgggggctctggtattggaacatattggaacggcggcccacttaccagaacatcctcaagagccagtcatagatcgtccggaaaatacccgccatgttcgtgacgtttcaatgagaaccagatgaacaaaagagatgacgaactggggtggaaggactggctgagaagtgcagctcgttccaaccagggtcggcgggatatattgagatcagaattttggacggcgaagtgggggctcgagcagaatgggttgcgggaaaaaaaaaagggatcctcgctgactgctgctacaccggcggcgagcagacgaggtgcgagcgtagtcaaggtgacaggcgaaacttaatagacccgcgaaatggtagaagagcggcgctgaactctgacctctggcctctgaagcgccgcgagagtcaacgccagatacggaatagacactgctggaatgactgagaacggccccaagacctgagcgccaaagccagcggcaatcaatcaataagagcctggaatccaaacttcgttc

SEQ ID NO: 2056 - DNA, 8953 bp, Emericella nidulans
cggagacggaaaaccaggtgggccttgttttacaacccaagggtgagtcccactgggtagccgcgctgagactgggaccctttgtacgaaagcccaagggaagaatatcaggagggtatagccatggtatcggaccacatgaggcaccaaaagcagcattgcaaatcatgacaaatataacggtaagggatggtgtggcttcaatatggataaaaatgaaataggaaattgcccaaagagaaagaactatagccaaggcaccggaaagaagaatgggacgcctttcctaaccatccacaagataccaaggaggaaccgtcgacgccaagtaagttagaccatttattccggtcatgaggatggcatcacggcccgcccaaccggcggactcgaagacaagcggcgcgtagtatgagatgacattgatcccgttcagttgcgcgagtgcttgtgcggacattgcaataaggacacgtctgttgtaccttttgaacatatcaacgtaagatcgttccccttcttgacgtgtaataagcacgttcatcttgatttccctgtactctctttgagcctcgggattgtgaagatctcctttaccatagaggtttgcaatgactaccataccctcttcatcatgatcattatccaataaccacctacaattagggtgagcgttagagccaatttcacgaattgcgcgttttcgagaatcaataaaggccttacctcggcgattcgcaaatgatgagacttcccaggccaagtaaaaaccccatgatacactgcaaaagcagcgggagacgccaggaaaagtcgctgcgaatgaaactgcaaaagtaatcgacccaaacactagcagcatatccgaagatatttcccgtgaactcaatacatgccaatttgcctctattgtgagggggctggtgatcaaaaattagcatcgtccatagtagccttcttgattagggagatgagggcaactgtaccgatatctcggactgatataccgggacaatagtggacaacgctccaacgcccagaccggcgactatacggccaagcatcatcataggtagccccgtcgcaaaggtttggaaagcgcctcctacgaaaaacaccatggatccataaaggatggttctgcggcgaccaattaagtcgccaatttttccaacgagtaatgaggaaatgaaggccccaacttctaatattgcgacgacagtgccaatttccgctcgcgacggttggttgaagtaatccttgaagtacaagcctctgtctccctgtcagtaaagatagtctcaatttgtacttcagcatgcatgcgggaagacgaacgttataattcccgacatcacaccctgatcataaccgaaaaggaagacacctaatgacacgaatacactcgtgaagtaactgtagcttattagtggcctagtctagaaataccagggtagcagggttcctcacagcaatggcttcccaactaagccatgcgtttgagttgattgccggctgccaggtgacattatgacaacgataaagcgttcaataccagatatatttctgggtggtggttgtgggatttctattttctcaagatcaaagtcgccagcggtttgctgctcctggtagtgcacacgtttcgctcgtttcgtccgtgccctcgatccggctcgaccggaccccccacgacccagggaatttatgaggcggattcggagaggatcctctgcatcagcgatttgttcacccaaatctccagtatcggtccaaagcgagaaatccgtcccaactgagtgagctgaggagatagaagagcgacggctgcctttctcgcttgcagattctaaggctccagcgggcagattctgggactcgaatcgtagaggtcgcaggggtatggttgaggaagtacgcggcgacgacggcgacgacgacgttgttggaggaatgttggcggttgagggctgatgtcaacagccctgtcgttggtggggaatcaaaaagggcggatgactggacgtcaaagttggggtatcgataacccttggtcacaaaaatcgtttcccgccgtgagagtttggaccaaagaatcacattaaaagagcagatgaaccaagacgccctgttggcggtcttgtgatagagaagtaacaaaagggaaacttgaaagttgtcctgcactagaaacaatctactgcaattggacgcaggcgacaaattgaagcggagactcgtgaacaatgtggattgcaacttaacgaagtgtgaacaaatagggaaagcaatgatggtggtcttttggggtttgctcacgagacgagatgaccagcaatgcaggatgacggtggtttctctcgaggttggctagctaggtatccagccaaaaggagacggtcaggcgggaggcactagccaacaatgaagatctgactcttgataggcctctcacagagcgttgaatattacggggtaaactagttgcggcactccagtctcccaggtcgtcagacactctgctgtgggtactcgtaaatatgaggccgcctaaggctaatttcgtcctaaagtgtggttcttgactgctttgggtgtggctgtgacgattgcatatgagcctgagctgagcccccgtcactgtgttctatgctagacagctactttgcataatccggacagactgctaccagacgactaggtaacgatttgggagtaggtggtggtgtgcttaaaccaaatacggtgcggtgccactgtgccaccgcccgaaactgcccgttggatttggtggggattttcgggcagtgcctatggaccatgaccgatctcctggtagcgtagtattagtggaccataccccctcaaatactgcgacgtaccccgtgcttggtaacaggaatcctccatggcaccggtggggtggggggaaacaacggagccgatagttagcagcaatagataggaccgcaaggatatatgcgcagttattatcccaatctctatgaactgttgtaaggatgcgaatttcggtgggcctgtcctatgacatcacaagactacaattgtacctagatgggatcgtgagtaagcgatacttatggggtagtattggagtctctgtagaagcttgtctcaccatgaattcaggcctgataataaagagaaaggagaagagacgacatacttgtgctccaaaacttgattaaagactatcgtatctatgtctagtccatctacaacccggcccacataatactcgaaagagtttatacattaatggtccgctaaaagatacagccgagcagtaaggctcccaagggttgatgacgcttctttatacagccaacgaagcgcgattatgtgaagtcttttgacagtttgttgagaagcgcttcacccttctaccaactcgtaagcgtgcgacaccacatgggatttgctgtgcagactgcaatgggctgtaatttagcagatagagtgtgggacatgccaaaagaactttgaccgcaccaaataagtcctcaacttgagtcccaaaacccataatgggtgaatttcacagatgagaagaagcgttatggcagcagaatatcgtagccatcttttcgtatatatgtggcatctgccatgcttgcatgtttgcggcgcactaactcgaaaatcacgagtccggcacttgtactaggaacttgacgaagggtattgcccaagaaccctcgataaagccatctggtccagcctccagcccgagcagcctttcttatgcaccgcttataagtttcctggtacgctaagtagtatattcgcagcatttgccttctcgaagggcgtaaggctgcctgatggtcaaggtattccaaccgtgcaatgtgaatattttgtatcgcattcagtgggtgttggatgatctgctgggcgacagacgcgagaaggcccgcagctaataagaaacatggctccagagcataatgcggtttgattagcggcactccacggtcgctggactgagatgactgcagatagcccactttttgagggcttgaggacccataatagcgagtaacgaaggagtagtatgcctgcgatttgatgtactcgaagaaagaaaagaagacggcactgccgaaagagtcgcgtaaaaatgacagactccagccggcgaaaataccgcgtaccccgatttgttgtagtttgcgctggccatagtgccacatgctctgataacggccttcgataatatcgctggttctgaggcggacttgcagagcatccaggggggcagctacaacagactgaattgagccagccaccaaaccggctacaaaagtatcgatcgggctagctggtgggtatgtacgtctcacaccttgcgacacaggctcgtacaaagcacctaaaacttgaagatacgaagtatacagcacagctccaaccctattacgacattcagctgcacttttcgtcttcgcccgggattttcagtacacttacccagcattagccagcaaagggggtacaacctgatttggtatgaaccgccagccataagcgcgaacagcatgaatgagtagacccggagtagtggtgtgtagggaccagcgaccaccttcagatagacgtggggaaacagctcgagcaaacgcctaacaaaaaaataattgcattagtcgtcgtgggggcaatgccgaataagaatgagaaagggatcaggatatgtgtaccatgtaactgtgaggaaaacaaaaaaaaaaaaagaaggctgcattagcctacagcaaatgccggaagagaagcagttgggtacctactcaacccgtgtgcgaaagaacgcctttacagggattctgaaataaaaagcgacaagttgcgcactaagagcacgcacaccagcggctgaagcgcctgttgccgcattgctccgcggatttctgcgggtgctggagtcttctgaggtcgacagtccgccgtcactttgtatctgctggctcatcgagtcttcgggaagaacgtccatgttaaactcgagtccgtcgttgagcgcaaacgctgaagttcaataagatgatttggagcgctcaacattggccttaggtagaaacattgtagtgaccggccccgcatataaaggtgatgcaaaaaggcaaaattgtacgagatgaggcagagatggctaaaggattgagtccggatcggaaataactgcaaagttcatcatactcttgatttttccaagaacaaagataaaaaggataaattcctgcttacaacagcggacggtcttctataatgctgtgcaaacaattcaaacattctgattccgctaaaagctaaattgcaaacgccaatccaaaagttcaagacgcgcgccatctctcgcgtttactcccattgcttcgcattcatttatatgcctaaaaaatccacaaggataacaggcttttatcatctgaacctgccacaaccattacatatcatttaagcaacttaaagtgcttttccgtttctgcttctcactttgctaccaagattcaacttcacgaactcgtctaagcatcctttaaccccttagtccttgcgccaacggcaggtccctggagccacggcgccgctttgggagaaggcacatcatgggcgacgagattgtcattgataaaacagccttcttcaatcgtctctcgagcttctatgcagcatggaaggcagacaaacgatccaccaactctgtctttggcggtgcgggatctatcattatcctgatggggaagacggatgaagcaaacagctatcaaaagaacaatgctatacatgtatgctgcttacgtcgtcggttacttattatatctactgatacttttagttttggttactcggctacgaattcccagctacacttttcgtcttcacaccggaggttatgtacgttgtgacaacagcgaagaaaggtatcacctgatctgaacaaggaatagcccaggaatcctctctccctaacttcatgacagccaaacatttagaacccttgaagggtggaaagatcccggtcgagattctggtaacgactaaggatcaggaagaaaagacgagattgtttgaaaagtgcgtggatataataaagtccgctggggtatgttttctatcatgtccagggatcaagatgaccatgcgtggttcgttaacttccgacgctaacaagctatctgccaacagaataaggttgggatcttaccgagagacacaaccacaggtccatttgtggaagactggaagcgcgtatatggaaagatatccggcgatgtagaagaagtcgacatttcgcccgctctttcagccgcatgcttttcggtcaaggatacggatgaactagtacgtctattcacttacaacgtcgataaaagtggtctaaagttttgcaggtgtccataaggaatgcatctagagcttgcagtggtctgatgtccgattattttgtcgatgaaatgtctcgcttgctagacgaagaaaagcaaatgacgcataaagctctatctatgcgtattgacgccaagattgatgacgctaaatttttcaacaagctcgcaaaactaccgtcggaatttgatcctcagcaaatcgattgggcttatggtcccgtcattcagagtggcgggaaatatgacttgaagttaacagctgtgtctgatgacaacaatctggaacccggaatcatcattgctggattcggcattcgctacaaaacctacagttctatcattgggcgcacctacctggttgacccgacaaagtcccaagaggcaaactattccttgctcctaagtgtccatgaggctgttttgaaggaggctcgtgatggtgtggtcgccaaggagctctacaacaaggcaattggaattgtgcgagctaggaagccggaactcgaatcccacttcgtgaaaaatgtcggtgctggtataggtattgagcttcgagattcgaacatgattctcaatgggaagaacacccgggttttgaagagtgggatgacattttctatcacggtcgggctggtggatgttgaagagccgagcgtgaaggacaagaaaaagaatgtctattcaatgatgatcacggacaccgttcgggttggagaacagggacctcacgtattcaccaaggacgcgggcattgatatggactctgtgtccttctatttcggtgacgaagaagagccacagaaacctgcaaaggagaagaaagaaaccaaatcgagtgcgattgcgagcaggaatgtcacgaggacaaagctccgcgctgaacgtcctacgcaggtaaatgagggagcagaggcgcggcgccgcgagcaccaaaaggagttggccgctaaaaagaccaaggagggtttagaccgatttgcaggtaccactggcgatgataatggagtcacgcagaagaagttcaagagattcgagtcctacaagagggacaatcaattgccagccaaagtcaaggatctcacagtttatgtggatcacaaggcatctactgttattgttcccgtaatgggtcgaccagtcccttttcacatcaataccatcaagaacgctagcaaaagtgatgaaggggagtacgcctatcttcgcatcaactttctttccccaggacagggtgtgggaaggaaagacgaccagccatttgaagatctgtcagcacattttctaaggaatctcactctcagatcgaaggataatgatcgatttgcgcaggtagctcaggatattactgagctcaggaagaatgccctgcgccgtgagcaggaaaagaaagagatggaggatgtggttgagcaagacaagctagttgagatcagaagtttgtcacccttttatgacatatgcttttgaaactaatccagagtcagatcgtcgccccgtgaagttgcctgatgtttaccttcgacctccgcttgacggtaaacgagtacccggtgaggttgaaatacaccagaatggtcttcgctatgtctctcccttccgcaacgaacacgtcgatgtgctgttcagcaatgttaaacaccttttttttcagccttgcgctcatgagttaattgtcttgatccacgtccatctcaagactcctatcatgattggcaagagaaagactagagatattcagttctacagggaggctaccgagatgcaattcgacgagaccgggaaccgaaggcgaaagcatcgctatggggatgaagaagagtttgaggccgagcaagaggagaggaggcgtcgggcagctttggacagagagttcaaagcatttgctgagaagatagctgatgctggcaaggatgagggtgttgatgtcgatattcctttcagagaaattggcttcaccggtgtccctaatcggtcgaatgttctgattcagccaaccacagatgcactcgttcaactgactgagcctcccttcctggtcatcagtctcaacgaaattgagattgcgcatctagagagggtgcaggtaagttaacacagatattctagtcattcaggcggggactaaaatgctgtacagtttggcctcaagaatttcgaccttgtcttcgttttcaaggacttccacagggcaccagtgcatattaacacaattcctgtggagaatctggaaggtgtgaaggattggcttgattctgtggatatcgcgtacacagaagggcctctcaatctgaattggactacgattatgaagacagttgtcagtgacccgtacggcttctttgctgacggtgggtggtctttcctggctgccgaatcggattccgaagacggctccgatgaagaggaggaatccgctttcgagctctctgagtcagaacttgccgcagatgaaagctcagaggaggatagagactacgatgacgatgctagtgctgacgatgatttcagtgcggatgaagatgagagtgacaggactggca

SEQ ID NO: 2057 - DNA, 2295 bp, Emericella nidulans
tacctccctctacatatctctacatcagcttatcctccttaaagctctcactacctatctattctgccaacttattctagggaggccctccatcacaaggctcaatcacgctctagacgaagaattggattccccgcactcgtgacttttagtcatcattccgaggggccacccccgcggctacaatgagcgcaatcctgtccgcagacgacttaaacgatttcatctccccaggcgtcgcttgtataaaacccgtcgagtcgctcccacagaagcagtcgaatgaggtaagttagtaatcaatctgctcgcggggtaggtattgattggagtatgaatagaatccctacgaagtcaccacagaagacaaagtgcaaccagaaaatccccctccagcgcagatctccctcaccgattgcctcgcatgctccggttgtgttacgtccgccgaggcagtgctcatctcgctacagtcgcataatgaggtcctcaacaccctcgatgcgcaacccgagattcgactagtgagtggcgagaatgggacagtcatagaggacagtgggagaacaagagacgaagggcggattttcgttgccagcgtcagtcctcaggtacgcgcgagtttagcagctacatacggggtttcggagaaggaggcaaatcatataatacatcagttcctcagcggacccaatggtttgagggcagggggaaagcacggcagcggtttcagctgggttgttgataccaattctctacgcgaggcagtgttgggtctgacggcggacgaagtcagcgagtcattgacgggctcctcggcgcctaaacgaccgattctttcatcagcatgtccaggttggatctgctatgctgagaaaacgcatccatttattcttcctcacttatctcggttgaagtcaccccaggccttgacgggtactttcttgaagacagtaatcagcaagaagctcggtgtacctgcttctcggatttggcatctatgaattatgccttgttttgacaagaagcttgaggctagccgagaagaactaaccgatgccgactggaatagactctcatcgggggagccaaatacgcctgttcgcgatgttgacttgcgtatcacctgacgcgaactactcagcttagcgtcatctcgagggaatttcactgtccaacctaccaaggaagagcctttcttagtcgctttcgctacctttgccagacccagtacttaacgtttttcttttctctgagaagtcgttctcacgacagacaagcgcctctggtacctcaggaggttacctgcataatgtgctcctgtctttccaagctcgcaaccccggcagcgagattgtcactcagcggggtcggaacgcggatgttgtggactacaccttgatgtcccctgaaggtgaaccgatactgaaagcagcccgttactacggcttcagaaatattcagaatttagtccgaaaactcaagcccgcgcgggtatcccgcctgccgggggccaaggtagcgaccggacaaacggccggaggtcgacggcaaccaatatcacgaaacggagcctctgccgggtcgagcatggactatgcttatgtagaggtcatggcatgccctggtggctgtaccaatggaggaggtcagatacgcattggtgatgcgagggaattcaacgcgcagcacgatgcttcagtgacgtccgaaacctcaaagcccttaccacatgagcagcgctcctggcttgctcgcgtcgatgaggcttactactcagctgattcagatatggatgacgcggtagaggatgtacgaacagtttcagtcacagataacgaagatagagtccacaagaccctgcagcactggtctgctatcacggatattccacttgaaaagctggcctatacgacgtaccgcgaggtggagagcgatgtcggcaagccaagtgcaccgaatgatacctcgcgggttgtggagttggcagggaaaattggtggtggttggtaggtcggagtcgaatggtcatcacgctttacgatcgatatataccctttgtactacgtttcgcattggtatactgcatgggatggtttgcataagcatagatttagagcgataccaaaatattcttgggtcttgcttttatctcgtgatcctacagtattgatgtaaagtgattccaaaatagagttgaggctacagggctgggctgtaaagaggtcatgtatgaatggtcaatggaggagcccgtttaaagcgcacctcagttgtgccttctctcgactgtcg

SEQ ID NO: 2058 - DNA, 2654 bp, Emericella nidulans
ccttgttatatactgaagaggagatggagggcactgccgagacatcatctgtcacgaactttaccggatctaattggcgccaaccagttcatgctgctaatacctcggacaggtccgcatctggccacgtctcttccatggatggaggacggtcaccaaggatggaccctactcaaggtaaggatgttcgctgtactttctttcgcatggggtcagctaacctcttaatgtagctatcggctggtctcttagtaacgcaaccaattcctcgcagcccaaccttagtctcctctaccagatgcctgctgctcaagcaaacgaacgcgtttctaatagtcaatctcacgcttctcgaactcgccatggctaccccgatgtttcagttcaatcagacatcgagcaaagctcgagctcttatgcgcgaaacactgagcgcacaaatatttccaatgtggctcatgatcatttggtttctccccgccgagtcgcagcctcggaagtaaatcttctcggtgtaaattcctcatatcctcatcctgcaccgcggcctccgaattctcagtcagcgcacaatcagagcattcaaatctcatcttcatcaggcctcaaccctcaagtggcagcatatagctacttaccatctactacagctgatcaccacaccagtgatagccacatggcatcaaggcattctgatactcattcaagcatgaatccgcaggccggcgatttcctaatcgagagtcaagacatcgatatgtctgcccttcaccaacaagaccagctacctcttcccttcactcaattaccttggctggagtatttaccccaagatgttctcagctactttggcgaacaccaaaacttccctctcatgagcactaatgaaggtgctcctcctccgcctcagtaaaactaactatatgtgtcacacacagtcaactcttacgtgttatgctcagcgatgtcattgatatgttacagtcaagggcgaaggtaaccatggagtctttaggtcattacatttttcggcgttggaatatgatgagcgcacaccattggtactgctttcttgtatcatatacatataatctaccagcgtttgttgcatggaattgactttaaatattcaatctatatctactttttggtggtcgcgtgtcatactttgctaagagaaggtctatttaaccgcggcggcgttgtgcggctcaactcgtagttgtattcgtgatggactcggacgtaattgtacacccaacagctcttatatgttgtaggaatcaagatatcctctatcgtaaggatgaatgagcggaaggattgtgggcctctacattgtccccttgtctagatcggagcctcaggctcgctccggttgccagagtaacccacccgccaacacatcaactgacaccgactatcacctcgtgaacttgaatggttatcaactctttcgagttctggagtgccaaattatgggctctggcagtatcatttccttgattcactcacctaaggggcgagtacattgatattttcctgtgtcgatttcgctgcagtaggtcttgcttccaagccgttgttttggctccgtactaaattatatatagttggctagggaaaacacgagtctatacaaatttagctaatacaagtcacgactgaaaggcagatggaaacatcagtagactctcagactatacatctcaaggagaaagcgaacccaagcatgtctgaccatgaggcgactacgatttccgccgctatttcagacccggccaactcagaaaaacaatcggagcacagcgatgaaagcagttttgacagaagcatgcaagttgcagcacaagacagcgggtataactcttctggatcttcaggccaccattctcctgtcggaacacaaaatggcggaccggaggaaggtgaacttgttcggatacggtcgagaacatcaagctgtacttcgatttcctcaatccctgcttcgacattgaccagcccggcaggtgagaatcgacgaatgaatatacgcgagggacaggactatatggcacagccgtgggaccatcacgtaccgcagctccgtcatacgatccgtcagcgtgaaggtacatttcgaaaacctagctcggttagggcgctgcaaatgcatacggaggatgagggcgatgattattaccatctgacaccgcctaaacgccggggtagccaacggacttccgatatctccattcgctccgctggttcctcgccgttcaagagatccccgttctattctccaacgggagcgaccgcgaagccgaaaatcaagaaggaatatccccttgttcttcttcactgtaccctgctgccaccgtcgctacctgtgtctggtttgatagaacatccgaaccgtcagaatattttgaaagagggcttgccctcggtgtactggaggaggtggaaactactcgaggagaagaccgggtctggcgttattcgtgaccgtggtattctcatttcccacccggaagacggatatgaccttcttgaagagcggttactagagagcttggaactacagcacccccggttagaccatggccaatttatcggacacgatgaaacggagtcagatggtgaagaccgcttggtaccggaggatagcg

SEQ ID NO: 2059 - DNA, 2140 bp, Emericella nidulans
  unsure (1)..(2140): unsure at all n locations
ccagaacgcccagaatgtgctgtctaagaaactcggcggtagtctgtcactgttctgttttcgttgcacactggtggcgcgtttggagaagagcttcatgaacgccacgcggcggtggacattcaagtatacgcagtctgtcggcatggacaggagctcgtcgttgcgttgcaccaggaactgcgtgtgggcctttctgtcttgcttcttcttgttcttctttcctcccttctccttccccgtgctcgaccccgattggacctgctcaaattccgcgtttgccttttcgatctcatcaatcacagaccaattctcattctgtacggacggaaccaacgcaaggagtttccgcagcggctcgcccacaggtaccggtaagcacccggcgaactggtcgtagcccgaggagcagtcgccgtggttgtgcagcgcctggccgagagagccatgtgcgtcaaggatgtggactttttgtggcggaatgcctgccagttggattaggtacagcgcggacgcaagggctgcggtgccgctgccgacgatccaggcttcacgttggtttttggagggccggttttcttgcgtagaggccatgctgattactggcgatgatgcgtggtctttattaatggaacagggggagatgcattatgtacacggatacaaggtataagtagctggaaattatcaggggttagattagtttaaaaataattagtggttgaagagaaggacttatagtggtcgctctcagtacctggagagctttggacaggtaaccgggtctatggtccgcgtgagcgtttacattgggggtctgatatcatcaagacatatacagcgaccatgggttcggttgacaccgtacgaggtctggagcccgggaaagaatgggtagaccagatgcgtcttttaattgaggggtccagctgtcctccactgatttctggcatttggattgactatgttaccatgcatctcgctgagattctgctcacacatatggatgggtgaatagtcgatatgcggtgtcactacctgatatagcttcaatcgcctaccgtaattgcaaatttgtaagccagcggcaatgcaatagagaatgcatatgcaaagaactataagcacatctggccatcgtggaagtggacattcttacggatcaagcttgccatcggcaatttgcagaagaataattgaccagactcagagaatcaatagctacctttttacaagagcaaacattaggaatatgatattttgttattttctccataacaaatattgattcctagttacaaaatagccaatacatattatttagtgtacacaaatacaattactcctcatattctggctcctcatcctcgagctgctcttgtccctgctggttgtacttggacgcactgcccttcccgctcgcgacgcccccagcgtggccgccgaccttgccgccctcatggccagcctggtgcgggtcgactttgccgtaggcgaactggtgctgctgcgtgcgcttgtctggctggttgtcttcacggcggccgccgtgctctgcatggatgtcagtacttgaaagttattgagaaggggaaagacatgggatatgtaccgctaggcttgtacttctcgccggttgctgttgagccttggaccatttttgcggtttgttggtagattggtaagagagattaagagtgatgaattgattgggaatggtntgnnnngatgggaatgggcttgttaatccaatggagagggagctggtaactcggcggccttaataccaggtagaatacttttgcagggcaataagccaaatttgcacatggccggaggacatgggtttccatgccgaaagcgctttaccagtcctgtgaaagaactcaggttcccattaaattctaacgaaatgaagcccggattgttttggaacgggccaaactacctgggccgttcgggtttccacctattgttttccgggacataaaatcactagacaatttgcaacatttttaccaggggttaaaaaaacagtctgtgttttacacaaaaaatactttccaaagtccttctctcaacacccctctatttgttccatctatcaattaccaaagtctattctcttcttccccttata

SEQ ID NO: 2060 - DNA, 1819 bp, Emericella nidulans
cttcctattgtatcatcaggtaccagaccctcccgggcacatagactcaagtacctacaggatacgcatgcccacatgtacaagaatgcgcaggctgccacttcacatcttagccttgatcgactcgtagtactccttgagcttgtccatgtctgttgcctgagcaggccatccaattccaaggccttcctcctcgttgggcttggggatctgtaaaagtaaggtttagtacagtgaaatgaataccagtagctgaacgtaccatgtggaagtggacctgcaaaagcgttcattaggtttttggaaacgattaggacagtacagtggtgatggagctgtgcaacatacatgatcaacaacctggtgcgcaatacgaccattgttttggagaacattgaagtcagttgcgccggttacttgagcgattttcttagcaacgggctgtttgtcgtcatctgttagctctctccaatatgaaggcccatttgaaaagccgtggatgtggattgagaccggtaatgcattgggcgggaaaggtcctgggggtggcggagtgtatcccgcaaggtacttggattccgcataatgatatatattgaaggggtaggtatcatcggtctcttcatcatccgctatctctccgcatgggtacgtaccaggatttcagtgaggtggtcatcggggatatcggtgagctttgcgccgtggtacttggggatcacgagctgttgaacagtttgcgctgttagcttcttctcgacatccactttacggaagcccctacgcggtggacgtgttattcaagaacggggagtgggcgtgcttaccgcatgtccacgactgagcggctggatgtcgaggaaagcgaaaaccttgtcgctctcgaagagcttgaaggaaggtatttctcctagttggagttagtttcacgcattgaaaccatttactggcttcttccagtgcgagaagcgaatgctgtttacccttgatgattctgcagaagatacaggcggccattattgcgacaggtgggaatttcgattgacctagcgaaggaggaggcaattgagcttgaagtcgtcaccaaagacccgatgcggggttggcggtatcggaccggaagggtcagtccactacctgcaccactctacactcttctgggaaggtcgctcgaacgcttcacttggagaaccagattcggggatttctgaaggccttggccaccgaaaacttttcttatcatggtttagatttgctttgttttgtttatgatttgatagcaatgccgagtccaacatctaaccccgcctcggataaggtatgaagctgctatagttggagtcgattcgtccctagggaccttatcatccctcaatgcacacttggacatcttcttatcttgtcttatatataagattgctacactccgccagtgacactcgaaatggctggtttcctgcaaccgagaggttctgttgcaagcgtaatcaaactggcattccgatctacccattttctccctacacgagccccatcttcatatctacgacgcgcattttccgtctcctcaagtttacccatgttatctacagagctgactgaggcgcaagtgtcggctttgagagccaataaagaacgccttgcagaagaccttcatcacacctgtcaatgggggtacggaattcgctggggagagtaagtatagtctaccggccctcgtggcataaagagccttcatcaatctcatggtaatttagtggccacacggacacaagtatgcagcgcttagcgcagtcacaggaggataagcaagtacggg

SEQ ID NO: 2061 - DNA, 3220 bp, Emericella nidulans
atggctcatctgacggaagccaagagactcgtacggcatggacgcaacttgtttatcctggaggtagcggatgagatcaagaccagtccatttattgccaaagacaactcgcacggggatcatattcaaacagggcccgacagtatcttgaaccccaggaatggatgcattgcgtccattaacagtcaagccgaagacaacgtcagcatcagcagaaagcttggccagcgccagagcccaagcggcctgaactagggtgccaacggtaatgttgcggatggtggagttctgagagatattgatcgtcgtccgaacttctgcataagtgcccatcgtctgatatgtgtttggatggtctctacagacaacgtccgtcattctagagccctgcaggagctttgtccaatatccatagtgttccggggtgattgaacttggaagcaggcgcatataattagcgtaagacatcgtaggaggtagagtgccgccttcatatccttgcttgatggcatcgaggatcttggagatgcacattccatcgtactgggcatgggagagtcgaataaggaggcggtgctgggtcgtccctttgcgtttcgctagaatgaattgaacgaactgctcgccttggcgaagaccctgatcgcgatcccgttgctgaaggctggtagtgaacgtgtctagatcggtatgggtctcatatatgacgatggatggccggaccttcttgagaatgacctgatagaagtggtccccagagcatacaaagacggttcgcaggatatcgaacgcatccacaacccgggcacaactttctcggaggcgtttgacgtcaagctggccttccccatcgagatagaagtagttgagcatccaccgggattcaaacaattgtgcggttaaagacagagcctggaagtccgttactggaaggacatccgcaattccccccttgaaaaagccgattttggggcagatatcggactgaagaacgtctgactcgatttctgggttgtgggccagttgtagagactggctggatatcaccctgcctgagatgctgagctcgtccgcgctctcgtctacccgctgagcctggaattcgtcctcttcaatagactccttcgttgctacaggggctgcgtggacaatgtttgtggagcaaatgaccgccagcatgtcttcaaagatggggttgcggaagacgtcagcaacggtaagcacaagcccttcctctcgggcagcactcgccatcttcatggctttgatactgtctccaccaacacggaagaagctatcctgcttatccaccatgtcggcaggtacatccaaagcagtggaccagagaagcaggagcttcctctccaagtctgacgacatgcggcggcggctggcgcgagaaatggtggaaaagcgacggcggattgatgtcattcgagagacaggggaaacgggcggcttcaggaactcgtttccgctggcaaagctctttgcatcgtctggggaaaccgggcattgttccgtttcctgaacggctgccaagtcctccttcttgaggatttgactcagtatctcgttgacgcgttcatcaatctgctgctggattcgggggtcattgatggatagcttcgagcttcgagacctcacactgctttgtctacgcaggctaattcgagagcggagatcgtcatcctgctggtttgggggaaggctaccattgggttcctgcaggctggagattgacccagatggactctcaataaaggacacgaagactctggcaatgcccgctaccaatcgatttgcttggtcggtcgaaatggcatcggaccaataccggacgaggatcccttcgcctccttgagctgttaccacgttcaccgttacgggaaactggagatggtgaggactaaagcctaacaggttattttgggtcatacatacctcgctcgggtcgtacgctttaagagtgtcaaaagacaacccagagttccttgaactggccgatggcatttggttttgaatcgaaagggctgtgttaaacagcatctgaccccctaggccgagctcgttctggactgttgctagagagcaggtctgataggggatgctgcggaaaaaatctgcttggaccttcctgtagatgtcggcaaaggattggctgggtgtgaattgaacacgacaacacagcatgttaatataaatacccaccgcgtcctgcattccagggaccggggcatcgcgtcccgcggagaggtagccaaagcatacgtcttcggtgcgagtgaactctcgtagcacgagtgcccatgctgcgagcaccaaattggcaacggtgacggattcacgtcgacttacttgacgtaattcggcgaaacggtggaagtccatcttcacagacctgagctcccggggtccattgctggatgttgggagatgacaaggccgggtgccacatagatattgcgcccagaaattatttccttctttcaagggacttgtgcgcatgtattcaatatagtcgcggtaccgtggccctggctcggatgaaagctggcgttcgtatgctaacgagaagtcccttaggagaatgccaacggatgcgccgtcgataattgcatggttcatttcaagcttcatgacagcgcggccatcggggcccttgcacacggtgagctgatggagtttcttgagcggtctcttgtggttggtctgctcgagcgagaccttgtctagctgctcgagcacattggagccgtcgcagtcgagttctacaagatcggcatggaggtgcttcaggaccacttggtcaaaggacccgttcttcgagctactgtccacaaagatggttcgaagaattgtgtgccgattaaccaccatttgccacgccttccgtagtcgagggacgttgattggctggttatttcggttgtccctgatgtcgaagatggtatgcagtatataagccgaggggtcccgaagctggctgaacaggatgccttcctgcatcggagagcatggataaatgtcttcaacctcatcccggctgtggatacccagtctggggagagtattgttgaagagagtctgcaggctgttctgggagattgacagcaaggggtagtcggagggcatcacctcaagctgagctggctgctgcaggatgtctagagcctcatacatcgtcatttcgcattccgaaatccagctgctaatctta

SEQ ID NO: 2062 - DNA, 1524 bp, Emericella nidulans
gcacgaccatacagtccaactctgtatgaccaaagtgcgtacatccactgacctgtccctgcagtgagaacaataatgaggacacttatcacacagtaggcacagccggcacatgctatctaatgcttttggaaatgtggattgtttgctgtgcatggggtcagtacacttcccatacagagcggacgcggtgtatagcgtatactaatcatagtcacaccacccctcttttcccttcaaactttcaagtgagtttcaaaatctttcggcttttcccctttcctttagctggggtttgtccccgacctcaggctttgagcgaactgaagaatggtggatatcctgagcgatatacggttcaccttcctacttggaaagagtcaaaggctccgcttgcacggagacgggcagaacagcgtctgcctctgtcaaatgatcatctccatgagtccaacccccgaaattagccccctgagggctgaacggaagatatccagctactgtatccacgtgaagtgggctcctcttatcggttgtctcccggaccaagatttggcgtgaccggagaaccttgaccgatttgacgaatctgactcaggctcaacgccaagttgccaacagacgccgttatggagctagtactgagctagtcgttcctgctgcgccgttgacaggtcgacacgccgacatcgtgcaggcatgattccagtacgatcgaaggggcgcatcaactaatcactgcgctcgatagcctcgatcagacctgcgccatctttcaagccggtacgccgtacgactactttattatactttgtaaattattgactacctgcacaagttgatgcgattcatctggcagtcaaaactgagaagtccgtgccatctcatctgggacgggacgggaagttgtatgataactccaccagacaccttcttgcagctccctccaaggggtcaagttgagaaaagcaatgaacatcaccaactgcgtgcctcctagtcagaatggcaatttgcaactagcagagaaaatcgaccacgatcgcctggaatggggcttcgttttttcccctttccatttaagggatcgtactcgttggcgtctcaacggtcatcccgcagaaaaccgccagaacacccaatcccttttcgagttcccggaccgttgagcgcaatccactttgacctatcatcaatggaccccgactgtggctcgaggatccgatccacttgcgcgtggttagaatttgaaggaggggagggagagaaccaggtggcgtagcctcgcaggattaattcccgccgtcagtgccgcttgaaccgtgagtggaggacaaggtaagcagcagccgatgccgaatttcctttttaccggcctgaagaaatcttacatgaaaaagccagatttgttcaataacgctaggaagcaatatgggagggacgaaggggaaaaaaaaaaataaacactgcgacttgcgccggtgtctgggtgtttcaccgctacatgtcatccaacctcgggtg

SEQ ID NO: 2063 - DNA, 1586 bp, Emericella nidulans
ggcttcgatattgcatgcactttttggatgggatcaaaaatgggtgaggcaccaagtcacgattggatcggcccttttagctatattctcttattgcttatagtccttgtatatcagtactactgtaaaaacatcaacgacaaaaattattgagcgtcttagcccttcaacgtacacggtattcaccacttctgcgattcgctccgtcttcgtctgctgcagtgacagccatcagctgctcccgcctctgcttcatgcgtattttaccggcaaggctttcctgtctttctcatgaagcttgttgaagccgtcaatccgcagcctatctggttgagttcgccggtcaaccgtactgaaagtagcattgaggggcagaacttattcgtttcgagacagcaatgaattctcaagtgacacctatatctgcccagctgttgtctcttcattcttctttggaccaagtttttactggagtacaatgaccctgtaatcctaccgggtgggcctgatctggccgtcggagaacgtagggtttccctactgccctactgccctttactaggccattatcctgtccaccacctttcgcttccggcttttctttctttcatactttgctttcctccttgaaattgtttacttctaccattgtctatcagtttcttgttaagccacctctggtctcccgggtgggtatgggccgatcccaatttcgcagtcttggcacttttactcgaagatgagggaaggtcaatcaggctcagcctcattgagcgataggccgccaattctcaacctagcgagtacgagcttaagcagtttggcggagcccctgttctagaagctgtccagctcggtgtcctgtatcatgaagcgcattcgatcgcttggctggcgtcagggttcgtccaacggcactgaatccacgatcactactgggtaaacaccccgcaagcgcctgggcagcgaccaaggtacggaaggtccgggctttcaaaaattaccgcgggactactccggagtcgaccgttaagcagggtcgatgattgggtagtgctggcgaagcgttgcatttgctcgggcttttaccggagactgcggagtccccaattcttggcagtccatgaagcggagtataaaaggcgtccggcaagaagatagagtatcctgtagaccagctcttcctcactttgtggagtcaagatgcgctttcagcagctgcttccatgggctgcggccctgactggctgcgtcgtcgcccagagccaggccggcgtcgatccgctcgaccgtcccggcaatgacctctacgtaaaggacctttcgaactgcactgggtacaaggtcaccaagcattggaagacccgatccggtttctatacggacctggcgctcgccgggccagcatgcaatgtgtacggaatcgatttgcccaagctgaagctcgaagtcgagtatcagaccgatgagcgactgcacgtcaagattctggataccagcaacacagtttaccaggtgccagacagcgtcttcccgcgcccgggcttcggccagtggtgctcgcccaagaactctaagctcgaatg

SEQ ID NO: 2064 - DNA, 1780 bp, Emericella nidulans
ggagcgactgttgtttgtccgcatattccgcaaactcgctgagcgcctggagcatggatacgtagttagcggaggccgcaaatgaggggtactcgaggcaggacaacaactcacgagctcgcctcttcgccggtcttccagagagggttttaaagagtccgtccgcatgatccgtgtttgcgcccagaacgaagtagttgacaagcaggtacaatgatttactggttcgcgaagtcggtgtcgttatatgatgctagctaaacggtcggaaacgagcagtcgccaatggcgtgttcagacacgtattcgtacgatcattcttcgagccggagccagaaataaatatatgaattttgagagacaaacgcaaagtagatgtggttgtaggagcagaggaagggattattgtggtttaaataagagctggggagacggggtgagctttatcgatagcagcccatttgagtcagtccaactacagcggcactgcacaacagcacaagacactaaaacacaacttgcattgactcagagaagcattgccctcgtgaggtagtactctgccatagattgatcctcagatcgatgactaattcattatgctctatcaatgaacctccaagagggggaataaagtatcgcggttaaccggcgattcctatgctcctggagctttaccggcaaagccgtataagcgacagaaaatgggaagttatcaacgccagaaaccgcgtccgaaaccgtgtccgataacctgcaactaagtctcggtcattcgtcgaattcgtagccccagtatgatggctcgtgaagtcggagactcgttatggcaaacagtccccgaatgaagtgcgtactctttctaaagttgcaatggatcacagtttgaatcaatcaggcttggggagatattaaaacgaccgagtcacctggccgggtcagcggcagcctaattattatatgaaatcgatagcgcacctcgaacgaacagcatctcttcctgtttcttgatcgtctaaaaagtcgaaaacaaaaggtgttaatcaaattcttcatgatgccgcattggagaggaagataatcagcgtactcggatgtgctcttgctcgttctcgtcctcctccacaacgtagattgtctcctcaacatcacctagaaccagattgcaatgactgtcgtaagcctaagagcacaattggcattagcaaaagtcctgaagccagctggctagacgatagacccacgtgtaaacgacccttgagctcgcgatcaccccgcagcttgacaaaaacgatctcgtcgagggagaggcggacgaggtccaaaggctcggatacggatgaggtgcccgcgccctcggtgtcggccattttgttgtagatggaggggataatgaaaggagtgggtaacagggacacagctctgctcgtcagacagatcggataagacaaaaacgcgccgagcgccaagactgaaattagcgccattttcctaccccggacttaacacgggctagtaacacaccactactggaccgctactggcgctgcatcttactgaaggacaaagcgtaccacttagcagccagacataatggcaataccgggcagtgttttgaccaggggaccctgtaccaccccctcatctgcaccatgttctcctcaccctccttttcaccttttcttgcctttctgctttctcgtagtcattctcaatgaggttggttttacaaagtcgctctttcaatagtgtcagctctgctggctctcttagccgtcat

SEQ ID NO: 2065 - DNA, 3015 bp, Emericella nidulans
ctggccaggaagctcctcccagcaccatcgtccagtcgactgttgaggaggctactgcgcctgctgaggctgcgctgaacctgagactactacctcgacttccaccagcaccagcgctgctgagcccacctcaactgctgagcccgtagcgccaacggccgatgccaacgtgcaggccgccgcccagccaaccaccaccaccgtctccgaggctcccgtccctacaactaccacccaggctcctgctcctatcattgctgtcgagacttccagcgaagacccgagccagtcgctacctctagtgccagctccggctccagctctggctctagctccggaagcagtggctcttctggaccttgctccgccgactctccctgcgttggccagatcactttctacgacactgccacttccgcgagcgcccccagcagctgcggtacaacgaacgacggcagcagcgagaatgtcattgctctccctgttggtatcatgaccgacggcgactgcggaaggaccgttactatcaagtacggcggcaagaccgccacaggtaccgttgtcgacaagtgcatgggctgtgacaacacctccattgacttgtcgcgccacttcttcggcgagttggcctccttcgacgcgggcagagtttccggcgtcgagtggtggttggactagatctgctcttttaccatatcctcctcatcctaccgttcttacattcgctatatcatactttctatacttcgtatctcgtgggtgactcgtccagagtccctgagaccattttatcattcgtgttcataaaatttttgcggttgttgcaaagttatccaaccaagccatttgttatttttcatggaacaaaagcagaacggacgagaatggacaggatctggaatcccgctggttttatgatgttatgaatcaagtgttttcggcattctgtagtcttgtaggttaacttgatccattgtatgaccgttgccagcgtaaactgtcggtctgactttgcaatgattggcgacttgggaccggtggtctacttctactctaaacccaattatgggttgtcggcggtcagctgaacaggcctgtgagttgtcattgcaagattcaccaccaataatggaagggtccacgaggtatttgcccgaagaccggtggcgcgatactggatagcctcaagcggtcgcttccccgggttcagttccagtgggttggaactaattaagagtccggggtatctttctcggtcgacctccatgagttgagtgcatcatcagcattattgggccattctgttagcggtttggaatccttgggactgggggctcctcactccaattgggaatccacgattcacagacttttaaccaagggtcaagcctgagagttactgagtattagcgctttagtgagatgtaatcccttgacccacgcggcacaacttgccctgttttactcttcccctcgcttccgtctggtcctggacccatttcccctttgggtctcgtctcttcggcccttgaaccttctctcaaccccagaatctccctctttttctctgctcgtgtctcatcgagtcctgacctcttcctttactttccacactctcccactctctttcattaatagcgtgggattttggatatctctagcggccatggatttctcgcactttcctaagtgagccgttacaccatggaggaccgcagacccgaagtcctcgttgtctccatcgttttctttagccttgctaccatcttcgtggccctccgcttcgtctcgcgcatctgggttgtccggagactcgccctgcacgactatttgatgctcctggcgtgggtatgcttgcatggcccaatcatctaggtccgatcgcatactgatttacttttttcaccagctcattgacctggggttttccacggctctcttttatgccactaaaaaagggcttggccttcatgatgttgacatccctgtcactgcaagatcggctctcagcagcgctaattacgcctttaccgttctatatgtgagtctttttttctctgtgcagcggccgggattttccgctcatttccgcgcgcttcgctagaatcccgccttgatggccgtcaagtccaccatcctcgtcttctacctcaccctcactcaaggcgagaagatcttccgctacgcaaactatgccactctgtttgtcgttaatgccgccggcctggctctcacctttgttaacatcttccaatgccggcccgtcgaagacgctttcgctgcgcagctccctgctgacgcgcattgtaccgatatcctgaccttatatttatcctcgtcgccggtcaatattatcaccgatctagcaatcttggttcttccgaacccgattttgacgcgcatgcggctgccgcagaaacaaaagatcatcctcgtcgttacattcagctttggttttttcgtagctgtcgttgatgttatccgcattgcatatttgcaagaggctacaactgaccgagagattgctctccgtcaaatccacatgcagaattatggaggggaggactttgcttgtatgttttaggcggtcttttttcccccaaaaccaacactgatctcttcagggtatgcatcgctctcgttcatgtggtctgtcgtagaggtcaatgtctcggttatgtgcgcctgcgttcctagtctgaaaccgctggtcgccaggttggtcccgaaattgatccgcgacagctctggaggcacgcaaacgaatccatccgaccccccgctcccgccgtcagggccactgcagatgcaagtcgcagatgccattttcagcgactcactggatccgcggcttacggagattgcgacaggacctaccatggctacgacatatactgaccccgaagccaacacgaccacacatacgagcacctcagacccgcgcagcatgactttcttcgattttgtcaacatgaagaagccggctaatatgctaaaattgagtaacaaggagtc

SEQ ID NO: 2066 - DNA, 3568 bp, Emericella nidulans
cacccctcagcgatacattgtctcttcttcccttctccactcatcaactggcgctctcctcgtatccgccttgtaaatgacctaacaatccttagttgcctcacagctttccaatgcagtttagagagttatcattacacaacccaattatagcgctgcgaagcgactctggatttttactctagcgttcgtacctttcacttgcactttttgacattgtctggataccagggtagactaatgatgaaatattttgaatgactctcaacccggatgctaaatgccaaagttgcaaatagattcattctgtttatgctaatgcagtctgtcagttgaaaatgcatagatagatggcactcaagtaaatagtatacatcacacatactgcaaaacaacgtatagatagagtacccaccagatgcaacagatgcagagactcgaaacgaaaacaaaaagcagccaagggagaataataacgcaatgggtaaaataaggccgataatcatcaatctaaatcagcacaatcccttctcccatcttcaagagctctagtaatccgctcaatgagcaaatttgggttatccaagacaatattctgccgccgccgcagctcttcgaggcggacagtaggattctgtataactccagtataagtacgtcgctcgtaggagatgaaaaagcacatcaaccgtaagacgcacccagtcttcctggtttgggacgcccttcgccgcagggaattggggcgttgtgtaatcgtctggattgcctactgctggcccgcggcggattggggcaggggtaaccgggaggctaggacgttcgatttcgctagggaaatcggttatgcgggtgccgtaattggggcctttggaaccggtggtagttgtaggggtgccgggttgatgttgtcggcttgactttgatgggaatgctgctttctgttggttgggtgcgccggagagcacttgaactcgggctctgcgggcttgttgtatggatcggatgtacttttggatttcgggaacttcgtcccatgcgtttgagcgggagtatgagtcaaatgattcgctgggaaggctgggcgcctcggacttccaaaatgttggttgggtggatttgaaaatttgggagtcttcttcggtaggcgtaagggaaaccatgggttggtgttgagaggcatcgtcagcaaaaactctagttggtttgggtgcgttcgtttcccaggggaatatttgcctaagtttctgcggcttaggtttcgtctccgggacctgatagtacatgttcttcggggcttctggatacgactgtgggggctggaaaagcttgcgatcatcggacatagtataggtcttgctctccaaggctattccttctggtttagaattcaaaggaggtggttcccttgaggaagagtcagcagatgttgttagacagccttgtgagatattcatcttaccgagaggcatcccattctgccttaggggcttcgaatatcggctcctcttgcgatgccggttgaggcgatggtgcccgctgtgtcccaatgggcgctggcgctcgagtggtgcgcgaatcattctgttcaaatggatgagcaggctctgtcggcacactgggctcttgtactggaggtggctgtagatcatgatggctatgttcttgaacgggctgttgttgtatataagcccttacgtgttcttccccccgaacatactgcggaaccacgctaaaaacaggttcatgggaaggtttctcgctctgatactctgcgtgaatttcgtgagacagatctttcacgggtaatggcgcgacgcttcgctctgcatagtgagacgcctgaaccgagttatttgaagcttcttctgggggatggtagtctggatgttgatctgatggcacctcatgcccaagtgctgggtggcgcgacgtggtttctgatcctggaagaaggggtgtctgtcgtccaatatgctgctgtggtgctgttactgggaaattatggatgtgcatgtccagcataggctcctctgcatgttgaacatgtggcggaaccgagtgactactcggctctattgtttcctagcgatagcgttagtctcaaacacgtttatttccctaaaacccaaacatatcccaaccggaaaactcacattggctacagagtggtaatgccggtcgtagactgtccaccaccttcccagtagctgattatacggcgaatcaaaaggagacacttgtctcgacatattccaaggtttttgggatcctataaaatgtatcaagctaattgtactctggaaatgcttgtaggccgggatatattgataactcgcgctaggtgtgcagttgtacgtgaaactgagtcggtgccagtctcgaaagtgcatgttcagcaagccctggtcggcgccgtcaaagctggtaccgcgttctgcaagagctttcagcgcaaagtagtcttgcatattgggccgcagtaccataacaccgctgttaaagcaatcgggccagccgacatcgggggcagcggcgaaatctacgtccatgtccaggagctcgtcgggggctctaatggccaccacgtccgagtcaatgtatacgatgcgcttgaactttgtttgtcgccacagctcgatctttgtgaaggttgctatcaagtcaggacgctccatgagccagaggttcgccggcgtatggttcgtcatccgatagacgggtatgagctcatcgtaaacagtctagacacctcgagttagcaagttttgcgatgtggccttattttacctatattagcaagcgaagtacgcacctgaagctcattcagcgtcgcggcctgcaacgtgtcgggcgtatacagagcgaccagcttggccttggtgccattgtcgcgcaatgagtgggcgagaaccacggcacctggatcgagaagcagcgggtcagtatcaaaagatgacggaagtggagcaatcattggtataccaggaaggtagttatcactcaacagcagctgcggccggttaaaaaaacttgcaatggatacggaagcccagaatcagggtacctacagtgcaatagactgcaccaccttgggtgaccatcccgcgagcgaattacagcacagaacgcccaaaattcggccaaccagtgcgggcagaaagcaaaacgagaggaacggaggcagcgacccccaaactgatgaagctggagaagaacggaggaaggaaggaggattgccgctggcggctgtacgccgtagagctggagctagaggccgtttcccctcacgggagtcgcgttatgacgggagcaaccccgcccgccaccagcagggatttctcaggggacagtgctatgatgcgctgaaaacgttaccctgtgtcatcacagtttatcatttgcgagttaagagacactattccgcaatatgatgggcggctgaagattgctgaagtctggaagggggtggttggttggaagacggaaaaggaaatgacacatccgcctttgtctttgcaatgctttgattgtctgcccagacctgctttggaagctttgacctctg

SEQ ID NO: 2067 - DNA, 1524 bp, Emericella nidulans
tacaaaccccaggttagatgggggcaaacagccttggcggtttggcggataaatttgggtgtggaaatttaaacaagaaggcgggttcaaaggggccatactctgggaaatcgtccgtaaaaacgtcttttagttcgaaagggtagaaaaaaaatttctggcgggccgcttaaaccaatcaacgagctttaaagaaatcgcggaaattccggataaatcgggggcactaaagagtttaaaggcccagacaatttccaatggggccgcctccacctgaagggtccaggttcgtatgccggtaacactgcccccgacgagtcggggagccgatgcttgaccagggtgaactttggccatcagctttcagcccaatttggcttgctgtccgttcaagccgggggcacatgcccgatgagtatcgctttcataccgcgctgtcgtagaatctccagttgcacacgaagccactccatatgctcaaaccccggctccgacggcatcgcacagccgtcgacagcagagttggactcatagaagtacatggtgttgaggctgagagcggcaagcttgttggggatcaactcggccgaaaaccacccgccttcctcaaaagtgtgtcgctgggcctcaggaatgaactcggaccagacttccgtaaacttccttgtccatcgattcggggcttctctgaagatgttgtgtggcatgatatcgttgttgccaatcgtagggatgaccgggatagaaagaccgcgagcagcacccgagtcttcaaagacttcaataaacttggccgccaaagccttattcaaatcgatttttctcgctggctgtccgagggattttctcatcgttgtcatgtcgagcagagtcgccagtccagagcacaaaatctattttgcctttcaggttcttctcgatccaccggaatgtttcgtcaatcagagcctgcggggagtcgcaatcagacccctctgcccccagacgaccagcggagcccgaatctcggtgacatagagtctcctctgacgttccttttcggtagtgtgtatctagatggaaatctggaggcggtcagcctgaggcctgtcaatggaaaggaaagaatgactgcaagcaatacctgtcacatgaaggaatcgtccggaaagttgcctcgaggtctcagactgatatggctgactatcgtgattccccagaacctgttgttctgacaccggcacggccgacgcgccgacaacaagtcctaggccgtaaagaaccgcgactagaggcagtggtatcatttttttttaggcgtttcgggctccgtcaaagcgggccaagtgtcgaatattaagaagaatcaagcatttaaaggtgaaaggccagacataggtagtcaggagatagatatgaagtggaacactcgagatcgtgccagcaagggaaaaaaatattgggggcgggcctacgtcagtgaccaggactaaatcctcgaacaagggcccgatcagggaaagcgtccgctagccccagggatga

SEQ ID NO: 2068 - DNA, 3919 bp, Emericella nidulans
  unsure (1)..(3919): unsure at all n locations
cccatgtttttattgcaaggatgctgattggctaggatcaacgtatcctttattgataaggacggccaaaagttcgacttccaggtgtccgagggggacaacttgttggacattgcgcaacgaaacgatctagagatggaaggtttgaacgatgcctcttccccccggttctcttaccggtagtaactcaggaatcctataggtgcttgcggtggctcgtgcgcgtgctcgacatgtcatgttatcgtggaggacccagaaatgtttgacaagatggaggagccctcagatgacgagaacgacatgctcgatttggcgtttggtttgacagaaacgtcgcggctaggatgccaggtgcaaatgaacaaggaactggacggattggtggtgcgactgccttcaatgacccggaatctgcaggcgagcgacttccaaacgaagaaataaattagggcttcttgcgagacatgtattattataatcaaatatacagcggacgtaagttgagtagatgtaatataatagggtattccaatctccatatcagccattttaacgggacgagaagtcggtctaataaactgtacataacttttgacccatgataccattaacgccgtgaatataaccaatgccacttcaacgactgtcaagcttcctcgatgttgagaggcttccccttcttgccgttgatcaattccaaaaacccctgcttgctgacctggttaactgccttctcccgctcgccaattccgactgtgcccttcttcctctcttccttggcagcctcttcaccacgtacctgcgcggcacgaacggcattgaacagtttcaccacaccgcgctgtgcgattttgcgcaaccgcttctcctcctctgccacagcaccggcctggcctgtcgaaataccccgtacatcacgaacgcgacccctgtccaactcctccttcttttctgcacgtagcttggcccgtgccgcattgtccagcttctcttccgcaatttgagaggtgatttgtgtcacggttttgctgcgcgataggacaggatctgcacgggcagacgttggtaatttcgtcgcaaggatcttcgagatggaagtagagaatgccgtagggtcattccgtttaggaactgtcctctttcctatagcaccggttggtgtagagccatcggaatgagcatcatcgtctgtatcgtcgtccacatcggagtcgtcgttggacgcggactcatcgtcctcgcttgaagaatcttcttgaggttctggtttctttgcttccttgcttttcgtttgcttttgttgcttgcgagctggctcctctgtttcctcgtcggaatccgcaagatcaactgctttgaagtcggcgggttcgtcgtcggcctcgtcggagctgctatggtattcgcgctgcttcctgaatttcttgttcgggcggcccgttttgccctgaaagccctcaagaaccttccgcttcttctggcttgtcgtaagcggcatcttgaaactcagcaatatcgaatttgtcgaggtgccctgtgaattgcaaagatggtgcagccttgaactttttctgttgcgggcggaaaacggccgcgggccctgattggttgtggggtcaacgttggcctcttcgggctctccttcgcctctccctcttcaactactctgctttcgcgggatattgtcgtgtgaatcccattttgtccaataagacttgcactaccagggaccgtcacaatggttcttcaggatctagggcggcgaatcaacgccgccgtcaatgacttgactcggtcacctaatctggacgaaaaggtacgccccgcctacgtatacgacaactgaaagatgctgattttaggagtaaaggccttcgaagagatgctaaaggagatctgcgccgcccttctctctgccgacgtcaacgttcgtcttgttcagtcactccgcaagtctattaaagccagcgtcaacttcgcctccctccctgcagccgtgaacaagaaacgagtgattcaaaaggccgtcttcgatgagctcgtagccttggtcaacccacatgcagagccatttcgccctaagaaaggccgatcaaatgtcatcatgttcgtcggtctgcagggtgcaggtaaaacgacaacctgtaccaagcttgcccgacactatcaaatgcgcgggttcaagacggccctcgtttgtgcagacacttttcgagctggtgctttcgatcaactgaagcagaacgcgacaaaagctaagattccgtactacggtagcttaacacaaaccgacccggctgtcgtagcagcagagggtgtagccaaattcaagaaggagcgatttgagattattattgttgatactagtggtcgtcacaagcaggaagaacagctgtttacggaaatgacccaaatccagacggcggtgacgcctgaccagactattcttgtgcttgatggaacaattggacaagccgcggaggtgcaatcctcggcctttaaagccactgcagattttggagctatcataatcacaaagaccgatggtcatgcagcaggtggaggtgctatctctgcagtcgcagccactcataccctttttattcttcttggaactggtgagcatatgatggatgtggagcgtttcgaacccaaagcatttatccagaagcttcttggtatgggtgacatggcgggcttagtcgagcacgttcaggccgtaacgaaggactcagccgctgccaaggaaacctacaagcatatcgctgaaggtatttataccctccgcgacttccgcgaaaacattacatcaatcatgaagatgggcccgctgtcaaagctttccggtatgatccctggcttgtcaaatcttaccgccggccttgacgatgaggacggctccatgaaactgcgccgcatgatctatatatttgacagcatgtcagccgtcgaattggacagcgacggcaagatctttgacacacagccgagccgaatggttcgtattgcccatggtagcggcacttcagtgcgcgaagttgaggatctcctgtcacaacaccgcatgatggccgggatggcgaagcgtgtcggtggccagaagaagcaaatgcaacgagcacagaatatgctcaagggtggcaacaaggatcaacagcttgctgctatgcagaagcggatggcctcgatgggtggagctggtggcatgggcggcatgcccggaatgggcgatatggcgaagatgatgcagatgctgcagggccaaggcggcggcggcggcggcggcggtggtggtggtgggctgccaggtcttgtgggatggacttgcgtcgatgatagccacataaccggttgatgggcggatggaggtgttntaaantttcccttatctatttccttcttggcctagtttctttgtcttaaattaagtcttcctttaatgtattccccaggggctttaattttaagtggagtggccggccattttaaacttcttttgtgggccccataaaaactcccccctcgttttttttttttttatttcaaaggcgcccaacttatgtctctccattaaattcgtggtgatttttatttcaattttagcaccatctctcagggggtttttttatatcccccaaacttcttttcttttaaactccccctctgttttcctctattttcccgggatcttctccaatatagtccttctttgcccattcgttttctttggaggactttcttttttcttcccaggctatttatggagttggaggtggtccccccaattttttttaataatttttctatgtttaaatacctccttctttctctnccntaattttttgcaacatatctccacttttctactcgttctccttatgtactccttttattnntcttcttttccctaccgatt

SEQ ID NO: 2069 - DNA, 3454 bp, Emericella nidulans
ccccccgtcgacatgctttgttaggtctgaagtcaaaccctggaaagcactgagctcggcgtaaaggagagcactacgatctgaacggccaaccaggcgcatgatacgctcgacctaacgacaattagcttcaatgaggggcaagagcaagagcgtttcgatcgacacacctttttctctgcagatatagctagactactgacccgcagcatgccttcacaggattgctcaaaagctctcctccccaatacagagcagtactcaagaagagcattgagcgatgactgactgcaaaaaacattaggtctattggtagtgacaagaaacaggaaattacacatacggacggttcacacctgggatctcaatgttcagcttgattgtccgtactccgtcttccttccccgaaacgatgcaggaggcgagaatgagcacggactccgggaacacctttgcaggtagagaccaggtttgggccggaagagctgaggtatgaaggtactcgatggctgcagcagcagaatcctgtagccctttgaccagcaatgctctattgttgggagtgtcatgggctggagagtcctcagcgataggagtaggttccatgatcgaacaagcagttatataacaagcaagtcaccgcgtactaaggatgtcaagaagaatctggggaatagattgcgattgaagagtcaactggccatggagacggtggggggaaaggccggtatttatgcagagaaggcgctgttcatctcagagaatcacctcatcgcagaagacgaggcgcttgatacgtgctataggaaagtcaccatgatactgcagctttggtaggcatgaataaattgccaggcactctttccttggccgacttcttcgtacggtcagcctatccaatgaaattggccttgccatgcggaacccttgctagcatcacctgcaagagaattttatctcagccaaccggagaagcagaaatcctgcaatcgttgtaaaggtccatcatgtgccttgaaaggctcgtgcgttgtctttcgtcgctcagtcagatatcatacgtggacactgaatacacaacatatttcgttttgtgagaaacccgctgtataccaaacccgctgtcaactgctgagagaaagtcctgcacccaagaaagccaccaagtcatcaaatatgcaacttcgagatgttcagagcatggtcttcgtccttgagcctgatgggccgggacccttacatcgcgtcttattgacaaacagtgagtgaacatttctcagtctcaagctaggcctgtctagaatatgcgctgaattccctgagtcaccgatggtaatcgtcgcgagattggatactgcagcgtattccctttacgactggaatatgatcagcacggatggggccggcgtagcctccaagaatacacgtcaatccctctgccatcaccgtatcaagcatggatcctgagaccaccaggctacggggcgcacgatatccggcgtcgagagttagacggcatggaggacacactttggagactctgtcacggtctgaaccagcatgattgtcataccgtggccatactggacttggtccacaattacaaaattacgtgagcttttaacttttactttgctcgctatctgcactaatcttacatatttcacatgggaagaacgagtaacttcagctgggcaaaagccggactcagactgcaggtcaacaaacaaagaggaagggctcgaggggtagcggaggagcaaggagaaacacatgaacctcgaaagcgtttacggaacgctcagatgcgccatgtagcagcatggtgtcgacagctgctgattacgggagggattaagagcctccaagctgcgcttaaggacaagtcggactccagtgccatccctataatgcgcagtcccgacgcgtacctcttgcaagagaagatgctagccagcgtccacaactatattctctctgtcttcaagagtcctaggtggagttttagctcccctgacttactggaccccaccggctccacacatactgacacagattggaagcggttgagtgaccaggtttggggagcaggctgcctcttccgggaagcaactcaggatggaggctctatgaagctcaggcgcattctgctggatatggaaaatgtcgtcggaactccagaccctcagttcatggtacgaatctggcgcatatgccgatacttgcacggcatctgcacctcgacaggcgatgaggatcacttaaaagcgcgcttcttgcaccgctttcgagagctgctgcggacttccaacggcgaggcaagccctatattccagtttttcgacgcgctggcctctatggatatgaactgttttcttcgggctctgcgcatcgggaatctacgagcactacatacttttgaacaaactatcggccctggacatcccatgattttaacgatgtgggtatactactcgaaacaatggcgagtcgcggaacaaagctacgagaagattatagaatactacaactgtgcactacaaaccgcagacgcatctctcggttcagagtcggatacagcgatatcgattctccacgattacacttactttgtttactacggcggcagcagaagggataatacgcaagccgcaattctagccacccaactatacgaccgaacatatccacacatgttggatagtccttgcaactggaataacaaaactcaatatttcacctttgcttcacagatcctagcagagtattggtttctacagggcatcccatactgggcaacggggtacattgagaaagctagcagtctactccaggtctctgaccgagagtgccagatccgagcccggatgctcctcggcaaactacgaggctggctaatacgctgggggtcactggacgaggcgcagcgtgtcaaacaaaggcaagtgaatttaatggcatccatagatgaactactgcagagggagattcaggactacccgccggatgtatagtcgggccagttggtccgactacgggaatatgtgtatttgcccactaaaactccaccggattatgcttggttctcttaccccgtcgcactttgctgcataggctggttagagcacgaacgtgaaatgaaggccaaaatgcttgaagcggctgaaacacgtggcgatgtcactggggttcaataccattttccgtttgatgacttcgatgaaaacccctgaaatgggccctgtgcaatatacgccaaataagatctacgaatgcagagacatggtaacggaagacgtggaatttaatcactcccgaatattcgtacgccagcctgtcctggccgcagggagaacccgcttgcgtctaaaagagcgaatggaaagtgttggagacacgactgcaggaacccctgaaatactcttccaggcatagacttcatgtctgatccccc

SEQ ID NO: 2070 - DNA, 2134 bp, Emericella nidulans
aagctctttgccatgggtgaggatctatgggctgagtggatccaggatgagagtatgttggccacgtcggtgaacgaacgcatcgcgtgatggaactctgccagcggtcgatcgaagaagaatacggcagcaccaagctctggattatttacggagagtgggtgttatacctgtacaattccgcgcacggcgactcgagccaaagccgttggtcggaggaagatcggctggtgggccgtgaagtcttcacctggcagacgatcttggacacatggcagaggggcgctgaggcaacgaggtggaggatccacgacagtcatctcgtgtgggaccgcctgttggaattgcaagtgcgagatctctctcgaaacccgtcccaggataagatcgcgcgagtacgagagctgttcgatatccgactgcaaacccctcacgccacatgggacttgacattccaggcgttctctaatttcatctcaacctactacaacgctaactacgagaatattatggcagaaactgcaggaaaatatgccactccggtcaaggatcagtatgcggctcgcgaggatctcgaaattcggctccgcaacgccgctgaatccggggaccgggctcaggagtgggcaatatttggcgaatacattgagtgggaacttaatcgcaaccgccggagacgaaatactaacttcgaactaatcaacgcaatataccaacgcgcggttttacgattccaaacagacgcgaatatctgggaggattatatcatgtttttgatcgatgaatcaatgcacggcaatgcacacccgacaacaatctctgcgctcgacagggcgactcgccactgccctggctccggcactctgtggtcgcagtatctgctcagctccgaaagggaaggacagccttttaccaagatcgccgatataaagcacaaggcaacaagcaccggtttactcgatgttggcggcatggaagaggtactgaaggtgcatacagcatggtgcagctaccttcgtcgacgtgcgtttttgtccgaagcaactgatgaagacctggacgtggccgaggtgggaattcgttcggcgattgagagcgtccaggaacttggcgagaagaaatatggtcgctcctacgaaggtgacccgcttttccgcttagagcgcatttacatacgctacctcagtgaaagtggcagctgggacagcgcccgagaaacatttaaggggctcatgggacgtcgtggcaacagctacgagttctggctgacgtactatcactgggaattggtttcgtggagcaagtttgtgcaaggtgaagcaacagttgacgctgctccccgaacacccaatcccagctttgccacggctgttctaaaacaagctatcaagcggacggacctcgactggccggagaagatcatgcaggtctacgtcgcgcactgcgaagactacgaggactcggaggaactgcagctcgcaattctggagactcgcaaggcaatgcgagctatcaacgcccgtcgtcagcgggaagcccaggaggctgccgctcaacaggcagcggcggcagcgaccgaaacccaggaggcttctcagtcggaaaagaggaaacgagaagatgaatcgacggcaaacggcctcccaactaagagggcgcgagcagacagagcgtcagttgaagcggagccagttgcgcttcgccgtgatcgtgaaaattctacggttgtggtcaagaacctgcctcaaggcaccactgagcacaaagtccgacaattcttccgtgatgtatgtttttcgtccttttgctaaatgcattagctaatttcatatagtgcggtgctattaatggtgtcaagatgatgcctggtgaagacggaaaatcggaagtggctatgatcgagttcaatactcgagacgatgcagccgctgcacagactcgtgaccagaagactttcgatggcaacactatccaagttcacttcggttccgagacgaccttgtttgtgaccaactttccccctacagccgatgaaaactacattcgagatctgttcagcaaagtatgtctccagccccttgctcatatcactcccaatctaacgtttatagtatggcgaaataatagacatccg

SEQ ID NO: 2071 - DNA, 1826 bp, Emericella nidulans
acgcccatcagttggttctggattgctggattgctaccttgccaagtcggctcggttgaaaagaagcatagttgcggcttggagctttttgagaaatcgagccgaataagactcctgtaaaatgtatatgaagtataccaacaaacagtcttattcgcccatcatcaaagtcctcccttgagttagctatagctagataaccttttcacttgagcatttgattgacttctttgcaacccttttttggccagctttgccccgtgggcaagcaatcccacggttcccacctaagccagccagtctggtatcgcagccaagagcatcagcctgggcgccaagtgattggcgcatgtctaccaatcgctactcgatgtctggatgatgctccatagggcggggagaggggaaaactcaataccattatgcggcaggaggtggccgccgaccggtgtcccgtctctgaagacatatagtctggccattgccgcaagcagtgatctcagctcattattctttcgccgactcaggtgacctccaagtagaccttaggcttgaccttcgaatctgcagacgatttgtttcattggatctgtccgacgggcttatcatctcagttgtcaatggctcgcgaaaagactgcagaccctggagggatacgccccggccatgctgacctgagccagccggcttactgtctcccattcgatgtcgttttgaaagagctcgggaccaacgtcgacgagggactgacaaaggatgaggccgcccgtcgccttcagcaatatgggcccaaccagctcgacgagggcgagggtgtctctgttgtcaagatcctcgtgcgccaggtggccaatgcaatgatgctagttaagcggcccactttcctcttttcctaacacatcatttatataagagctcctagagtctgatccaattcgtcgttgcaggtgctgattctggccatggcggtcagtttcggaattcaatcgtggattgagggcggcgtgatctcagccgtcatcatcctgaatattgttgtcgggttcttccaggaatatgcagccgagaagactatggagtcgttgcattcgttgagttcgccaacgggaaccgtttcaagaggcggcgagaccttctcggttccatctgctgagattgtccccggtgatatggttgagttgaggacgggtgataccgtccctgcggatatccggtgagttaactcttattcaatgatggaggtacggggattgacctgattagactggtcgaagccgtcaacttcgagaccgatgaagcccttctcactggagaatccctccccgtgcaaaaggaatgcgactctacgttcaaggaagagaccggccccggtgaccggctgaatcttgcctacagttcaagcactgtcactcgtggtcgtgccagaggcgtagtcgttaatacaggcatggctaccgagattggttccatcgcggccgcgcttcgtgccactaacagcaagcgccgtccggtcaaacgcggtcctgacggcgagaccaagaaacgctggtacctccaggcatggacgctgactggtactgacgcagtgggccgattcctgggagttaatgtagggactccgttgcagcgtaagttgtcgaaacttgctatcttgctatttggtgtcgctgtgctctttgccattattgtcatggcagccaatctgttctcgaacgataacgaggtaatcttgtacgctgttggaaccggtctgagtatgatccctgcctgtttggtggtcgttcttacaatcaccatggctgtcgggacaaaacgcatggtggaag

SEQ ID NO: 2072 - DNA, 736 bp, Emericella nidulans
gctggcgctccgccggagtgtcggcataatctgacgatgagagcttctctttcagctctgatactggcgtcgaggcgggtaatgtgagcgtaaactttgcatcgttcgaagctttgatattgaaggtgatgggcgactcctccgccacggtatcatccgccatggttaatgggggtgtgtgttggcgatgagtgaggggtgtgttgagggggtggtccgaggcaactcaggtcacgtcacaagctggtggatgagtcccgtggctttcagcagaaaaggcaaagagggacgaaaactcaagggaaggagttcaagaatgaatgctaatgtagaagtctgcaacctaatggaacaaaagcgaccttggtcgttatcgcgcgccaatatgttccgacactaatggtcaaaggcaaagcccagacagaaccaggcagaaccccatcgtcagaacctgaaccaatggacgaagctgtcccgggattacacgtaatattggctgtaaccactctagctcccgccgatactggtcataggcttacaggtcacgtgcttgatcaaacaggacaaacacgcgcttgacctcagctcaagctccacattgcaatttttcatcttcgcgttctcagcaccacaagtttaccagctctctaccttacctctcctcacgaggatacctcgtgttcgagtgttctcaacttgctgtctctctctgcagcaatgggagtacttttattat

SEQ ID NO: 2073 - DNA, 5091 bp, Emericella nidulans
  unsure (1)..(5091): unsure at all n locations
ccttcttctccttggaagtccttgctaataacaagctaataacaatgaattagtacaggtgtaagtgtgacgctgaccttcagaaaccaaccgttacgttactcagccaagcggctttcaccgacatggcccgtgaacatttccccaggtctactccgtgtgcctcactgcttcccctctcctctctccacgccttgagtggatcgtgcaatcaaaatggaccttgttttgggcccccgtacccagaacagcgaatctagtcacggccgccccagatggatcgtccatgtgggcccatctaagagccccagatccaatgatgaatctcaggaatctgatcctcgccagtggcagacctgacggctgactatcttggcttgatcgcttagagctgggcgtctctggcaaggagcaattctcccgaaggctatccatacctcgaagtccgcttttttaaggctgcagagcaagcgaattgctggtacgggtacggttcgagtaggaaagctcgaagaatgggaaaaaaaaaatcttcaaatcaaagccttttctggcacaaattggacggcggagggctagatgaggttgctccgccccatgggcccgctcctgccacccgtcactgtcttttctccttaaccccttcccgcgcccttcgttctacgtcatctctttttgtcgacttgtcctagacagagaccagtcagccactgggggtactgagccacatagactcccatcagagattcagcgtcagttgcattgtaacttagcattaggggaaagtggccgcgtccgtgcccgggcaggcaacaatgacttcacctgcacgttggaccaggataacattcaatccgccacacggggcctaacacgaacaacttcggactgactccatctacaccgtatgttgcaagggggctcaaggaagccgctgccacggacgttcccgcatacgtcgatggaagcttcaatgtcaacagttcactgggaaatcgcgaaacttcgacgatgatatttaaaggctttactagggagaaaacaccgtggattctgtacaaaaaggcaactggcgccagcgtgacttgaatcctggcattaatatccaacctctgttgatattaccacactgcttcagcatcgtcgcatagtcgtggaatttttatccccttcccacagcggattatggactcatcgagacatcatgtgatttcgaattcaattttgctactcctatatttatcaagacttttatttctccgtaacactagttttgcgacatgtcaagtgttgacaaaggcgaaatttagcgtcctcactgagactactgatcgaatttctccggcgcgagacccagagtcgtcggggctaggtcctgtcccaacatgatggatacgtttgagctctcagctccatgattgccgatccattcgtggtcctaatctactgcatatcgcactgggttccataagcgtggtggtatactacgttggagtaccaccctaccgagcctaccttatccgtggtaaattatcgcacagtactcttattgcagccatccaatatcctgtgccgactacctctgatgggctctaggagcgcatccgtttgcgataaattacggactgtcctcccaacagagtcgatattcagcttgcctgacaggcggtgaagtgagagacgcgagccccttattattattagtattataattattatcagtattattgctactattattccaaggtctgctgcagcctactgcagctaaaatttcaggaatcggagttgactttggctccaggagctgggtcacccctgcctagcgtgttctggttcttcgggatcggctcgcacaaagctctaatcatccatgtacacgtccccgacctacccttgacttaaagcgacccaactgtgaggtaagtgacaggcgcgtcgcccaccagcaggcgagtaccactaatgacgggcacggcaacgtacagagtacagactgtgcagctcagctcacctcagagcacagtctccgccgttgtgctccacctaccacctaccaacgagctcagcgcacagagattgcggatgatcacccggatagggcagactgggcagagctcccgcggcctgaagggccagttgatcattctgcggattgaatagtcacgcgaccatcaaatgacagcccgtataaaaacacggtagattgtacgacgttggctaggataatcctgcgtatcgaccaggatgatggagcttgccacatgctgccccttgtgtagtcaccgcaacgacattcttgggaactgcattgactgatcgcaaattatattagttctttatatcttaccaagcagggttaccgagtggtgcgcccagtgcgaaacagtacgttgtccggttgatacggtctaggttccgtcgtgtctgcagacactcgggaagcgggaagtgggaactgctggatggtgccggcgggtcggtgtccggattgctaattctcgatttagtatctttttactcattggttggctgataagattgcgcatgcatagtttgatgaatgatagtggtaccttagagacaacctgggttgtttcaattctatcagcagaagacgagcttgccgatgtattttacaggttggcaagactttctgcggcggttggcttacggaattgctcgaatggggaatgcctttgcgcacgaggacggccctgttctcgaagaatcttgatgctgacctatcttcaggaaagatgaaagcaggtcatgtacgacgctaggtatattgctgatttctctcgccattggacggcgaggggccgtgaatcatgtttagaagcccttgacattgatgccagacgtcccgtggcgatgaattggcctgggcgtgaattgatgtggctactcaggaactgatcgcatcgtccaattcaaaacccggctatggatgaagcttggaataacaattactctggcagctccctgaaaagcaactctttcccgagctgtagacaaatacggcatcaaggtcgcgtaggtatgatgttcttcacatctggcccattgggatatagtagcttcgcgccacggcttcaaccacgcaccatgacggggtataccggacaatcctgttcgtttccaatggatacgacacgactctgccgtctggagacgttggaaaaggcgtctattgattttgcacataccgcttgcttattgctagcatcttgtcgcctgtcggagagtagcccatacacagagcgtagcggactggcgagggctcgtgataggcttggcgaaacccacgaattctcgcagcaccgcctgaaaactcctacaaggctgtctgcacatcattgaggatccgttccaaatgtcacagaaaaggtaggggttcgcaggagacggggaccgaactggtcaggtaggacgtcggactgtaacgggaggaacgttgtctagggagacagttagcacactctagaagatcgctaagccgagtaatggttattgatcggataacagaatctttttgactgtgcttttgcttcataattattgaaggtcctagaactctagccggttggttagcgtcaggcgcaggataagccatgccgatctgaagttgaggatttcgctcaaaagtctatttgcgtacatgcagcgcaaaaaacagaaccaactgccagtcaaagccattgtcttgttgaaagtcattgagtgctcacctacgttcaaagctattgatcagactaaacgagccaagatccgggacgtcgaaggatacgggcaatgccgaatagcattacagtgtcgaactcgcaacccactggacgtagtcgagacacaccactagttgaaatctagcctgtttactgcatcttcgaggcagtttgccgcactgacggacgggcgcaaacagccttgacatatagaaattacccaaaggcttcaatcaccatgaatctttcgctctggatagatgcttcaaacgacgcgagtcccaatccccgtgtggccttcccgaagctctgcctgtgggtcgaatgcacggtgcacaatgcaaccaatgtcagtagcgttggcaaatgcgggttctcgtcacactgggtttttattattcttattttttttctttttctttttcttttgaggaaatttgctgtcgttttaaggttcaccagagcgaaccttttcgaccatgatagttctgatgaacagagatcgactactccgtactactgcctagtaatatgagcccggtgtcaatattcgacgccatgtctctgcgtatcccgtttccgtgccaaagagggtctgaaggcttctcatctctcttgcagaacaaataagcctggactgggatactgcagcaggcaagcgtttatctcatcgagagcatcatcactaaggcagtggtggcattctaagaagggatgttgcagctttgcgagcaaaatgcgggtagaaatccaatgaagaggaattgtgtcgagtagaaagtcataggatcaaaatctggaagtgcgatcgtcttcgcaacaactgtagtatgcattatgggcgacagagaatgtccggacttttgtatggatcaaccgatcaacaattagttatctccacctggaggctgggatgcatccgaggcgcctacctctcggaacgacaatagctgtgggttgtttgtcatcacctacagaagtcttcttccttctgcatttgccgggtatcgagatttgagagtttcaaatcatacgtagctgctggtttaatgaacatctcgatgagtgcttgctacaagagccaacgtagacaaatcaaggtcagatccttgtaagttgcccatggctgccggccgaatgcctttccagcgagtggagatcgagtccgntagttgtacggggcttaattttgatgcattgcggcatgcctcgatgcagtttgatgagaagctttattcgtagtcctgccaaatcaatgtgcatctcgattggcactcttcacttctttttgttgggacccctgaagagagattgcccgaatagtcatggcccctttcaggccaactttaaaagggcatgtatt

SEQ ID NO: 2074 - DNA, 2379 bp, Emericella nidulans
cgatatgtaggctccccagagaaggaactcgtatgcctactcacaatgctaatttgcggtcagatgtgttacgccatttgctgcattttatgctagaaattagaactcgtagatattctgtagatggtgacgaatcgccagattggggcagggcacatgagatgatattcttattctgtgatacaggtggataatgaagtaatcgctctcatgatgattcattcaggatgtattctttgggagttgagacaagcaccctatcgaatctactctatctctccaaagcagacaagtatatgttctcaatacaggaacaaaatacagtaccgaaagttctatcagctatctgagagccccgtcgccctaaaaggggcacaaccgcgctcttcagctataacacaaaccaaaccagcgggttcgtcaagtcaaaaacatcgtcatacattatatctccatctgcaatattggtcttgtagacaagaagccttgggtcgattactgcaacaatcactcgttcccgcctttgccaggtcaggttaaatactttggcctccacagaatcgtatctgcaagctcagcgaccacggcctagccagagcgagctctttgagccacggattgagggctcgattcgaccctgggactgcatgagtgtgcggggctcgtacatctttagcacatggagacggagctacatagttgcttgatccctcgtcaaagagttgggcgtaaggaggacgataaatcggtactaggggccgttgagttaattgataggcgctcactggaggcgaaaggtgacaattgcagagaggatactctattttatgccaagtcaatcgctaagcccaatatcggttatttagttctacgtgcatgtgtatgaatgtctatgtccccgtctgttacctgggaactttgggttgacgagatatgtctgtcttgtcccagtggttagggcttgagaagctggacaaaagacttgattgggcaattgtatgtaggatgcaggactgtatttttgacttcatcagctacggagtagctagtcttattataaatccatctgagcttgtgaaggtgacgctcattattgaaagcaaacagtttaactatcaagccatcgagataacaggttattgaacctccttttaggccaaataacttcctagagtattctaccgagtcgatgttgatagccgttatcatttcgcgcaagacgcatagtctgctgacccaattctacagaccgtccggatagccctaagcctatcgtctcgtgttctacaactcaggaaatgggtaacacttctcttctataatacactggtggtcgctaggttcaaggaccaataaaaactgtcttgtctcctactttcgccttctgttctagctccatacctgcgattgtggggatatacacgcaatgagtcaacttgcctccttggcttcaaccatgatgcgatgcatatcccagcctggttcgatcctagcttctcgtggtctgctcgtctagtatatgggctatatgcaagatgcaattagctgctcaaagcaaagcggaacgcaaaatgcaggtaggatccagccccgtcctatctttattcacctgaattctgcgcttctatatacctgccaaccgttgcgcatgtaatcatcgtaggcaagcgtcacctgactgtctgttaaatgttatgtaggttccttggggagattggatactggtttcggctccctgcgggaaagacctcaaaccctaaacgagctctgttttggcatgagcactatgcatgagcactattagccgctcttcaatcaagctaatccagcgctaaactgtaactagagggatatcacggtccgaatgccatgccctatgctaccccaaggcatacgacgaacccgaacacctgactggccgcatgaccacccttccagcagcgatggatccgtgccccaataccctgccggtctctctgcctagtttcggcttgatccgtcaaaccttgtcctagatgctacactgcattttgcttagctggctgggaggtttagaatccataaccgcagccagaagtcacatggcacccctccgagtggaggagggtagggttacggtccaccccttatgtgtgaattgaactgctctgagacaaccatccactacagactagaggtgcggggctatagatcttttccttgttttgtcgatcatcagggcagcttggaccggaattagccgtcaggcgaccaaccttttgctcttgttgcgcttgcactagccacagttctcgccgagcggcatagtctacaaagttcaggcagaacccatttcacatacggatttagcatcggaatcattcattttcccgatcccct

SEQ ID NO: 2075 - DNA, 3239 bp, Emericella nidulans
agtagatcttcgatcaggcgcaccaggataagtcttctgcgcccactttgggttggtaatgaaagctttggctgtcttatcgggattcttcaagtactcccgtcgaggaccggtccttccagcgcaagctcgcccaccacacccacagggtaaagacggtcatggttactggggtccacaatccaagctagagtggaaggtatagttctaccgatgtttgccgggttccgatttctgccaatttcagggttgaaggtagcatatacagaagtctcggttgggccataagcattgatgaaatggaccttgtcagaccatttggtcatggcttcatgggacatcatctcaccaccgcagacgatgaccttgagggaaggtacagaagccggctccataatgctggcgagggacggagtgcagaagagccaggaggcgtccagtcgccttatagctccggcaatatcattaagacgctcctcgtcgctgggaatacagacacagccaccatatatcagtgtcccaagtatttccataactgcagcatcaaaagtgagcgaggcaaactggaaaactcgaatacctggctttaggtggataatgggaccgtaagccatagtgctactggcaaatgcgcggtgctcgatgatgatgcccttcggtcgtccagtgcttccagaagtgaaaatcgaatacgcaacgtttgtactcgtcgctgatccttgaagggaaacacgttttgctcggtaatggcacactgtcggttcgtcaacgccgagtactgtgggcactttacccgtgtaccgagagcagtattttggcgtgcagaggacaattttggcaccagtctcctccaggatttcttcatgtctcgagactggatgagccggatctaaaggcacgaaggcgccgtctgcaatgagaatgctcatgatggtgacgatcatccacatagatttgtccatgcacatggggaccaggacttcaggcccgacgccgagctgcgagaggtggcctgcaaacccagaagcgagggccataagttctgcatacgacaggtccccatcccaagaagctacagacggtgcgtcaggttgccgtatgcgctgttcattgataaggtcatgaatggtatgttccacgcatggtgcagcagactagttccatgtcaacagatcctttttattttccgcgcagactaccttgagatcggagagaagcctgttgtcagatgttgcagttgtcgtcagctggctaacggatgactgtgaattggccaaggagccgctgaactctccagggggcaaccacgccgtcatcgaaataggaggtaatctcaaccgagtcagccagtcgacattcaactgtcagagggtaagtaaagaactcatgatttgtctcagtgctttgcggtgtccaaatgtcggcgtttagctgcggttcggcggattgaatgacaagaagggtttggaaatcgcaggcggcggccgtatcttcgttgagcttccgtatttgctgcagaccagcgtgctggtgagaaataactctcgcggcagtccggtggacttggtcaagaaactccgtgatctttatactggagtcaacagcaacccgggttggcacggtagtgagcaagggaccagcgatcttcgtggcgccgaccagatcaacattgcgtcccattagggtttccccaaagcagacgtcgctcgactctgtgtgcatggaaaggacaatagcccaggcagctctgatcatggcgggaagggtgatgtccttccgtacagggctgacgttcgcggtggcgcattgtcggcttgacgcattgattgtcttggggagtgcgcttttgctggcagggaatgcaggagaggacatattagagagatatgttcgccagaactcatcagatgccgctaaattccgtttctggagatggtcgataaagagactgtaaggcactcctggatcagacgtagaaggaccaatgaagttgcggtagattccataattctcctccaccttgcgaaggattagggcaacactccagccgtcgtagagagcatgatggattgaccaagtaaaggagcgtacgccgcccttctctgcaatggtataaccggttagggcaccgccggctgctgtggccactcggctaggatcttgctcccacttgataggtgaaggctttaggacgacctgcacgaaattggcagtcgccgtgtgcaagattcggcttcgcaggacctcagtttcgtcgacagttttctgccacgctgccttgaaagctgggatgtcaatatgtcgcgaaagcttgaaaactggagtggcgacgtaagcccccggctgctggattgacgctgttataagcccctcttgcagcgcgctacaagggtagatatcgcaaatagaggctttcgaaacttcgcaagtattggctacctcgtccagcagttcgtccacgttggtattgttgggcaagagcgagaagggagacggggtgagcgtctcagtagcaacagtgacctggcaacacttgaccatatccgccagcacagggaattggaaaatatctgcaacgctgagagtaagtccgtcgtcctgagctgcactcacaagactcatggctgtaaaggagtcaccgccgagaccgaagaagctgtcgtccgcattcaccgagctgggatcaacccccaaaacctcgctccataacagttgcagtctagactgaacggtaccctgtgtcactgaagtagacttctctgccatatcagagtttgaactgacacttgaccggcagctgagttccgatgtcaagggggttgggcctagactggggcttgtagactgcgagctgtccggaacggtctctcgcggcacattgtcgaagacggacgaggagtaggccttgagctggtcgttggaaaggtcctcggccattgcgcgcagtcgccgcctatcgattttggctgacgtgttgcatggcagctgctttactgggaagaaaaaattgggaaccatgtagagaggcaaactctcctggactagtctcctaacatgggcagccgtgcgaattcgagctggagttatgtccaagagcagatcatggcttgcggtttcaagggcgtattcaggagtacagaagaagatggccaggcttcgaacagtcttgctctttggcgcgataatttccacgacgacgtggctgtcttctggcagagcctgacgacactggatctcta

SEQ ID NO: 2076 - DNA, 1612 bp, Emericella nidulans
ccaatattttgtattcacatgtaatctacttcctattaaccaatccctcttcatcaaactcgtaccgcggttcccgatcctatcttgtcagttctatcttttccatcatcctgtagtcattagatggggaccttacccagtactttttgaagccgactccctcacaaacctcatcgtatcccaggatcatcggtgggggtgcatcctccagcatacttctcttcagtccctccagcgcgtccttaatggccttcagtttcgcagcgactagcgtccacggatacgcgaccgccgcaaaccccaagctagccagctccttagcagaaagattctccgtcatccctccttcaatgatatttgcaagcatcggcatctgtagttcctggacgcagcgcttcattgcgtcgcgatcaggtaatgcctctacaaacactgcatctgcgccaatccctttaaactctttcgctcgagctagggcctcgtcccatccatgaatcaatgcgtctgtgcgagcgagaataaatatatctcgaccctcgttgcgcgcgtcgcaggctgcctggatccgagcgtatgcttcgccgcgagatacaacggatttgcctttggtgtggccgcagccttttcacaagatcagtattaggcctggtcgaaatcatcagtggaactgtgacaggggacgtacgtttcggccaggtctggtcctcaatcataacccccgctgcgcctgctgcagcgaaactctccaccgtgcgcttgacattcattgcacttccgtaccctgtatcaccatcgaccatgatcggtagacttgttacgcggactgtctcctgaatcttatcgcacatctccgccattgcgatgtagcctgtatccgggaggccatgtgtgctggagaccgcgaacccggacaggaagagcattgggaagccggcttcctcgattagccgcgacgaaagaccatcgtagctacatggaaaagcgaggattttggatctgtcggcgtacgcttcaagcatgagcgatcgaagacgcgaggcttgaagcgaggggatggccccgcggctgttggggggtgattgtgacgtcatttctgagtgtgaggtgaaagagaaagggtagggagatctcgtcgtggctgtcattgtagaaaaatattgcagtgatttcggttcttgtaattgcgtgaggacatgaaggatgaggagagttcacgcggggtcgcggtgtcgctgggatttctgtctgtagtctgcaggcggggaggcaagctggagcgctcatttggtaagaacaggatcaacagtcgatctctcagggcagtcgacgtcaaaacttgcctctttcacctctcctcctagtccaaagattttgactaagttcagcccaccgtcttacactgttctcgatatcatgggatgtacacgaaatttgatatcgaataacacggactctggaccaggaaaatgcttcgggcgatgatgctggcaggctatcttcaattgtgttgcaccattccatagtgagtgtggctctccctcttacccacgtggtcattggaggtactgccttcgactattgcgaatacaatctagtgattacttctctttgt

SEQ ID NO: 2077 - DNA, 1806 bp, Emericella nidulans
gcttgatgcgtccgcaggtaaccttaatgtagtcgcctgtaggcgtcagcacacttaatttacttttcactcaggacacataccgctgtgagtcgcagagactgtggccgagccgagaccggagccaatatgactcccttttccggaatactgaaactcggatccatagtaaacaattgatgtgatgtcacagctggacttgttgacagtgaatttcagcgggttgggagagttggcgtcgatcgtgtaggaactgccgttgtcggtaatgccaaaggccgcattagccaccctagcccacaagacggcagaggaaagaaggaatgtcttggacaacatggtaaaagcgattgtcgctcgaggctgacgacgatctctggcaagcgtagagcttaaatcatattcaacctttctcacggcctcaacggacctctgcccctgtcgctaaggactcttcataacccttcatgaagaggttccaccaatctaaatgagacggctcgaaaagagccatacctccgtgtcgaattggtcagtgctagcccaataaggcgagtgaaagcggctgtacccccatgctcttatacgttcgaacgagggcttttgccgggatttgtgcagaattgcggagatgggctcgaaagtgggctgttggctccggtggatagtctattcctgacaagacccttttgatatttggacatcaatctggaacccttggcgagtcattcattgttatatcaacctccgcaggagcttaatttagtttacgaacgctcaatggcggacggacattcatacgcttaacaagccctgccgaaatgtctccttctaccgcggacatccggatgaggtcgggtcgattgaggtctggtgaccggaggtcaggttttagtcgtccgggggtggctgattgtgaaccctgtttaatatgctggaagctcgaatttcgcccctgaatgatatatgtcggtgtgttgtgcggtctgtggagcggcagccatctatatgagacagcccaaaccgccaagaggcccgaacgatatcttactcgcttttctcccaactagaaatagcgtcacgctctgtgaaaccataacgagaaaagggtccagacggctagggcaaacaagttgaatacggactggtgaacatgttctcttccgcccaatcatgatcttaatcgcctggatctggcgttttgtttgtgaaaggaaataacttgttgctttccgctgaggttcctcaaatgggattcagttgaaactttttacaagcctttgctagaaggcgtcctgcacagtccttgcagagcttggctgggctctagtcgggaacagccacgagaaaccgccagctcgtgtgcaagggaaaactttcactccaccttcgacgcagccaaccatcgagcgcagcatgcactgctgatgattgatgtccatgagcttgcatggttcaggggtcaacatcgattgtgtcacctgggctgtcgcttccttgtctcgtcattggccaacagaacattccaaatgattcaatcacattccaatcttcaggttcgcaacgtgttcggaaacaagggctttcggcaccgataagaagttggggtattcatgtcccatattaaacatcctgctactggttgatgaatccaggctttcagccgtaggcgtggtcgatgttcgcttttacgtgccatctggtacagatgtcgggagacaccaatattctacacgaaccatggtgcgtctccatctagatcagggagcgttgtgtcgcatgtcggattttactactattcttgtt

SEQ ID NO: 2078 - DNA, 2229 bp, Emericella nidulans
gcgcgtgtgtttttttcctatatacaaaggtcatacactcgaactattacatttgatcatacagcaatgcagatcgtctggcgcggctcggccgatccggccgtctacgaagaagcgcgcgtgggccgggtgtttaacaaccgccgtcctgatcgatacccaatcgcggtcgtcaaggccagctgcaccgcagatatagtggcagcagtcaagctcgccaaggagaggaattgccgcgttgccgtacgctctggtggccattcctgggctgggtggagtgtccgcgacgagtccatcctcgtcgacctgggtaactacaagtacctcggggtggacgcggaaaggtgcatagcttctgcatcgcctagcatgacgggcaaagagatcaatggacggctcatccatgagtacgggctgatgttccccgggggccattgtccggatgttggattgggaggctttctgctccagggaggcatgggatggaattgtcgggtaggtcatctctggatctctttgaaatcaattgaaagtagttcagtcaactaacccgaggtgtagggctggggctgggcatgtgagcgagtgaaggcccatcatgttgtgacggcagagggcgaactgctgcactgtgaccagagtcagaacgaggagcttgactgggcagcgagggggtcgggttcagttatcaatcacatcccaaaagccctcccctttcactgccggacgatgggctcatgaccgatcttcttctcgcaatctgcaggctttcccggcatcgtcacacgattccatttcgaaatcctcccgtatccgaagcatggattccgctcatctggctacgtctatccgatcagcaagtaccatgaagcgttcagttgggtccttgcaataacccccgactttgaccgcgataccgagatcaccgtggtaagcatgtacccagaaggcagcgagcagatatgcctcttcatcctcctagtgactctcaaacacaccccatcggaggcagaggcagccctcgctccagcccagcagtcgcgtcctcctggtgcaatcgaggagtggttctgccgggaagatagtctggagaaccagtataccaaccaagccaaggccaaccctaagggccaccgctactgcgcagagaacgcctacctgcagaacgaagccgatgtccccagcgtgctcgaagaggctttcaccacactcccccatcgcaaagccttcgcgctctggtacgcaatgaatccatgcagtcgccgccagctgcccgatatggcgttgagcatgcaatcggatcattattttgctctatatacagtctgggaggaagaggaagatgacgcgcggtgcatggcctgggtgaagaacgtcatgaagagggtgcagcggcactctgtgggggcgtatttgggtgattctgatttccaggaacgacagacaagatactgggctgaaagtaatgggcgccggttaatggatatccgtcgtagatgggaccctacaggcaggatctgcggatatctggaccacggcgatgcttcgggaccgcgggggttagaaaacgttcatgaatgggaagtagaggtgccggcatcccagctatagtatagtatatttcattattataaatacacgacgactacagacccagtttggatatatctgatcgtgcctccatgaactagcatatcatcccatataactaaaccttggaaatatggctacttagtatcattgtccaaagtgacgacaagaattatctatgtccaattgcccagaaaaaaaatatagaaatttagaatatttgaaaagggtaatcgggaaagtggaggactgtcgggtagtctccttgagtcccgcgcgggggcatggaggagatatctacgcatccttagactggctcacgtatctttgaggtctcaatttggaatctaccgctgcttacacagttatatcgtatatactgagactggccactcgcgtcagtcttgccatatccactaaaatttactttcaccatgcccatcacagtgaagtcgctccagggcaaagtcgccatagtcagtggctcctcctccggcatcggagcagccattgtgcgtgagctctcctctagaggcgccaacacggtcgtcaactatcccttttcaaatcttcatgatgaagcagccacactggtctcctctctcccttcgcctgcaattgctgtagaggcggatatgc

SEQ ID NO: 2079 - DNA, 3041 bp, Emericella nidulans
gtacttgttaatcatgataaccccctccactgcgtccagccttccgcgaaggactcctcgcgccacctgaataaccagcctcttgaagcatatgagaacctgtcttctgttagatgattggcggtgctaaggtagatggaaaagggatccgttctgccaacccgcatcgcgcagcacggtaattgagcagatgttgaaaggtttggctcctgacgactggcagtcgaagtttgtaggaatcccctgaattcacgagtgataactcaagctgtcggaaagaaagatgagccacacccaagaacataactcttggtgaccctatactttcagtccaagctcaactcggtcccattccagcacaccactctcttcatttgccggtttgtgcttttctggtttccgtatgttccttttgttattccgttgtaggattttctccatctgtcattaccatccaatttggtcctggctgtcgtataaagcaatgggatgacatctctaccgtagagcctcagtcctaacaaatgcccagtatctcgaccacccaaagtcaaccatagcggtaaggacaccatctattacggacacagactcggtgagaatagtagctcgcgtcctatgcagacgcgtatgtgcgcgccggtagagcaggacaatgcccagccacccagactttaccccaataaatcttgtcgagaacgtttactggtcgatcgagagcatgagaacaacgacatcgcataggaagcgttgtgacggtacatagtctagaaaatggtcaagtgtattcgagctgtaaaagatgagtgttctcgatgaagtttgttttttaaacaagggagggttcactctgccaaggaacggtgttagtgatcgctctgctgtggacctggctgtcaaaacgcagcaaattaaaactaaattaatcacgccaagcaactctatagggtatagagtatgtcttgtcttacgtggtcttcgactggatcggatcggcagaagacacggccacgcgggctgacccactggctagacttatttggtcctagctggcaggaactcaccgcttagtcatgatgcgtccaggctggatccggctaagcttcggagtaatccatggtttggggcagtggaactggattgatcaggaaccgaaggccgaactacacccaggcaaatttgacagctcccaaggcatcatgatttccagtccggaaaaggggttcaccccgacctcgactgaggcatacaagccgtctcccactatgtttcaagatcacttccatccagtcggctgcttcaccaccgcctcccaatctatccccctccgacagcgaaccgccaggacgccatcgccatgactctgatcttacccctctggattttgttgaccctcgccctagtcgcaatcgccgacgagcagaccgactgcaaccccctcaacagcacctgtcctgctgatcctgcgttgggcaccgagcatacctggtggttcaactccacgctcgatgatgctctctggaacatgacaaccggtacccctgactatacatctgaaggcgccgagttttcgatcaagacggagaacgcttcgaccctgttgcagtcgaacttctacatctttttcggcgtggtggaggcgcacgtcaagatggccaagggcgccgggatcatcagcagcgtggttctccagtccgacgacctggatgagatcgattgggagtgggttggatacaatacgagcgaggtgcagtccaacttctttggcaaggggacacaacgacaagcgatcgaggcggattccatccggcggcggatgcggataccgagttccacaactacaccacctactgggatgagaaacgtctggagtggtggattgacggggagctgatgcggacagtcaactactctgagcccttgacggtctacggcaagaactatccgcagactccatgccgggtcaagatcagcgtctgcgccgccgggctcccgacgcagtcgataggaaatattgaatgggctggcggccttgttgactggtctgacctccctttcacaatgaccgtgcaacgggttcgagtcaaggacttccaaagcgccaaagaatatacctattctggacactcgggttcatacgatagtattaatatcgtcaggtcagtctctgctgtacatgacaccaatttcagaccgagtagctaacccctacagtggaaactcgaccgcgaaaatagagattaataaggcgccttccaagtcactatccgagaagtgggacgagcttcctaccgcggcccatattggagtatactgcggtgctgctgttgccggcgccttggctatcgctggattcgtgctcttctgcatccgcaaacgccggcagggccgcctggaacgcgcgcttgcggaaggatcacagaccacgtcggccaccgagatggacactctgaagaaacaatggaggcagagcgattggactgccagctatagaccgctcaatcaacgaccttaaaggagtcgccttcggccttttcttttttcttttcgacaccatgaatagacatgcttcataggggtgaggatcttactatgtagatagacactgtagttgttggttggaccttttgatagaacactgggcgaggcgttcgaattctgatataattttgcgagcacaggttaccctgacggcataggacattggagtcccttcgagcgcgtgctggttcagaaaaaatggaatggaccagataagttggaggacaccttggctactctgggctggcgggttggatagaatgttgcagaacaaaccaataatcggctggacgaagtacgaaatcgagaaactggaatggacttgtagattaccagttgcatgcacccgggtgaacatacaggagactggcccgtccaagagcttaacatgggcaacaaactgctgcaccacggagcggctctctttgaacccgaccgccagactataaacgggcccgcaaggcttttgggttttggccccagagacactgtgactgttc

SEQ ID NO: 2080 - DNA, 1363 bp, Emericella nidulans
accgacgagacaggccttggacatggcgattgagatcgtcaagccaggtgtgccgattcgagagtttggcaggattatcgaaaagcacgcagcctcaaggggccttgccgtcatcaagacatggggcggtcacggtatcaactcggaattccatcctcctccttggataccgcactatgcaaagaacaaggctgcgggaacatgtaaacctgggatgaccttcacaattgagcctattctcaccctgggtgccaaccgagagaagtactggccggatgattggacgaatgtcacgatggatggcaagcggacagcacaggtcggtgagtacacctttccagcaggctgatccaggcttctatactaacatgaatatcgacagagcatactctgcttgtcacagaaacaggcgtcgaagtcttgacggccagacaggagaactctccgggaggcccaatccccataccggaggttgtaaatggagttgctgacggagttgcgaacggagatgcgaacagagatgcgaacggagctgctattaacgaaagctgaagaatgagcggcgcttgagtagattagccggtcacagaggggatacccaggtgataaggatttccattgtctgcagattttgaagctcatgcttctggacctgaaccacataattaaccaaggaccttatataactccccattcactacccagtcccagcaacaaacatgcaatagacagctttaagtcattgggggcgcggtcggcggtgcaaaatgggctctatcgagctttgattgccttaaagatttcaaacccggtgtataaactctggtacggcacacctcaggctccaacactaccagatgtaatcgtcgagcattttcttctcgtcttatcctacttcttgtatgcaatgaaactgctctgccaaactgccaaagggttaagagacacctagcccgcgatgaaagagtactattaatcttgctactagctctgcacgacgcggatattcacaattatgccttctcccttgcctcgatcgccttgtgcttacccttgtttttgtgaaagtactcctggaccttggctctcgcgatttgcactgccatggcatcctccacggtgcttgggacatcaacttcccgatccagatctccgtaaaccccatactctaccaactcccaagcacacgccgtaaaatcatgccggacctcgttttcggtatcatgcgtttgccctgtactataccttccaaggacgcaaatgccccaacccggctcctgacgagcgactgcacctctcgcgcgacagtttctgctggtatggcagagtctggacgatacggcatggagagggagatgaatgc

SEQ ID NO: 2081 - DNA, 3483 bp, Emericella nidulans
gggtttgagtgtgggatgaagccccgggggaagttggaaatgatgttccgagccgtccagaaccctagtggagatagtgggaaaaccttggaacctatggcagcagtggtacacaaagcctttatcgaccctttccaaatatggttaaggttttagccagtcccaggttcccgtaggctcaggaaatccgaatacagggttgcgccaccagtcaggacctcggttcttggattacgcagccgtgacgttagcgaggctcaagcggttccgattcatacagccccggattatttgccgatagtacctcacctgattttcgtcgttccacagtggtcttgtagaggtcagggtccaaaacggcaccggtagtttaaagttgctccaaaaagtccaatagaagcttgggcatctcctcgtgaagacaagccgttcgtcccaaggccttgcatgacagattcccggttcctgacgtcgtgtcaatgttataccttcacgccgcttccctcggcagacatttgttggtcactgaatcagccggcttcggtgggtttagcagggaatccagctcagttgacacagaacagcgctacatgtcgaaaccctcttgtcgctggtcttgcacagatccatggcacgtacgaccgcggtctttgttcagacgacccgatattgatatcgttggggaatgcgaaacatgggaacgtagtcgggaaagttggcacactgttttaggtcttcggccatgcctttcggaggatagcggtcgagaaggacgggttcgaatctccgcttcaggggatgcatggtaggggagatttccaacggctggggtgctggaatcacagaattgtagttgctgaggcgtcgcgaggttcgaatcgatgctgcaaattattagcttgcttaacacctaatctgtcccacctgagaaactcaccttggcgcgcaaccgacggctgcctcttcatactgttcatgtctcggaatgacatatgtcgtcgcacgcttccgatactcgatcgaagtaaaccagattgttgtggctcctcggacacgatcttctgtgtgcgtaatctggaccgaggccgggacgcgggtgtgatcgcacccgcgctgagactcaggtccgacagaaacgtctctctctcggaggcaaacttgaccaacgctttatcaaagtcgaattcctccagacctaggaattgagaagcccgcggtgacgcagcactgccgttgccgcctcccttgattgtcatgctactgcggttgctgtgcgtaccgttggcattgccattggcgttctggtctgcatcttcggaccggaaggagagacgctggaaggagccgcgagggccaatgaccgaggagcttcgagagagcaggccgtcgaagcgatcgtgagcatcttcggcgtcggcatcttcctcaatgatatcggtgaccgcggggccgggcgcagtggtactgctggcgattcggtattcgtcgcctagcttgcggaatgtgtcgagaatctccgagccgtcaacaccagcgatccagaagtagtctgcgagcgggctggctgacgtcgtctcggcggcagaagaggatgtgggaaagggcatgttgaggtgagatggtcgggtcgggtctgcggggttgagatcatgaatcgttcaaggaaagtcgtgggcttcgtcacagcattgagtcgggaaaccaatcaacagatgaatcgggcggctcggcaacgacggaggggagaggttcgaaagtgagttcaacgatcagggggcgaaaagaacggacaggaccagcataagtgtgggattgcgacgggatcgcgcagtcgggctggcggctggtggctgcaagtagtgcaagtgggcaaatctacaaggcagatagataattggaaaggagagaaggtaaaaatagcaaagggaaaaggataggacggccacagagataaaggcggagggggcgagaagtggtggtggaggagaagagacgttggtgggcgccgatctggatggagagaaaaaggaggtggagggctttccctacacagtagtagtagtactactagtacctaggtcaccttcttgaaccggctgcacactaccgataaatatagctcatgattttcttttgactttctctattcttcttcgcttctttgctcggtgccctgtttactctccagcattttcatcctgctgggaattgctttttcggcaggttgcgtagaaggggcagaatggtagtccagcccagccagccagccagccagccggtcgacagccctggccgagtcgcacgagcaaggacctcctggcggcctggcttactggatagatgctacgacagagctcgtctcttgcagtcctgactggtactgtgcgacagtttcagatccgatgcaggaagaaaagcaaccgtggccagcgtgtccatgcagtaccctgccctgtaatcatggccccgggcccacggacggggtatcagaagcaaaagcaaaaaagcaagcaaaagcaaagccaaagcagagcaaaagcagagcagaagcgttctggacaccttagcaccgctcttgttgaggccgactactgcaagtgtgcgtccctagcctgcagccaccaaccacccctctggtcgggaacctaaggaacctgcctccgcctttcaccacgttgagtctgtgactaagtacgtactccgtataactggtgtgttataacctccatcactagcaccaccccgtcccatcagccagtgctcggacggcccaacttcgaagtggggtctactgctagagtggactctggagattgaacgactgttcgagccaaccatggatcgatcgtttcgaacaatatggaacaaattatggtctcctctcagccgacgaagcggaaaataagtacgaatgacgacgatgaccgagtcaaccagtctatgagcgagccgtccaatgccgtccgcgtcacagagagtcaagagtcaagagtcaagcccagatgccgaggcagcccgtttgtctccaacccgtccacggagaccccatcgatgatgcctgcctaaaacagccgctccatatccagctcttggcgaccgcgtcgaccggcggcgaccagcgtcgacaagaacacgtctgcggcactcttgccgaagacgcagcatacggagtatgctttcgattccctacacccgcttttattctgacatatttcgagcagaaagcatctaaccggggttgcgatctgtgatctggagtcggttccggacttgctggcaaatcaccacgatcactgggctggatcatgaacacttgactgtagctttctcatagagaaccccacttttagcgtgttggatacactccggtttttttttaccgagtttttataaatcacgcccccccttaaaaaggaaaaattggactgccccatctttgggtggacctttttttattcatcacatcctggtttgttcatatat

SEQ ID NO: 2082 - DNA, 2196 bp, Emericella nidulans
  unsure (1)..(2196): unsure at all n locations
agtcgcgagttgtatttttgaccatcccgaccgacacctgcaggcaccacagttagtccgaccttagctgggtctggtgcatcgttcgattggtcccggactcggtggtgttgagtaacggagagccgcgatcgagaacgggcgacataaccaatgcagcgatcgagacgataaagacgaactggctggggatcggtcgggagcggggtaattccgaatacttcaccactccagattagacgattaccaagacctgaaaagggaaatccaatactcactcgctatgtgaaagcgtcacaccgctttcgaatggtttccttggacgctcggctgcactgctgataaaagcctgttctggtcgtaccgagtgccggcagattaaacaggcgaggaacaggtatagctcagaatgatctgcgttgtatgtatcatggataacacttgattaagcaccccatgtcgatagtcgactttgccaaccagagccagtcgtcttgggaaagccttgcgcgttcagcgttatcttcaactcactaaagagaaggcaaacaagccaagaaatagcatcatggactcgccctggctccccgcaaacccagaacacattgcgggaccgctcttctgatccggggttggctggagattcagcgtacgggatgtcgtgcacatgtgcgttcgtggtcgccgaggttatgcgaagatctgaaacacgttggagatccagaatccagggaattttctgtatatcatcccaagcctctccagactatgatggttaataacgtcagtcacgatcaatcgggaaagagtcgcgagttgcgagtcgccagtggtagcagtgtggcgggggctaggtacctgacgttggaggtaagatcgcacataattcccgctccaccactcccctcgagtcgtccaacaaattcggtcttctggccaaaatttcctgtgtggaagtttcaagaaaccagattgttccctaaagtagcctaaaagtagctattgcgctgagcagaagcagagacagtgtgtgatcagacaaggttagacatcggaataggataggaccgatagatagaaactacccttatcgtaagccagcgttgccccgccatcccaattcggttacgattcttccccagagtccagtgacccatcttcttctggggtaagggtggattaccaatatccagtggacataaaaaatgtctcttactggctcatccatggaagccggtcgaccttagcgctggctcagaccgtcccaaattcccagttcgactcagttcccctgaggcgtgttaatcgattgcgggctgcccttgtgccgtcgaagagcccgaggttcgtcgatcctgtcggcgggggacttgatttcatatgctttggactcttaggagggtcagctttcaccaggcgaggcgtgaggttaaatcgaccgggtcgccctggtcctcaccctcccaacaactcactcctttctaacattttctctggaacactttggtcttttatttacgatggcttacgtcggtcacacccctccaggatggctcggcaacctgtcggcggagcaggaaacgaagctgcagcagatgtggaatatcgtcctcgtcctcttggacgctgcctcgctgggcgcccccgagcaaccgattgagaaccagagcggagaggccgggaaatcgccgtcaacactggcccgcaccgatacctttgtctcagccagcggcaagagcgccttcacgacgcacttgtcccagaccctcaaagaaaccggcctgaccagtaacgagatcaagtcgatcaaggagattctgcacgataccacggcggaggagctgcgggccggcctgctgagcaccgccaaaaacgataacccagacgctttattgctgcggttcctgcgcgctcgtaaattcgatgtcgccaagtcgttcgatatgatgctgcggtcgatgttgtggcggatcaagcaggtttgcgtcgatgaaaaggtcctgctcaataccgagttgcacgctctccgggagtccaaggataagtcgaaaccccatgaagccaaggaggccgaagggttcttatcccagatgcgcatgggcaagtgctaccagcacggcacggacatgcatggccngccggtgggcgtcttgcgggtgaagctgcacaagccttcngcttagagcactgaggctt

SEQ ID NO: 2083 - DNA, 532 bp, Emericella nidulans
cacttggcagactccggatcctccagagcgcgttgtcctgaaacgcgatctctcccatgcatcctccccggcagctccggaaacgtcctggcagctttcgagaacaatgtcgcagacggacaacacacatccaacctccggtcctggatccgcctcccaaccgccagctatggttcgttcgcagagtcaacaggttccagtatcgtaccaacatcctacggcgtccatggcccaatatcgacactctcctggataccatcgtcgccacttgcagaacgtcagcgagtactcaccggccgagttcacgaagcaatatttgggcagttttgagggtcagtcgagcgtatctccaagtactatggcgtttccagcgagtcctgtgcaggttggggggtcaaatccgggttcatttgccagtcagttctttcaggggcagatgagcggtaagactctctgactacggcacccgctcaatccgtccctatgacccgcagcggtacaacagactctctatgtggacctatgggtatga

SEQ ID NO: 2084 - DNA, 4123 bp, Emericella nidulans
ggtataggattaaggtgaaccctatgaagtaacgcccagcagcagggaacaagaatgatgttgggtgcacggaggagtagccaaccgataaagatttaagcacggaaaagaacaggtaaatagtgatgggccaaaaagaggagccccgaaagggtgacaaaagacacgggagaataaggtgggggtagattaaccgagagaccaaaaaagaaaaagtctgggggtggagagttagaccagaccaatcctgagacaaaggaagcccggccgggcagtggagacgctcatgattccaggggaccaggccctgaaggctttcttgggccaccgaacggacgccctcgcactgcagttcgtgtactcactcttcgggcatttgtcttcttccgaagttgcgactccatgttccctgggcttgcgcggcctcctccccaatgtgaaacctatctttcaggtagctcgtctctccaggacgtgcccgagaccagaaacgggtaaagttgtctttcgacccagaagcaagaatatgaccaagagggtgccagtccaaagtccagatagttgcggcgtgcgcatactgtatccggtgggctgggtagatgacttgagcgggcgtgtttgctgggtcagggctgtcatatggagcgacagtaggtatctggcccgctggcagattaggttcatccagcaggtaatggtataaggatccatcttcgctaccggtcgaaatcaaagagcaatggactggatgccatgtaagcgtagatataggtttttcatggccgcggagaatgcaaatgtcccgcatcattcggagatcaaacacccgcgccgtctggtcacgcgatgacgttgcgagaaggttgttgtttacccgcgagaatttggtagcggtcacggtgttcttgtggctatggagtgttgtcaagcaacgggcggtacgggggtcccagaatttgacctggtggtccttcgatcccgaaaccaggagaccctttgtcggatgccagtcgcacgatttgacatcccagttatggccggtcaggacggtatcgcatgtccttgctgtgaaatcgtaaatcttgagagtcgtgtcatcggaagccgaaaggaattttgtatcgctaggtgaccacgctagatcgcgcacggcgtcatgatgtgcgtcgtctatcgtctcgacgttattgaaatttggtctccagtatttcacatcgcctttctgtccaccagagatcaaccagtcattactgtgcgaccatgctaaggacgtgacccccgcttgcaattgatcatagtgtgcctagatgattagcctccgaatccccaacaagaaacttcgacctacatccatgaccgtctcaaaattaaaggctgtcccattccatagcataaactcgccagtgtgtccgccagtcaacaagcgccttccttccggtgtccacctgacgaccgtgattggctttttggactttccgatggattgatgcagatgtcgtacggggatcgagtctaccggggagtgtattcgtgccagcggagggagcatctgcgatagcaaaactgttagctttgtgccttttcaatgtagacaacagacactcacatccaccatgtaactggcgcttggtctttcagtctccatccgatggccgccctggtatttcggacgccggttgcgcatccattgtaccatcgatgatccataatcggttacgagccctgcgagcttttagcgatgtccagggggagcggcttcggtaacatactaggtcgacgagggccttgaatgccgccctgggctctgccgaacggctgcgagtcattcccaccgtcgtcataataggccattgcgataagaggttgggttagcagacaaaacgatggacgaagtctgcgaccatggcagggtggaggcggagagcttgacgggccgacgggtcacggacgcactgataaggcgaggtcggtctagtcagctttggcagccaagattaatttcgaatagcaacgtcgtcaaatgtagctaggatgcttggaataatgctagaacagttgcagcgatttgagacgcgagaccaggccgcaagaatgattgggtcgggacacagctgcctccgacgctaagccgcgttggccacgacggcccaaggcctcgaaagtccccggccaaatgtgccaactctcagtcgctggaagactggatccagaggtccaggcatgcagatggaacaacggctcttctctcccctgtctctttagtctcgccccttgaggcctatgctcgaactttacgacagtattatgagaagcctagataaccccgccgtactcaagttcttctcctcttctcattgtccaactctgctctcctgctgtaaacttgcgcgccaaaccatctcctattgtcaattgacctatcgtggtctgtcaatctgaatcgtgatatctatccgatgcttcgtcatccccactttatccgcagggctgagtagatgccacagcacgttctcgcatttgatattcggtcgcatctattcatcatttatctttatccttactgtctcgtatattcaacctgcatcgttaacacgtttatagagggagatggccgtcgagggttcgtcgcctgtggccgtgtccaccaacggcactggcactgctaataataccaatcatcttaatggccattcctctaatgggtcaaagaaaatggctaccagaaagacagccatttatcgacatgctgtggctgttcactcgcaagtccagcactcatgcctcagcagggactcgaccaaggctacgagttttattggattccggaacctgatggtggtcgtgttgggtgaggatatcgtcgtcttgactacattgatactatgctgactctcgatagtggccatgaatcttcgcctagtgattgaaaacttccttaaggtgagcttcttgcatatgacgcaatggttgggctcgtttaacaagccgtagtatggtgttttgatttgcatcagatgtcatgactatcgcaaacaagacgttgtgatcggagcgattctcttcgccctggtcccttgccagttgctatgttcgtacttcatcgagttggctgcttctaggcatgctcaacgcgttatcggtcgagcaaagaaacaggacaaggacaggatcctgaacgagtctaaaaggacttggttcgccattgcgctgctgcattctattatcagcttctttggtctggctgcaacaagctatgtcatcttctactacgtcaaccaccccgggatcggcactgtctgtgaagtccaggtgatcatcgtgtcgctaaagtcgtactcgtacgcactgacgaatcgcgacctacgtcgcgctatgctcggctctccgtcggcggactctgatatcccagaactctaccggtcttgtccatatccgcggaacatcaccctgggcaatctagcatatttcctttgggccccaacgctcgtataccagccggtctatccccgaacgcctcgcattcgctggtcttttgttggaaagcgtttattcgagtttgtttgtctctcagtggttatgtggctactttccgcgcaatatgctgcccccctcctgcgcaacgcgacccagaaaattgccacattagacattgcatctattttggagagaggactgaagctctccactatctctctcgtgatctggcttgctgggttctatgccctcttccagtcactgctgaacggactggctgagatcatgcggtttggagaccgcgagttctacacggactggtggaacagcccaagttttggcgtgtactggcgatcctggaatcgccctgtgtatatattcatgaagcggcatgtttacatgccgctcgttacccggggctggaacccaacgttggcaggtaccgtcgtcttcgcggtttccgccgtgctgcacgagatcctggtaggagtccctacacataatctgattggtatgtttcctcggacacaatcctaaggctcttgctgacgatgttaggtgtcgcgtccatagcgatgatgttccagctcccgttgattcttctgactgcgcctttcgagaggttcaaatcccctctgggaaaagctat

SEQ ID NO: 2085 - DNA, 3605 bp, Emericella nidulans
gcccaagtaattgcatctgatctctttgacgaagcgattcacctggccagcacgtttcaagtggcgggatccagctaacatattggcattctagatgtcattgctgatatctgcttggttttatatccaaattctctttcaggaagacgctcgaagtacaagtcttcgtcggtttgtgtcctgagctgtcttactgtttctgatatcgccattcatctttctcgatgtcaatataactctctcggaggacagagtcttggggcagggaatggagagagcaggccagtttaggccaatatctaaataagtggtgtctaaataagtggtgctgtgtgggtaattctaacgggcagatcttcccatgcgctgccataggcctgatcgttcgacaaaaggcacaaagacaactaatcagggatatccttttcttgcccacggactctattcgaagttgccggcggatgaccttaacggacggatttctggcaatgatgggccttcgggtgctggggatgagatcctagaggctggaaatcagctgtaattattagttcacaaatgcctcacccgttccttgggagcatagatgaatgttccagttccacccgggcagactttatttatatacttatacttactatcttcaatgtaagtaacaacctgttgattgagaaattcgaatggggttagggtcgatatagggctttgtctgcaagaaaatcgagagtctggtgagagatcgctataaggcagaggaggagagcgatcaggtgaatgagacatggtgaagattgttaacaaaaaggacgaattagctgacaaacttcaaggtcaattttctaactaaactggatcctggacgttgcaggtgtagccaggtaagccgttctatagctgagttctcagcaattcgagagaaaaagtatcatatttcacgccataccaggacaacattttcacctgtaataaaatctacaggtcaggaaaatttgtcaaataaagaacaatacgaaagagaacattgattgagtgcgagcttacgaacttagagaacaaagccatgttaaatgtctcaacttatatagccttccgctagtggaattccaatcactcccacaccaagtgctcggccatatccgttacatgttcaagactcaattattaattaacctagcctgggaaggttagtccaggtctgctggctcggggtcactgcctattactgactaggtagacgaaccgcgaactggacataaaaggacagaaaccctccttgcatttgccctaatatcagattcagttcactatatgctagacgacccaactcagcatacttcaatttccaagccgaaggcaacgactatcagaacgatgccatccctggagcacctaccgaacgaaatcatagactccattgcgttccatcttgaattgaacgacattcgcaatcttcatcttactagccgatgtttagccctagttctttcagttttctcccaacagtctgccgtacctaggatcagcggggagccacttcaagtccttcttccgacgcaaacaagtcgacctcaccgaacatgcacttcgcgattttgaaacaaaaactgatcgccctggtcgccctggtcgccctggtcgccttcttcaagacctggtcctcgtttgggttgtgaacaacacaaagtggcttgcaaagcggcttaaggactcgaaaaatgagggaacagaagacacgccattggccagaagaacaagcgaaagcacaattggacctaagcatccttatgcagcggcaaatataatctgagagaatgcgcgagtcaggaacagacgtgaaactgctcaccaaagcattttgcaacctcattgcagacggccgcaaccctgggcttcaatcactgtcgctaaaagtggtagtatatcgagtagatgccgagcaaagacctcctcctgatactgggggcagctggatgcttatttggcgagctgcgggtgacgcattccacaccgcaccgggggctttggttgcgagtagaacgctggttgaaagactcgatatctataattgccagcaaagctgtagcttggcctgcaccgagctaagtgccattgatttcgagtgcaaaggcctggcagaagacactatcaatcagctactcagaccgcatcataaacgtacggaaagaggacattggtgatacgggcaactctgcagacgaaatcgaccatgatgcatctgccctcgatgatttcagagaagatgatgatatcgaggtggaggcgtgcgatgagataaactttcttagtcttgcacgactgttgaagctctgcagtggtctcgggaatccggaactgcatcattacgcaatcccattggatgattacccttactctgatttacatggtgacgtgttcctgcagcacatagttgcgacggttcagctgcccaagctacagcgctatacacttcgaagactgcgtgttcgggaagtggacctgctggaattcttgaaagaaaaccacgcctgccatcgaagtttccagatggacatggtcaggctggctttgggaacattcagctccatttttgactactgcacgagcgagcacgccgggctggaaaggctctattttaacgactcgttcgctccgggtagttgggtcatgcgtattatgatagggaccctaggaagcctagactgataaattttgacgacccgtgtagcaatattttggataggataggacctgaggtcagacggccaattgtgattctttcctaggtatgggcgcatgacttgagatcagtctgggatccggaggtggaggggcagcgacgtgtagaatatgggccgtttaatctgttgaaatatggtcagtaacatcattacctaggttgttcatgatagctacatagatagttaagttcactgcagttctgtataaattttcagttgtagatcatatttctcttggcgtatatgtgtttagccgcagtcattccattactgctagctatgtagaagttctgcattttccattgctatggaccaagggaagtgtccagaggttgcaatgcaatttcgcgacagtatctcccttctacgcccaatttggtgaagaatccaaggctcctaaatctgtttccactgtaacccatgaatttagtagactcaaggcatgtgccactatctaatatgctactcacttctcgcgatgctattgaagggtcagtacttaggtatttacttttaggttggacaatcctctaatgtctaatccatttgaattcaaggcagtatatgctcattagagaagtggcgcataattactgagcaactactcgtgctagacgcgtcgtcgacttttataagggcggttggtcttgaacttcctgctggacaacccttattcgcacatgtaccttcatctccatgtcaagcacaccttttgaattcctagctgaggtcatcagtacctatcctgcataggcaaaaggatgaatagaattggggagttgagagaagtgcggtacggcgtgacattcaaccactcaagcggataataaaaaaaaaaaaaacgaaagaggaaagggaggcaaagaa

SEQ ID NO: 2086 - DNA, 4689 bp, Emericella nidulans
gcagcccgaggataaatgttttcgggatatcggagactacatgacaaaacgctatagagatttgggcatacaagggagccatgagagtatatgactgggcagactacctagatcaagcaaccttcccaacgccattgagcgtcaagtacacatccgttccccacccccacagggtctgaacggcaatactaccaccaaagtactccgcataggcgcggctcaacgggagaccatatccaaggccagcaatgctgctcagctggccactattggaagaaatcgtgtttagcgcgtctatcccgcctgcttcgcccatatccaggtcagaaaacgtggtgaagctgtatgaccagatctggggcaagacgtccggggatatgccgccgccgcggtctcgaattcggagggtaatgctttgcgaggatggagtggagaatttgatggactcgtttgcgtctgcagtaccaacaactgtatcgacgtggaatccgacgtcgctgtcggattgagcgcctgtgtctagggcgtctgctggtttaccgttggtgactggctcatgtgcttgtaaatgattgccaggtacatctggtgcggcggcgattgtcacttcaatcggctcctgctcgtttccactctcgatgacggccctgaatgcattcttcaatagctcggtgaggatgtactccacatgcacagggacatgcgcgaaagtcgcgtccggttgtccgtgaatctccagccgtgggcgcaccccatatttcagttcgcaaatttctccaacgaattcctcgcacgaccgtacaatacgagccggttgcaaagcggtatcgattaccccgatatagtttgacggcggcgcatccttccgcggctgctctcgtccttcggctgatccgtccccagcaggccgcgacgcaaaatgaagcgccaggtgttgctctgctattaaccgcgtaccaatccgcgctcgcaaatgtgtatccaggaaccgcgtcacctcagcgggatcgatgtacttacgacattcaagaaagccgcgtgctaggatggggatcgtgttggaatgcgtgtggacgaggtctgctagtacctcagcaaattgattctcttcctccagggtcgtgacctgccgcttttgccaggggagtagcgttgacagcgaatgaacgtaattgccgtaaatcttggagacatgcgggtttgcgacgacaataaatgggaggtttcgaagagcttcaatacgggaagccagtcgggctgggagaagagagagggtgaagttggcggaggcaaggagggcttcttttgatagtggcggacggccgtatctagaaagacatcgtcagatcgcgctctcaatgggtatctcgccgattcctcacttcagcaaatcagctagagtcaagggtcgacgccgactagctgcaagacgagcgacctcatcatttgcccggggtgtaagattttgtgtggtagtagcggtggctgtggtggtgagtttgggatgactggatgtcgcaaaaagacgtgctgctaccatccgactacggtggcgaagggcgcttctccgaaggtcacgacctatagacagtgtcagaaatgggatcgttgccgccatagcaagcacaagccatgctgggttttaggtcaagagcagttcggaaagcttgtgaaattcatttgtcgcccgcggtgaggatggactcacgtgccggcgctcagtgcggattgatcatccactcgacacgaatgtttctcagcaacattccaacctacgttttcaatctggaatcatgcgttgttctcattattctccaccacgaagacgatgtttggatgtcttagcttccctaggatactatagcggtgcttgggaacataacctagcctccagctccagctagtatctgtgtttacctatcacggctagaacgtcctagataagataacccaatggcacgatagtggggattttgaatgtgatagcgtttatataagagagaggaggggcagcgatcacattacaatcaacagaacggtactcgccatttcctacatctcaggtaccaagtacgctccaactgatcgcatcgtgattcagttatcggcacctcaataaacaggcgcttcaacattgcataaaaactattctcgatgaattcggtgtattctcttgtcataaagcataaaagtcagatccgtaactcatacattagctcagtgatggttcgaaacagctcagaaggcagcgtatttgctctattgctcagagtccatgaagagcgctagacccccatcactgagtcttaacctccccatcctgctcaacatgaatgtgttcgcttgattcgaagactgaaacgaggtcgtcggggtattcaacgctagtagatatgtcagccggaatttgttctggagacaggacgacaacaaggagctcactcacgtgaaacccttgatcagggtgtactcgtgcttgatggttcctcccttctcctttgcagcctccttggctctgttgtgcaaaaagcaggtttagcgaatgctttcgatgatgcggcggaagggaggctcacttgtgaagctcctcgatgggggagtctttcttcagggtaacctaggatagggaggttagtggtgagcctggacgagtgcacgacagggcgacgaacgttgtagagaggcatcgtgattttgagttgtgggatgagtggacagggagcagcgttcgagagatattctaatgagagcaagtgtaggggaggctggagagtggtggatcgtagattgaaaagggtccttcagccgaaggtggggagaccgggcttatatgtatgtctttcccggggaggggtgactcgagaggtaatttccctcattgtaagccctgaagataaggtgaaacaccaagttactgccactaataaagcgtggctatggccataggtagttgttgcctactctatctaggtggtatcggcgacgttcttatgcctgatgtaatgataataattctgcctgaagccatctacgtggtagcagaaggtcatggaacccggttaaagatcagacgggcttcaaggatgctgctataatgctcatattattcccgtctaaccaatttcataccaggcgctataacaaagtgacgactgccaacgcttgccaggactgtatcagtgtcgtgatcacccttgccgctcgaggctcccctgcagcagcagatgacgtacgagcgggcgctgcaagcaaagcaaatgcgggacacacacgtgactgatgaacaagcatatgtgcaaaatgacgacgattgtatagtcaagtaacccggctgaggctaaacttaagtgacttagaatgcataaccctctctggccagaattttgctttcagttaaacagcagacaatctcgtaaacctttgatttcgagatgaaagggaggtccagagcagcagtctagtggaatgataatgaatagaacgcaggacagcagtagcgcacctgaaataaacaggcagtgcagcccagtctctacccactttggccacggccttgccgcttgtgggcttcattgccttgggcttgtgcaactacaaatgctgcggtccctgagctctatcaaggtacctgatctacgcccagtccacgcctatcatctttgcgagaggaatttgcacagtagaatgaacatcgaccccactgacccgctggcgccactcagaacatagtgtggccgtcacgtacgcccgctgtacaaattatcttgggcgcggtgctgccacaagcgacaatgtcataagccgcggctatatctactgctgttttactgcgcgcgaccttcttgccggggatcaggactcgggtagtataactcgggcatgagaatagctgcatagtactgacttgcagtgatcctgagacgaggatcaggcattggacgacaggccggttggtacagtttgaaagccgttgcgcttaggtgcgctgcctgcagagccgcctcgttggcgtacccaagcgctcatggtcggcgagatggccagatctgttgctgattccatctcctgcagagcgtggacggatagtcgataagaagagcagatggccgacaagagctgatatcaagcggtctggactgtgatcattgccgaatttgaagggggttgattgttttatgcgccgtactgcccctgaatttcactcggtcaggtccttaaagctgctgctgctgccgctgtttgtctgcatcttagagcagttaattcagatggtaacggctaaaatcctagcacaatggcacgatagacaatatataccgggcgatggacgaagagagggttcaccgctgatatttagagtcataatctaccaagattcggtgatgtgcaagttgtttcggcgttgaggcaggcgatcatcatgaattccttgtgcttagacttgtcttcgtctatccaaagcagtaatgttgacgcggagacgccatggcgcttccccagaacttggaagcggctttcatattggcatgcagtcttccatcttcgagatagcaagagtttgggtccagcagtaccttataatatgaagcaggtagagaggctgattttgtaggaggtgaggggtggctttgacaacctccgaggtcgtcctccgccaaaagaatgtcagatgactgaatccaggagata

SEQ ID NO: 2087 - DNA, 3401 bp, Emericella nidulans
aaaagtacggggtcacaatttcaggttaacctatggaaagattaaagaatttccaaggttgggccgccacacgtgacccaaattaggtagttttccaggaatttccgggcgcaaaaggcatgttaacttaacttaccaagctccacccctggtccaagcaacgtgtaatcgagaagtattgcaaaaagcatggaatcattgtcgaggcctattcgccaattgttcggaattataaggccaacgatcctacccttgtcgagattgccaagaagtacaagaagtcgacacaacaagtcctgatacgctacgcattgcagaagggatgggtcccgttaccgaagactgataattcagagcgcattgtgtcaaatgccgacgtattcgacttcaacatcaccgatgaggatatttctgtgctggacggactggaccagggaagtgctggagccattgtggaggctgttgagaatgagtagatcgtttgtccaatactataataatgcaattaaagagtttaatagtccggtcgttgcataagaaacgcattgacagactgcagcgtgctgcgtgatgggttcacgtcatgtttcgatgacacgatccaagcaagacgttgtcggatgaactgtttacttatcggttgcgtttgaggtccgacaaactcacctacaacagtcagagtaaggttggaatagtgctggtagcgattcaacttacccgcatcattatagaacaggcagattatagtgagcaaggtgccagcagaaaggtccttcccagactcgcacataacaagcagagactgtgacggactcgaggccaggtgcagattaacgaaatcccgaaccttgtctaaatgattccggaggtcccggccgccctgctttgaggatatacagcctagattcagacgcttgggtttctcttccgtagtctctgcgctgctattgcaatcaataaccaggtcatagagaccattggcagccaagctaggatccgttcggctgacatataggttctgagacggcggcgataagtgtcgcttcctgccccgaaccctgcttacggctctcctgcatcaaatccgcaatcacctcgggcaggtcttcttctgcccgtgtcaagagcgtgaatttgtcagcccaaaatacagctggtgtaagaccgtgggcccaagcttcgctgtcatcccctgcaccttggatatagccaccttcggatatttcagccccatggacccgtttcgaagccgagcaaagaacgaaaagattgtacgcttctcctttgctcaggtctgttgggtggaagtatgtccggtttgcccaagcaatgcgtattggcttccccagctgctgcttgagatcatccagatcaagtttaagactctacaactcgatcagcccacctcggcggctggtgctcttttcgtacataccttgagtgaatggacaaaaccgtcgatcctttgctcaatctgcgactcctcagaggcacctaagtagttcggcggcaattcgacggaatgatatgcagtctctgaagggaacaacgctctgttaaagacggcacaccagataggtatagtctttgacaaggcatcaggcatcactggtggtccgttaagatagagcgaaagagtggctaacggcagcaatatgccaataacgaggtaaattacttacatttgccacgacgagtggagtccactataatgcacctgcatgggtcaaaccgcgatggttagtttgagagtcgaattaacaccgcagctcgttaagaaggcatggatggctcactgaccccccgtggtggcgggcaattggtagaatctgcaggtttagtctacgaaagctgaaatcccactggccagtatgtccgtcggtgctcttgaagtaagcgctcccagacttgacatcgggcgggatataccaactcccgcatctttcgttggcgatcaagggtaggccgtaatggtcagcaacctcacggacaaatgcagcgtcagcctcgatagagcggagtcggttgttgacggaaagtgcagatcgtcgcaaggaggctagtgtctgggatacagatagctgctcagaggaggggaagtgaagcgccgatacggacacggggaagtctgaattggcgacactacccatgtcgagtctgcttgtcttgctgcagaagaggaatcaagggataggagacagagccataggataacaggtaaggagtgtatgtagttagagtctgtccacggccggttgtataaaatggctgaactaggattattctgtccgagtcaaagcgtccaagtcctgccaggctgcgcaaggcctggcgcctggtgattcgaaccaatagaatgcacacagtgtcagcctgtaaagtggaccacaggactgggtccagattgaggcatcgaccaatatttgatccgcatcgtgaagtatgccccctacttcgtccaatggtgtactacgaaacgaaggagacgactgctgcaaggaatgtatcagaagaacctgatgcgtaccgactctcagccgccaacgagggatctggccagacctgaagaacgcagggttggcgtcgaaggaacggttgcattgtccatcgactctcgataattacgacggctacgtagaaccaagacttaagagctcccttacaccggaagatagtgcataagatcaagcgctgattcgtggctcagcctgggctcaacactacggggacgcttctagggtctgaggtatatactgagtccaaccaggcgtcgctggaacactgtactccgcatagcagtagtttgtcagggataactgctttgtcttataacgacgcggcggtttcagtcaccaattttcttcgttttcggcggacattgatgctattcaggaccaattggttcggatgccaacccgactataacgagaaccgcctatgacaaagacacggcccggtagactgaacagacggactatccacaatatccagaagtacaaaaaaaataaaaaagaagaaaaagaaaaaaagaagaaaaagaaaaaaagaagaaaagaagaaaagaagaaaaagaagaaaaaaacataaaggaaaaggagtatggtgaatgatgaaagtgattcgatttggttctccccatgaacaagcggttttctgcgcctttccatatcggctgcgggaccagtctcaggctcccattcaaacagcgctaatcccaatttgtattgcatgaactttaccagaatcggcgtgctaaggaaggcagtctttgataggcctagcggtgcgattttctgcgccagtggagtcccgaggcccgccgtctctagatgagctgcgttgcggtcatcaagttctcaacgtcacagtatgaccgcaggccccgctgatccgcccacgta

SEQ ID NO: 2088 - DNA, 1853 bp, Emericella nidulans
ctctctttggaaaatgggattggtgccaagggcatatagctgcaagatggcggtacgatggtcgaactttattgttcccgcccggttcaccgttttggacgggaaattttgaagagcccgcggtataactagctattatagactggtttacccgaacttacatgttctctctgttctcttccatccgctagtgtaccggacactcatcagggcaccgcacgtgggggaacacgtctttcacgggctatcactcactgtttcatccattgagcgggcgagaggtgcaacaaatctccgctgaagtagcattgatcgatgcgtcgagattgttcaggacttgccgtccctgcatgcccagaagcccgcctcccggaggaaaccgtggtgggtggatcgacttactggtcagttggactgataacgacgactcagacccctgtcttttcatgtgcccgaaagccggcggtcgttccagaataagcaggggtggcgcggcgttgattcctcctgtcttagtatgcccatggctgttgtgtcgagtcaaatcgagtggtcgatgcccgttagcatagcgggctgaacagactgtggtaatttgaccatccttcagtattctcacgcgcaaaatgtcttttattaacccgatgtgtcaacgaatatacaaaggttgcgtcgaccaaaattgatgctgctcgagtaaccatcaattttctctgcctgctggggagcggcaatcttgcacaacctcacactcaatatgtcgagatatcccctagacagccaagcaccagcagtaattgtgctgactcgcttcttgttggtaaccttgatcctgggaacgctcgctcggctagcgacgaaatggtggaaattccgcaccttctttcgggacgactactacagcctaggggcgatggtgagtcaacctgggaagtacaggatgtgtgattgacagtcgcgtagctagcctccatcggccaggcaatagctgtctcgatcgcagtgaacgagggatatggaacacatatcaaacagctcagtgaaggccaagtagctggtattctcaaggtgagcacccctattttcatatcgcaagcagtcctgtctcctggctttccgctaattgacaattgcccaactaaggcccaatacactgccaatttcttttacatctttgggatcgccttctcacagctttcctttcttgttttcatccagcagctggcacaccatagtcgtcgagttttttacgccctgcagattgcgatcgctctctggaccgtatccagcatcttcgcgtccgcattccaatgccatccgcgtcaatgggattacattcatgaccggtgtttcaatcgcgtatggatcaaaccgtatttaaatggatattgggggcgggctaacgattgaccaggaggcatggtttatctacctggctgcgtcgaacatcgtcaccgaggtcgccattattgtccaaagcatacacataatgataaaagtccaaacgacatggaagcggaaatcgaacgtaatggccgtcttcttattcagagtcctgtaggaccctcccatcttgtcgtcgctcagaacagagaaaaacgaaactgaccataatcgtctcgacagcgtccccgcgactctaattgcccagtgcgttctaacccataacaccattaattcctccgacccaactctagcgacatggtcgatagctgtctgcgcgcaactagccctctgcctaagcgtcgtcacagccagcacgccacaattcgtccccgtgctcagacgcctacaatccagtgggatgagactcgatggaatgacccggtacaacacctccagcaacccgcagt

SEQ ID NO: 2089 - DNA, 2979 bp, Emericella nidulans
ttgtgcctttcgcgctgtttgtccgcttttgctcttgcttccccttccactcttccctgcaacgagcttttcactaagtgtcgttgtcactgtggactaccggccggcaatttgagcgagacgattctgattcccctaacggattcaactcttgctcgcattctccaaaccgcgtccacgaccctctctgtccggttagcaattggtctggcatccaaagaccgtctctggtgctcttagaaaaaagttcgtctcgtgtccgctttccgaccatcgcaacgtacacggaagaaacacgcctcaccaccaaaatcgtccgcagagaaggaacaacccggaaaacgccagttgcgaccgctctttttcgctctctttgtgttcgtttccgcttgtgtccctgatacagtgctgttgatttgtcccctcatgcttttcaactaagagacatcaactgcattaaaaccagagccgcggctcgttgagcaacgctcttcctcccccccaggctcagggtgtggcggacgcgtagacggttcgtttctttactttgccttccgtcactctatctgatttggttgctgactggggttgtctactgtttttagcattcaccgtctaccgccccgtccctgaactggttccattcccccctcttcttcaccatgccgtctttctacaacaccggcctcccggcctaccctcttaccccccctcacatcaccggtgccggtaggatggagaacgaaccccccttctacgtcctcggtcactcggccgctttccctccccgttatacccagagcggctgtgaattcatcgagcaatattcccagcagtcacactgttacgccaagccaccgatgaatgcccaacagcccatgcactcgatgcgcaccggcagagacatgaccgcgttaagtcaatccatgttcggccccgttcctgctgccaacgtgctgcccccgatccgcaacaacgtccaactgccgccgatggaccacgccgttccgccgcagtatcgccgacaagacccgattgctcagcctgaacaggccctcaaggaggagaaacctaccggtggcgttgccgcttatctggactatgagatggatcagatgtccgactttgtggctgagatggcccagggaatgtatgacttgtacatcaccaagatcaacctatcagatattgacttcgcgcgaagcgtctacccaggatcatctgtcccgccccagttccggaaatacgtcttccagattttgtcctcaacacgcctgccgagttccaccatccttctgggtctctactacctgtcttgtcggatgcgtatgctctcttctgccaagatttacaacgctggcagtggccaggtctaccgcatgctcacggtggctttgcttctaggcagcaagttcttggatgacaataccttccagaacaagtcttgggctgaggttagcaacatttccgtgagtgatctgaactctatggagctcgaatggctcttcgcttttgagtggaagatccatgatcgcatctatgaccagcaggacggattcgcttcatggctttctcactgggagaaatggcgtgccaagtcttccatcagggctcacgaacctcgacgctccctcgctcccatcgataccaacatcacccgcagcaaccgggtttcgaagccgcttctctctcccgaagggccgattcccccacagtatcagcgaaacaaccaatacgagaactcttggcttaacccagcagcatcagagtattccccgccatctgctcctcacagtggaccgacaactccggactactactcagttggcccatgggggtactcttctaaccctccaccgccatattcgagtacctggatgcctcatcatcagtacatgccgccccctcgttcgcagccgccatcctaccaccacactccatcctacggtttcccgtttccgcacggtggttggacgactggccatggtgcctcctgcggttgctcgtactgcgccaaacacatggaacattacatgtgtgctaacctcggctccatgcaaccaattctcgctgcttgattaacgttacgctgcatacgatacaatgctgttttcgtcatcttgttctgtctagattttccttcctttgcgtcttccgattcgttcgatgataccgtcttatccttttcagtcccattcgcgttgacagtccggctttttttcggtctcagttacatgcagaaaagcaccctggttatcttgtctcttggtccgcctgaacggaaagaaaagtcaaaacagaaaaaaaaaagtgtcaagcagcgatattggaacgactgccacatcttctgttctgagattccgcatgcatttacgatatgacacctttttctttttatacccgatttgatatgatttcgttttcgagagatctcgtcaagtcaaaagcagcgagatccagcggcttctcttgggtcttggagtcgagaagtcacgataatttatgattttcgttcatcgctttctgctaatgccccttgttctcgatcttcacctatttcgattcttctcttcatattttctggattttggcatttcatctggcagatgttactcatagatcgattcacttccccatcataaacaaccattccccatttacccggcgttgcaatcatgtcttccgttttacgttttgcattgccgcatccctccgtttcggttggtttatattctctttttctgccctcagtcgatcaaggttatgcttttccgctgcatgtactctgacccttgcactttcaaaatcaagggttgggctgatcggacacggaggacctttcttggcggtaacattattcttttttgtctcttttattctacgacccttcatgcatgttttataccggttctttttcgatccacccacaaaaaaagtgatactccccttattcccggttgtgatctttttgtcccctgt

SEQ ID NO: 2090 - DNA, 3480 bp, Emericella nidulans
ctgcagaatgtccgccaaaccatctgcgcgcgtcaggttcttcactatctctggcagggagggaagacatgctgggacccttaatttttctacagggttgcaggtggcggagtcgcgggtttcaggacccgcgactagttgaactccttatttcgggaaacacccttgcaaagtcacagtcctgagtctctaagtgggtccagaaagcatccctaagtcaatgtacggagacctcgtgtgggtatagataataatgccaagtgaatgcctgcgtggtttttcctgcacgggccaggaggatgaaaccgagcgcttatagaacgtttggtatacgtttccgcccctagatggaagcacctacggagtttaacagatcaactataactctcgagacaaagggaacttgtacgcactgatacataaggtcgacggctaccagtaaaagaggaacaagtcgataagtccatctttctatcgttcgcttcgcagctcttttcgtcatgccgttcttcaaacgagcctccgtggtgtaccttctctgctctttgacgccatctcttgccttcttcaaagtgccatgtagcacgccgctcgtcatacaacgggccgatcctatcgtgcaacccggcgttgcatcaggccatgtgcatacaataatgggcggatccggcttcggcttcacgatggactataacatgacccaaacatcccagtgcaattcttgctcggccgtcgaggataagtccaactactggatctcctcgctctattaccacgctgagaatgggagtttcataccagtgccccagaatggtggagctctcatctactatttgtgagttggggttctctgcccaagcttacccccgcagatcacatcagtctaacagacagtgaagacagcgtcctgacccgacgactgacggcacaatcgtcgcaccacccgctggcttccgcatggttgcagggaatcccttcgaccgccgcaacaagggcaacatcgcagctcaagcgcgcagctttgcttgcctggactatgatggccccggcacccctcagacccatgggtttccaaccaccaattgcccgaatgggctgcgcgcacaggtattcttcccttcgtgctgggacggggtgaacctggatagccctgaccacaggtcccatgtggcctatccgacccaagagtacgacagcgggccctgccctgcatctcacccagtccggatcatctcgatcttcatcgaggttacctggcacactgagcagtttgccgatatgtggtatggcgataagcagccctttgtgttttcctatggtgatcccactggctatggcttgcatgcggactttgtaagtgtcctaaaagccgctgccaacgaaccacaaccactaatcttgagccatgatacagatcaacggttgggacatcgacgttctccaagacgcgatcaacacttgccatgacgagggcggtgatattcgacagtgcgagccaatcaccttgcaggaggactgggtgacagacgggtgcatccttgagcgctcaatccacgagcagatcgacggctggctcgatgcgctccccggttgaaacccgatccagcccgggcccgaagatgcgaagcctgtcacaggttgccgtgcacccactgctattggcgagcctctgcattactacactgacctcacgagcagccacggatgggagtgggttggatgcacacaggacaacgttggcggggagcgcattctgaccggttcgtccgccgggacctcagatatgacgccggcgacctgcgttgagaaatgccttgccgatggctacagcttcgccggcgtagagaattccaatgagtgcttctgtggggatagcgttggggaggataaaatgccgaaagttacaccgatggggaaatgtttacagccttgcgctggcgacggtctgcagaattgcggcgggtatgggttcattggattgtataggaaatgcgagggcgagtgcggcaatctgcagtaccctgtggttcctcactagggggcagcccgtccagatgcccaggatagtagccgactctgatcgtatggcgatggccaccaacaagttgcatataagcttgaacttcatgggcattaatctgattctacggatactctatttagccaaagttgccattttttgctttttgtttcagcggaaaagaccattcaatataaccgccccatttcctttttttcttattccatacctacagatactgtgtacagtcagagcccttgctttattaaacaccagcagggtgctctgttgaattggctaccattggcttcatcttaggaccccgaaccattgagtacaatagagatccttggagcccagtatttcccatttcttaacttgtctaaacaaaagatacccctcccctggcacgccaagcgcgagtgaataccccgcaatgtggctttctttatgccggcaacagctccatcccctgtagctctcccagcgatactgacatggcgggtaatacggcaggctttctgatagaaggagttctgagccgttggcgaaacatacttgatatcaacactggctagaaataccgatagacataacactgggtaatcaaaaccgaccaaataggtccgtgcctatattagtggtttgggggggtttggaaagttgggggggtaaaaaacccactaggaatatgaaatcgcaaatgctcgcattattgtaccagaccgctgcaatcttaaagtccttctcagttaattgttaaagaacacgctacaaacctaatatgaaacgttggaattaaacctcctaaatgtcatacttctgttacacagcatatatctattaaataaatcctctacccatccaattatttactaaatcaaaccatctttccctcaaatccatactaaaagatagtcccatgacttaaccattttccttaataccattgtccacttataataaaacactttaaacctccttaaacaatattctaatattatcatattcataaatcatatcttcggatatcaacttacctccatctcatactacaccccaaatccttctataaaactcattaatacttctaccctttaacactcaccataataacccccaccctgcaactctctctataaaatcatcaccctattaagctttatctctaccatttactcttatacatctttaccacatttttttattccatttacataatacttatttcaacaaatcttctacaaatccactttctaactatatactaatctaattaaaattccttcaccattaatgcaacacactccacatctttcaatctaataaaatcctattaattcattacatcaaatcttactcctctcacttctgataaaccacttctctaactcttttaatatatattattttatgatatacatctatttctagaataatgttcttactaacatatccac

SEQ ID NO: 2091 - DNA, 2388 bp, Emericella nidulans
tgatctcggcgtgtcgttagtcgacccggcccgcctcattcctgtcactaggcagctacatgacctatgctagtcttcttcggatgcgctcagagtttttccccaacatgttcccaatggttgttcggtcggacatgttctcgctagagacacagctgtgagggaatctttgagtctagtacagggtaaaccgatcgaaggccaaggagatcagcgccatgtagggttcttggtgccctgctcagcgtatcacgcggcttgtgtcgtgacccatttgtttgtggaggacgaggaggcgctcaacggcacgggattgctgcatatctttctggatgactgcgggaatgtagtgaggcagtggcggacagataatgagggaggggactatgattttgatgggacgtggaaggagggtgtttggagggaggatttttatgctgggaggggagagttggggcctgcttatcgtgctggagggataagggggccgccgtattcagttttggggtagtgctggtggtatctgcgggttcgggggttctgcttggttaattgaccctttacaggttaggcatgctggggtctggaactgctacgtatatactcaccattaggtgctctatcgagaggccatagagcaattttatactgttatgatgcatgaaaacagaaaaggaaagttttcgtgctacacaaatgccctcttaaccctgcttcatatcttccagattgagcctagcatcgcgtcccaatcaatatcttcagggagaggccaccacatatcctcgtcaggatccatctcaacgcctgcgtatgtattagcataagcttttatggaatttttcatggcaaagaaaagataatggaaaacatactctcaatctcccaccctccatgctcattattagtaggctcctctctactacgcttactccacctccccggagtcggatggtcggcgtactgattgctgacgaagttcactttgcacctggagtaccccgggcgccttctaaaacctgccaaataaagtcagcttgatcctgctcaacccacttgaaagctgaagaggggaacacataccaatactcagcaacatcctgttctgccccttgctcgtgtcgaagcagtacccaattgtaggtgccaaagtggtagatatcaggctggttgaagaggtttacagcgcagaagacatgcaacgctgtcgtgcctgtagtagtgcccagctcaaagttgttcagcgccatgctgccctactggtctggtatgctgttgacactggttgcttatgctagagcgaaggtgaagttgcgcttgaagttgtggctgagggtgcggccagaattttcccattcctgcaaataatgatgtcagcatgtgagtgagcttgttattaccctggagaggtatagcttgaacaaatgctctgggtactcacggtttcatcaataccctccgagtgaggcacagcgtgggggtagcgagctaggcgtccgaatacagacgcgttgggatcaccttcgcgtctacctggtgtccatcgctcgtcagagggctggcttttgagtatccgtttcgaccagagcttccagtcctccgtcatcgatccggagtcttggtcgaaatacgccacgttggtgtagagagtgctcagtatgcctaacactgttagtcatgtgctgcctgagagacaacagacttgcataattagcttaccattgcaaattccccgagagtctgaaaccactgaggcatgcaattggccattggcggtcttttccgcctctcgtactcattggaggtttctgtgggggtcatgggcttcgggcaccctacgaattcgccaactcttgcgacttggtcccacggcatctcactctttcattatttagccctagggctgctggcccgggccctttaatggccggggagtgggcttttggggactgtgcccgcctccctctgggggtcctctagggttcccatttacttcgacgacttgtacgggttaggaattcttttccgttgtcttatcacggcctcggttcttttaagacttaccgcttgtctcttcagtgtccggcgggattacctattgtctgtcccaggtccttatatgttagcttctcaattatttaacgttttccgcccttcgatacaaaataaagaccggcatgttcttccccctttcggtaaatgtgtttggttgtagtgtttggaattttgactatatctcttatatatcttgctttttgttctctcaacatcccccctatctaccctctttcatctattgttataattttatatgttgtaaattatttttttgattgtgtttgttgtgtttggagttttaatatatattaggtggtgggtcccctcccc

SEQ ID NO: 2092 - DNA, 2216 bp, Emericella nidulans
cctaccaggatatgaccacgttcaaagttcgcctcggagtttttcttcgttccgatgactcgggctgtatgcaatagctcaccacagcatgcagctgcatgctgacggcccaggaccgtgctcgccttaactcaaccgcacgttcagtgaggggcatttcacgtcttacatctgcatataagacccgtccctccctcgacggtctcagaagaccctgcggtacgaatattgctccttgacagcgcaataacgaaatcaaaatccagagaccaaacttcgaaaatgacctcaccgaatccaggccaactctctgcgggctcccttcccccaataacccggtatattacgggtcacgacgcttccggaaaagccatcgtccagtcttccaaccctgccgaatggtcttcctttgagcacaacaccatggcattcactgtagcctacacgacctcgtccttcccggtggacctagtcgacgacaccgatatcaaggcacacgagcgcatcatgacttccgataaactggggctagtgaatcccggcggaacagtctgcagagtcgtggactttgcgccaaagtccccgccgcttatgcatcggacgcagagcttggattacggtattgtcctggagggagagattgagatgcacttggattctggggagaagaggttgctcaagaaaggggatattgcagtgcagagagggacaatgcatgcttggtataatccgagtgagacgcagtggacgaggatggtttttgttttgcaggagtgtaagccgcttgttgttgcggggcaggagctcggtgaggatttgacccaggcgaagacagatgatattaagccgagtcgttagttctgctcgtctgctagtgcgcacggtcgactattagcagacttaacatgacgtacgatttggactatgatagtgggaatgctccagcaaaaagcatgaatgtgtttactgagatagtacgttggtgcgttctatttgagatatatacattatccagctatgcaatcttgatgacaatcttcccaaagtgctgtccattcgccaagtacttgaaggcttctggggcatccttgaaggagaaaaccttgttcactactggcttgatgctgtgcttctcgtagaaagcaatcatctcctcgaaccggtccttgggaccgttgatgataccctttagcgtcacattgcgagatagagcgaggagattcacattcgttcggtcctcgggggcgtcaaccttcccgctcaggtatcccacacagtcgatgaggccgccccaggcaatgcagttaaagctcttttttaatgtacccgcaccaccgacctcaataataatatcagctccgtggttgtcagtcagctttaatacttcttcctcccagttaggagtcttgcggtagttgatcgtgtagtcggcgccgagctccttagcctgcttcagcttgtcgtccgacgacgaggtgatgattgctagaaacatagtggttagtttccatctgcccaccagaacgaagtgaggaacttactctttgctcctgaagctttggcaatctgcaaacccgaaacagatactccgccagtcccttgaagaaggatatactccccctcgccgccattctgacccttagggcgcataccgttgattgacatccaagccgtcaccgccgcgatgggaagagtggccgcctcttcatcggagaggtagctcggtgcccggacgagaccgtgggcgggaaacgcacgatactccgccaagaccccgggttggggaagaccaagaccactggccatcatcttctcaacgacctggccagtctggtggtcagggaggaaagtcgagagtaccctgtcgcccttctgccaacctgtcacaccttcccctacctcaacaatttctccgcacatatccgagcatggtacgagtgatgccttgtcctggctgacggatttgtggtggccatatagtccgcagcaaactgtggttcattcaattagcctgagactttttgtatcttgctcctgagcttcgacgcaccttcatagtcgcggtagttaagtgacacggcggaaatgcgcacaagtacctcgccaggacctgcggtgggcttgggagcttcaactgattggaggctatcaagccttgaagggacgtcgtcactgctgaattgaagacatcgtgtagttctcttggggataatggt

SEQ ID NO: 2093 - DNA, 3110 bp, Emericella nidulans
tttttgactgccccttgtgctctaaaggagctaaacagggtaccctctttggcaatggcgaagttgagcagaagcccaaccctgaacccgatggactagcgatgaagagtttaagaggcaccaaaggttcagggtaagatcctgctctgtcatgaacgaattctatataccccaagctatccactatctaccaaggtagctgtgttatgtatatctttggttcgtcctactcccgtgccgtcattatcccgatcctaggcctagattctgggccgaggctcagatcctgtgcaacagctacggaaaggtcttgaactcgcgatgcaaagaagtaattacatcaccacctttagtacactaaggcacggtacgagatgctggcttatagtgtctgggctgattttagtgataaagctagacgacctctataacaggaatgaggccaagctaatgctgttggactctattagattcttcttccgaccgagggtcactatggcttcgcaaggaatttacacttgattgatagctctaacggccttctcagataattatatgaatcttattccgggccattttctatccagaatattgtgttcgttcatgtgtgatatgagaagagtagataaaaagcgaaacaacgtcatcgtttgctaccctgcttagtaccttttcacgctggatctttaattcagttcactccccactttccttcgactgaaccacacctacgcggtcatttgctagaacctcatagttactgtatttctttgttcgccttgggccagcggcttcaccccaccgcagcattatcatactggaacctcaactcttcccttcgtcggtttccacgcacagtaatcggcccacggtcccggcgcctgctaataggcggtcattcttttctcactactgcagcaaccggttgcagggagaaaattctgaccagcgtttcaactcagagtctggttttggaggagggtgcacatagaaatcagatctcgtctttcctccgcgcgggctcttcgccactcggacggtgcctgtgacctcttggggcagctgctcacttcggcctccgttagccaccagacttctgaccttgcgtctctcactccttttgacgctgatagcgcagctaaatccagttctctctattcgatcatttccctccagtttatccagtcgcctctgcgcaccaatttacgcgagcccgaatcctaaaaagacaaaagatcgcgaaaccgagcctccgcaccgtgcagtcaaaccgcgagaatacagcaaagaatacccggggtatagatctctatgtcgacagccacggcgcccctctgatgttcgaccgtcccatgtagcacgaaccatcgtcgttcccacttagcctcatcttcactccgtactcaaggttgcgccgtttaaagcagtcgctcctaaacggccgactggtactggccgctgggccgttgattgcttgggaaactatgggggctgcttcatataatcccgatggttagttatatgccgttattctttccttcccctggacttctcctattgttccatttgcggggcagcaacaaacatcagacttgtatgggtgcgagaccgagacgaacgaaacgacattacaggaatcaaagctagagcgcaataacataagatggaagcagatgctgcccggctctcgtctttgcttcaagcttgctttctgcctgcacgttcgattgagactcggaacaatcctgagcaccgcgttgcatatttcgtgatttggctggaacagtcgaaagatgctaacgatattttgaatcgcaggcgaaccaagtcctttatcgtccccgttgggacgattgtcagaatctccggaggacgagtctttcatgacacctctttcggacgaccaaaccaactcgtcaaaatactctgtggaaaacacttcagctgggtttgatgtccttccaaggtgggtaaatcaccatcagcggtatccccttgcattatgggccggcaccataatgctattgtatgaaccataatcgagactaaaaaccacgatttgatatctttttcaggtccccgctccttgagcagcatgaacatggacttggcccatccggtctagatcgtatacgctcccaaccgccgtctcgggtctttacacttccaaacatgtccacctcttctattggcgcgttgagtccccgaaccctctccccttcaccgcgatctctttcatcatcgagagccaactcaatggctgtttcgtctagccaagatataaatacgctggaagatcttcatcggtttccctccgaatcattacattctttttcttttgcgcaacaatctgaggagctattacacactcgccagaacatcctgaagagatctatagactttatgcgcgaccgcttcaaatggggccccggtagcacgacgggggtcgccagccccccgaaccgtatgcgcggcgatacggacacgcaggcgatggtggatcttatgtcccagtccagcatcttcggggcttcgttcggacccatgaccggacctgccgatttgggaagcgacaatgtttttgacagaacatttaccgatcttcagcgaccactgccagaagccaaggacttcgggcagccgccatcgcaactcccagcgcaacctcatttaacctccagtcagcaactacctcacgaaagaagagggttaaagtccgcacctgcatccaggcgcgtaagcttaaaacgtacattcacggacgtcagttctgctatacctcagcgtcaactgatagaacctctagcacaaccatatccgacagcagaccccttttccccgctaggtaccccgatcattggctctgtttttccaactccagccttgcacacccatagcagcaaatggaaccctgtctcaaggccgttttccgaactgaatccaaggcaccctggaccatcttagcggcgaatgacttatcatgtctcgtatttggcggtacacaggctgaagttcgcaagctgagtatcttagaggtcgtacaagaggatcgacggcaatgggtcgagtcaaaactgcgaaatccaccaccgatgctgcagccaaagctg

SEQ ID NO: 2094 - DNA, 3017 bp, Emericella nidulans
aagaatcgcgtttgactaccgcaccacgcgaatgagacctccaaatcaagccttatagcccgagcgtttgttttcagggtatatcggtgtgccaaaagttagcgttaaggggcctttcgtcggttcaagcgtcaatgcctcgacgtgcgacagcctcaacactgagacgcgatcaacgcgtttctcttcagccagcggggttctgccgggcggtcaagacaatcaagtccacccacagctcgtccaatcagcagctcggaaccgataaggcactttttcctacctaaatttcttgagcacaatcgatccatattgatccctcttctatcatcggccaggaagtaatcggactctaccgttatcatgtcctcagattcgactactcaggccgcttccccagccgaaggcttaaacccatctcacacatacgtccccaacaagggctatgccaacgaagacggcgccgtccccgctatggcggggcaagacctaacacctgaagacgaagattacgaaggcgatgaatactatgatgatatcttcgaggaggagctagatgaaggagacttcaactcttcaaaccctgcagacctcacaaaagcctacaatcgtcaaaggagagtcaacgagctcgcggccgatccgaacgccccaaagtggacatatcccaaaacgaacacacaaaagcctaccgtcaacacgtatgcatccgtcgatgatgagataaaatctctgactcgacatgccgctaaaatcaagcttgacaatgtgcagtccgggctggcagtacgcggtggcagcggcaccgatagggcggatagagccacctccgagcaggtgctggatccccggacgcgcatgattcttctgcaaatgattaaccgcaacattgtttctgaaattcatggatgtctgtcaaccggaaaagaggccaatgtataccacgccatgctacagcccgaggacgatttcgacgcagcgccaatccaccgtgctatcaaagtctacaagacgagcattctggttttcaaggacagagacaagtacgttactggagagttcagattccgttcagggtacaacaagagcaacaaccgagcgatggtcaagctgtgggccgagaaggaaatgcgcaacctgcggaggatatacgcgctggcattccttgccctgagcccatcaacctgcgactccatgttctagttatgggcttcgtcggaaactctaagggcattctgccccacgcttgaaagttgttgacttcaatatttccgacccggaaagcaaatggcgtgagctctaaatcgacatgctagggtatatgcgtgtgatgtaccagacttgtcacttggtccatgctgaccttagcgagttcaatactctctaccataacgataaattatacgttatcgatgtcagtcaaagtgtggagcacgatcacccgcgcagtctcgaattcctgcgtatggatataaagaacgtcagcgattttttccgccggaaaggcgtcccaaccatctccgagcgggttattttcgagttcatcatttctgccgaaggcccggccactgtgacggatgaactgcgtgatgctgtagagaagcttttctcactcgaacccgaggctgctgacgaggtcgatactgctgtcttccgtcaacagtacattccccagacactagatcaagtctacgactatgagcgtgatgcggaaaaggtaaacgctggtgaaggtgatgatcttgtgtatcgggatcttctagctcgggagaaaccctcagctcccccggacgacgaggccgagaccggctccgaagttagcggcggcgtctctattgcagagtctggctctgaagatgaggaagaacgggatcctttcgagaagaaacctccgcgaggaaagcgtttcgaggacaaagagtctaaaaaggagcataagaacaaggtaaaagaggagaagcgcgagaagcgggccaacaagatgccgaagcacctgaagaagcgtctcgtctcgtcgtcctctaggaagcgcaagtgggcaactggaccttatcactcaatccatgcatcttgaccgtgcgtcaactctgtctctcagctgcgtctggtcccattctggtgacattcgcatctcaagcacatgaaccgctacactaccccaaacaagtagatcggttccccattcggcgcatgccatcagtccccggcagaggacaatagcgccctcgacgcttgtctaggcgcccgcaaaatatattagatctcaagatctccagtttagagccacaaaaactaaatcagccatagaaggtattcatccgtacggatcttccgagtgtagaagcgtattcttatttctcccacacagctccatcatatccctccatcaatgccgtatacttctccccatccctaacccaccctttgatcccgccctccaacttccaactcttggtctcactctcctcaacgccctgctgccgcaggtaatccgcaaaccacccagccgcgcgtgttccgcgaccttgagaagaccctaacacaacaggaacaatcgcaggtcagtcaccgactactctgagccatggaaacactaataatgaagaacggcgacaagagacataccacaatagaagattacgttttttaacccccggactcttacgagggttaaacaactggcagaagtggatccagactttgtgcagcagaatggccgggcccttgatggtcacactcaaaacaagctcgcgaggtgaccagccgaaattggcccggtgtccttgttatcggttggaccatataaaaatggcttggagggatccgtttcatctttggatgtaaaccttttctatatctcttttcaccatgaatcaaataaaactttttctctgattattgcttctgccaatttttttatatttattaatctcttctcttagttcttatatatacatttctcattcattaataatttccaaaccttttaattttatcattatcttatctttaaatca

SEQ ID NO: 2095 - DNA, 1073 bp, Emericella nidulans
ccactgttatggtccactgaaaacagatccttcttttgattttctcggctgacgatctttgtacccggtttcggggctgatgtttgagatgggcccggtgggaactcgtctccccgccatgacctctacagcgcccgcacactacagctaccactctcccacctccagcgacagaggccggtcaaggcagaactcggatgccatggacatccagtccatcactgaacgagagccggcgaccagatacgcggttgcgggcggccctgcgccctggaatcgcaacgggtctccgagcatgagccctatgtatagcaagtacatctctcttacccctccgtttctttctgcttttctaccaccccatccctctttccagtctgagtccaggcttgttccgcttgaagtggctaatgtgatcctcgtcttctctctttctgtgttttagcaattccgagcgaaaccagtttcatgaagagaacggacgcacctaccatggctttcgcaggggaatgtattttcttccgtgcgatgagcaagaacaggatcgcctcgacatcttccataagctattcacggtagcgcgggtatcggagagtctgatctacgcgccccatccaaccaacggccggtttctggacctaggatgtggaactggtatctgggcgatcgaggtagcgaacaagtaccctgatgcgtttgtcgctggtgtggatttggctcctattcagcctccgaaccacccgaagaactgcgagttctacgcgcccttcgacttcgaagcgccatgggccatgggggaggattcctgggatctaatccatctgcagatgggttgcggtagtgtcatgggctggccaaacttgtatcgaaggatattcgcacatctccgtcccggtgcctggtttgagcaggttgagatcgatttcgagcctcgatgtgatgatcggtcactagatggaacggcattgcggcattggtacgactgtcttacacaggcgacacgagcgagccatgcgagccaatcgccctatagctcccgcgatacaatacaagacctgcaggacgctgggttc

SEQ ID NO: 2096 - DNA, 2160 bp, Emericella nidulans
tacgcttttctttgtctcaggcatcctctgtggagtcgcttcctttgtttgccctctggcccatcgtatctcgttttgtctgtccagacccgcggcttaagaacccgtctctagactgtctccagagtgtccagagtctccagactgagcgctgcaacaagggactgacagggactggagacggctgtcatagaactctaatctccagctgctacgtctcgcgactccatctggaacgaggaaaggtgggctctgaatgtaacatcctcagttagatcttgaggccagaatctggcggtaattttgcctgttccagaaagggaaaaataaataaaaatcaaaaatcaaaaaaatttattaaaaaaacaaaacagaaaaaagtcctggaactgatttgctgccaggccgggagcgtgcctggggatttccaatcgaccctgcggtgtcccagagagccaggctaaactgtctccggattagggactctgccagcctcgggttcaaccgtcgctgattgggctcagtcgcctctctgaagtttggaagtttggccaggcactgcaggagcctggagggtggggggatgtgtcccctcctcgtctggcttttgccagtcactggtggtgaccaagtggtacagctcggcctctcccttagcctttccgtctaccccgggcacgtcccacttgctttcccactccgtgagtttttctctggcccccaggcccagctgtcagtttgagagtcagagatagcgttattagcctggaatctctgaatgggaccatctgcgcctagcatttaggtacaagcactaattttcgctctccgctaataatatggctcgtttcttttcgtgcgagtgagcgcccccctctctcagattcgccatactcaggagtttccctccatcaaccgaccctactccgtcctcagccaggaataataataataatattaatcctgaccatttcgagtccggtaaattaccagtccgcttggtgtttaccttcgtttcttctttctttttccccttctccacctctgtcctctggagttagccaaggctagccagtgaagcgggctattgttctggcctgaggatcacctcacaaccgactgaccagactccctcaacaccacttacttatactactgagctcctctgcagttctgaacatacacggcatatgcttcttcctacctagagcagagtccgagtctttccacgatctctcaaggtccctctatttatactaactgctcgcctcggctccggtcttgactgtcgtatcaccaagtcgcaccttgaccagcttactaggcatatatattacccctcctctattattcttcctggcgttctattattattattcctcccgtcgcctcgctagtgatatattatgttccagcctcaaagtcagcaccaacagcaccgtgactcccgtcgatccgtcattcctcgacctcgtttctgtccgtccagactgcagaccagaccagaccgtcccaacccgccgcatcctggccttaactttcctgtgataaccttgtccttgtcacctccgatcctgtctgtgattcctttttcctgtggctctcttctcttcccctcaactttcttccctcgtctcatctcaaccctcgtccgaccctttctctctcgcgtctgctgctgtggccattgagttggccactcgaacgcaactcttttctcatcagcctctgcttctcttatccggctcactgccctttttccaacggatcctagactctggttcttgtgtcccgttcctcgggccatattcttgagttcttcgtcgctgtctgggcccatccccacaatttctaaacttcccgatctccagtcctcccgcgccctctaatccgccatggctcctggcagcggccgcgatttcagctgtccttgggatgagcctcattgtggaaaggtaatccgctccctcttggtaatttcgccactcgctaattgttttcagtcgttcaatcgcaagtcagatcttggcaggcactatcgtatacacaccaacgagcgaccgtaccaatgtacctacaaggactgtcataagagcttcatccagcagagcgtattgacggtacattcccgaacgcacacgggagagaagcctcatgtct

SEQ ID NO: 2097 - DNA, 2333 bp, Emericella nidulans
  unsure (1)..(2333): unsure at all n locations
ggggaattttaattccatggtaaaacggtaaggatttccttaacaggtaaagccattacgggtcttttgaaggctgggaaggctcaaacgctgggattacgggtcgagccggcctcatgcattacgcagcccttccaggtctcctgggtagggctggcccgtggttggatccgtgtgctggtgcccgagcataaattcccgtaatgcgacattcatgggctaaggctcaggagcaaattcaggtaacaagtgttcgacaagttcttcagattatttaaccctccggagatcggatgagtttctgtctctcaaaagaccaaccgggttgatatgtatgatctatagaacgattgtcagccaggcaaaatttggtagggtggatcatttctgtacggaccttgcggtatgatatcctcaagtcgcgttatgagctgattgtagttgtcaccgtactttgaaagtaagccaactatggtgtagagttcttgccgcgtttgagtgtgcatcacagggatttgcgggactatagagtcgtgcgaaggcattgaaagatctggaaagaggtaattatcgaagagctgttctgtgaggttgctgtggatgaatattgttaactacatagacagcatatgagagaagtgccgactcacaaggtatcgagagtgatgttagctgaggcagaaatatccaagcaggacttcaagagccgagaaaaaccgaggataatgtgatctacaggctctctaccaacaaactgcaacaggttagcgaagtatatcctgaaaaacaacaatcatgcaacaaacctcgttcgttctgtggctgagcataatgccgctccattgcctgagatattcactgaaaatcaagtcatgaggggatttctccgcgaccgatgtgaatacgatataagcggcctcgaaaaactcctgagactgcgttgggaattctagcacacgtgagaaagtacggacaaaagcatcccatatcgttgcgagtatatcgatcctggtggggttctcagagagcgcaacttctcgtgcttcttgtgcttgcggggcggggaattttggtttcttgaactgctttgaaggactacagataagaaaaataatgtccgatattccctttcgaataggctgatgggactcctcaatgagtagagagaacaagagccggtcgaacttggcttggtgctttgttgcatcccagaagctggggtctctaagagacccttcgaggaaaatagcaaaaatgcagcagacaagtctttgtatcgtgagttccgacatttgggggttgcgcaagccctgcccgacctccaggatacgaactaactgagtaaccaaagctgtagaatctggaattacgggcacatcaccagacacaggcgctttcactgattttagttagccataaggctgatcgaaaatagaggtttgggtgcgatggcttacccgtcagagcagagagcagacattcaatcaagctggcagcaagctgaatgcttataggtgaggttcccaacgtctccaacaattcaccgcgagtcagggcagtgatcacagactgaacactatgagacaccattgattcgctcggggttggctgttgaatatcattattagtaagtgatagttcgacaaaacataaggtcacatacctcaagagcttcttgtcgaagagattcagaaagtgcattgacagagtacagaaatttatacggcctgtccatgggaaacatattttggtcggtttcactaggagacttgaccatatccataaccttctcctggggcggaaagacaataagaaactcatatatctgtcacaatgatcagccatacttcattggtaagagcaacaacggtattaagacgcacctcccgagcgagatggtcgtcaagattaagaagctcgtataaatcgtcaaagtgcttcaacacctcattatcaaccgaagtcaagggctggaatttccgtccagccgtgccacggcagctcgggtctctccggacgatcatcaatcctgatgagagcttcaaatcccgaagtacctggtcaggtttctcgagaaggtccatcctttgtcccgagaatatgatcataagcttggagaaaccggtcatttttacgagcgtttcatggagttcagaagccgttgacaaatctccaatgcgtagcgagcgaaccttggatcgtgaaccaccatcaaacgcctggtaccgtatatcgatcaattcgcctttctccggctggaaaaatatactgggaggtgaattttgtggtgggctatactggggtcgagaacgtaaggctttaaaaattncgaa

SEQ ID NO: 2098 - DNA, 2981 bp, Emericella nidulans
  unsure (1)..(2981): unsure at all n locations
atcctatcacgaacgtactttttccaccaatttactatcacaatttgcgatctgcaattaaccgacaaggccacagtatccaaggatggcagatcttgcgaagactccctttgtacgggagctcgcctcaagcggtacataaccttctctctgttagatgcgaatgctgacttacaaactgcagacaaaaaaatccgcgacaaagccaccgactctctcatcctcttccttcaatctaagaccaacctctccctcctcgagcttctcaaactttggaaaggcttgtttttctgtacgtcctcgctatacaatccttctaggaatcgttgttgattgatgtttatctgaaacaggcttctaccactccgaccgcccccttacgcaacaagccctcgcccgcaacctctcctatacgctcgttccctctctgcctcgaacaacagtgcatcagttcctccgcgcattctggataaccattgggcgcgagttccactctatcgatcgcctccgtttagacaaatacctacttttgattcgctcgtatgttggcgttgcgttccagatcttcttgaagaaccccagctcggcctccactaccacaaacggtactggtaccggtaccgacaccgttaacaagaagcgcaagagagaggactctacgaagtccaagaaacgctcaaagtccaagtctaagagcgcgcaaccggcctctgacaatgaagacgaagaaaaaaacacccatcccaactcagaatctccctccacaacctccaacagcgactggacagaccttcagtcctatatagaaatcctcagcgaaggtcccctccatcccttaaatttcgatccctcgcagcccaaaccggatgaggagaagggcatcatcccgatgccccacggccccgacggtctgcgctatcacctgttggacatctacgtcgacgagctggaaaaggctcttgagtttgacacggaatctggaaagcctgtgggcgaggtccccgctgagattctgatggcgccgattgaaaggttgaaggctgagagcccgcacaaaccggtcagggtaagggctgcggagacgctggctgatgagagaatggttacttggggccttagggagaaggagaagaaggaggaaaatgaggaggagagtagtggggaggaatggggtgggtttggggatgattaattcattcaattagagccagtcattcgacttagatcatgtgtatgtgtctatgtatttatatcctttgttaaaagcagtcatttttgggacgtctctcgggttattgaaagataacactagacggcttaacaaacccagtaactgagatcaaaacgatgtatatgtatatatacgtctatgcgcgtcgtgtcttaggatgtaggatacacagtacacaatacacaatgaatccacgcctagcagctcggaaccgaaagccctaccgaagccaaaattgacgtcaaataagaatataacagttaaacctaacagaaccatgggaatacgtcaagtcaatcacaaaagacgttgtcaggttgggtatcatcacaaggaaagacagcggtagcggcgggcgaacatgtagcgtctatgccagacgaaaggcgacgattaggtagctaggtgacgagggtatatctgctcgcgtgcttcagcttgatccggcatcaacagtcacaaaagtcaaggccttgggcagccgcttcatataggtggccagtcttggagaggactgtgcctagacccttgtggatttcgacctggaaagcttcgaaggggattttttctccatcgacgctgatatacccctctttttcccttggggtgagtcggaaagcgagtgccttgcggatctcgacttccggcatatcgaagaatgtgccctccgggacttcggacatcattttcaagatgcgggtacgaggagtttttccgtcaattgtgacgatgtccataaggccatcgttgggcacggacgccgggaagaagttggtatccttcgatactatggccatgtttcccgcaaagaagttgccaattgtgtctgctggtacgacggcccagtctttgggaagctcatcgagaacggttccatactcaagcttgggaagaccttcggtgtattcggagtcctgacgcgagggatctggtggggggctgttcacatatgcattataatgatgctttatagagcttttgtcgtccattaccacttttatagcaaggtcacaagggtatattgctcgggacataaggcgcattaaaaagccgtaggtaaagcggtgagcccccatccagcgaatgtgttccgtgcccagatctgagtctgcgatgatgccgaaagactgtgataagaaggacagagtgcgagtgcttccctgcgtaacggacatgagatcgatgggcatgcgcactcccttgatgatggtcagagctgcgatggaaacgctgcccgttccgcaaagattccaggccattgcattccccgaaccgcacggtaacatggcaacggctagctttctaagggcttccccggcgttcggcttcctcgcgagcccgttgaagacttcatacggtagcccatcccctgagcagcatacagatggcgtcaaacgcattgacatcgatttgctctgcaatctcagtggcatgtcccccaatgtgtcgtttcttgcacatccagctcacagtgtgcagccgcaaagacaggctccgcgtatgttcgatacattttagccgcatgtcccttgccgcccacggggttgatcagggactttaagtcgcttataacgctgcgcatgncgtatgcanagctagtaagtttgacatccattgctcgaccctcgatntctcttcagcggcgatggggtattgcagagcggtaacgcgatgtcattttgcctggggctcgcgtangtatggtcacgccactgacatacctgtttcagccgtatacaagaagatgagg

SEQ ID NO: 2099 - DNA, 3082 bp, Emericella nidulans
  unsure (1)..(3082): unsure at all n locations
ccttggaaaatgcgccttgacagattgcagtcgaggggcgcttcccaccagactgtaggattatgattcccgcactagagtgccgctctttgagatgttcatagaggtacgggctggcgccgagaccgccaacgaggatgataccctgctcttgttagagatgctgttaagatgggtaaggtatataccttgacgtcgaggccttggctccttgctttgtagacttggccgtcgacgagtttgtcgattccagcaaaagactcagtaaatgcatcttgaatatgggagctagatcgcgttagacagagacacaatcaggagatttgagcgtaccctgagaaatggattcgtcccttcttgatgaacggctcacgactcatgtcgtccaagctgtttttcccaaatgcttctgctggtatactcacaatatactcctttttggagctttgtggtttaaactgtggcttaatggcgtgttcccattctcccttgaggatctctttaataccagccttgctgagatgatcccagcgacgtccgagtcgtgatttgcatgcgtgttcgaaggcttcatcgataaagataccaccacacagaccacctagaaagtttagaaagaataagagtaaagggttgatatacttaccagttccttcgacggcttcgtgcattgcgatgggactgaccgaggctatctcgtaactgatcaagtcctacgaccgtgagctaggaggtgaagttggagagaagcaacctacaacggtgccaccacccgcatcgcagataacatagacatcacctggctgagtcctacgaccaggctcacaaagcgtagataatgctgcagcctccggctcgggaacaaagctaagcatagtctccccagcgggccgactgctcaagattccagcttgtcgagcagcttcctccattccctgtcttgcataacccttccagatggcaggcactgtaattacgacatggaaccgcaacgcatcaatgacatactcaccacgagacttcttcaccgactccaagatatgcgcccacaagaggcggagataatcggcgatcaagccaactgcagtcttgccagtctccttgagcatcttgcgtccacgaagaaggaactcggacgaacgagtctcttcactcaggtcctcgtctttgacaagaaggagcttgaaccagcggactggatctgcatcatcaggaatctcatagccccagaaaatctggtcgtcttcgtaaaataactcagttggcgctttgccctcttctctgccggtccccggccaactggtgatgagattgatttgatcgctagcgaaatctgcgaccgttgcccatgcgacgccagaataactttacaattagaatcagcgcgtgtagagtgccttgggactcacgttgtgccaaagtcgattccaatgaccatgacatcgtcttcgtcatcttcgcttggggtcgcaatcttagggcgataggctagaatcccgtcagaaggcgtaaatgtcatcttggatctgaatgatgtggtttgaagaaggcaatcacggaagaaggtagcgtgaactccttaagtgcttctggaagaaatctggctgcacggccgtgttatatggaagcgcgctcctaaccccggccgttcagcctcgtgcagcaaattccaccttgcagccgggaattcttaccaagtttgatgcttctccatgctaaagatgcatgcgtccacggatggtccgccagtggtaggcccatgtgcagcatgagcagtctgaggagtacagcctttcgctcaccttggctagacgatgcgatggccgctggttggtcgctcaaacacgctgataccgtacgacaaggctgaagcaatggtaaccaggatacgagggctaaggcaatgcaggttggtgctttgtgcaatatttaccgacgagtggcaccaatgattgagcttgccattgtgaggccggagctcaaacttcttcaaggctgccctggccgtcattataatctatttgacgggatacacaacataaggctactagtcgattggttctcgattcctgcacagctgagcagtcagccactggtaatatattctatcccctccttgattcctaatctgggacagttcagtggaaatggccaaacctcgtcgcaatcagctgagacaaggctgaggggtctcgcaattgtctaacagatttcaccctcatcaaactcaccacattaccaattccaccagcgccaaacgtaaaacttcacggtaactcgatcgcctcgcgcaacatgacgcaaacaccaccttcccacagcgttgacgacggccagaggcctgataaccaagatacagagatgccagacgcagactccccacgaggcctcgcagatcggcgaacagatatatcggggcgagttcatcatccagcccacacggccgtatcgcggccacagcaattagtgaaaagttcgccgcgacgtttgggggaagcctgaggtgaaagcctcttgcgcgccnccgcctccaccacatcgcatcctgcggatgccagacccggcgcagaacccgaccgacgaatactcggacacaacgcaaccagtgggaaatgccgaggttgacccatcttttaaagacgatgaggcggcatgtcgagtacttgcagaggaaatgaggcagaggatcgaacagcttgagagtgatcttgcaaatgcgccgtcgccggattctgtccgcgcgctagaacgttcgcttcaggcagaaagcgcccagcgagaacgactgcagcaagagctccgccagaagcacagcgaattagacgtgctgcggaagcactggaagcaagctgcgctagagctggacaaggcgcggtcccagagccaggggttctatcaagtgacggacaactatctcattgagctgacaacccgcttgcgctataatatcaagaattttgcgtttcaatatttcgacggtgaaatgaaggggcagagaccgagattcgacaaaccgaaaatatgggataagtacatgcaaacaatcacttcggatcccttggactgtgaggttctcatgtta

SEQ ID NO: 2100 - DNA, 2785 bp, Emericella nidulans
tacgagtcatggctattgctagcagccagccagtatcccaggcttaaggccacctaggaagcctgctgaaactatggattgcaaaccaggcttgtccaagtatcttgctggggtaaacagtcttcacacttgacctccggatattgactgcggagagtatggatagggacatttacacggtcgaaaaggcaaattgacaaaaatattgccagttatgcttaatggcaaacccttggtggagtggcgatcaacgaagtactaaagattcgtgccctgatttcactgttacaactataaagccaacttcgatctcaactaaattatctcctccccaacccttgtccaaacctcgacgtcctggaagttcctgacggttcccgtgccgccaaacctgtcctgagtgtccctccagtccctgtggactgccgtctccggcctccaccgaaacgcatacttcagcttctcctcaagcacgccctccagcctctgtttaatggcaatccccacagccggcatcatcataaagccattgccagaacctcccactgcaactgtgagagacttgtacttcggatgctgatcaataaggaattggcggtccggcgtgtcggcgtcccagcagattcgcgcaaaggcaaaggggcgatccgctatctgggggaccgtatcgcgaaggaactgccgtgccgcgtgctcggactgtagtgggatctgatgtttggcgaatggaatggacttagggaagtcattcaagacctcggaggtgggaatgttgcagtagcccgggtgttcgtcgacgaattttagctgccccgtcgagtcgggttcctagcagccatacggtcagtagcgtctttgtgaaaggcagttggctaggaacgtacgataaagaaaccggaattgacgttgaatagtacaggcagatccttccaaagcttcctctcctcctccgtcatctggatatgcgcaagtgtccaagccgtcgggcgcaactgtttctcaaagtcaagtaactggtcacttccagcgccagcacagagaatgacgcggtctgcacgatgctctttttcgtcggcggtctttgcgccgacgatgtcgctttggtcatccgtgtagagaaggctcttgacacccccttcgtcacccgtaacaaacttcacgcccagccgcgaagcctctttgtaggccgcttctagcgcccccctcgcaaatacccatccagcgccagcctcgcggaagaaacctttccagccggaaaagtcccctgtcaggacgcccaacggcattgtagctctgaaatccgcggccgagttgagtaaccggagtttatctctgcaggtgctaatgtacttgtcaacatgaggcattgcatcgtcctggctcgcggccataataaaacctgttgggtggtagaaggggcgaaatacggggtcggtcttccaggcattggcggtgatctggtgcatccggttccagacgtattgctcgggggtgtctgtgtcggacggtgcgcctagctcaagtttagaccgggagcgcttggattgaagtatctgcagataaacgcaccctcctccatgattttgtttacatcatttccggcagcagagggtgacggtatcggactgcgctcaaggacggtgacgtttttgtagccggctcgcgcaagctggagagcggtgctgcagccccaggtaccgccaccgatgatgagaatagatgagtctttggtgagttgagacatagtgtatgtctgttattacctgaccctctgagtcgggaggggaggtgacgaggtggtatttaaccctcagcgctttgcagaggtccactgcccatctgtgcgggcgcctatcggctggcactgtgggccaaaggaaggtcctgccgagacttgatagggcttatcagggcagctcacagtatccccaagcgacaatgttggaggtatgtcgcggatgccatgcatccaaaccggagctcttggcctgtaagagacgaccacgcgaggtcaacggcgatatttcatagataggtaggtcaatggctcggctctaaccgtgtgatctcccccacttccccgcactgacgacctgccatgcaggcgttatcgctgatcccaccctccaagccttctggatggctggatcaagctctagaaagagcttagcctctctcttggaccttccttgcaaatatcctttatcgctctatcattctccttctccgcattgctgatacgggatactcgtggctgatgctcctcggttgaagtatgggggtatttaatccagctacggctcctgttagaaggggacttaagatgcttcaggatagttcttttaaagtcaaataaatatcgatcatggacgacatttcgcagtcggaagttccaggaaccatctttattgtggggagtgagtggcaccatacatatcaccaagcaagcgacggcccaccctaattccaatactaacgcctcacagcggatgcgacaaagctgggagaagcagatgtcaccacatcgaacgatatcgtgctcgttcctcgcccactcgagacaccacgggaccccctggtacgctgcgtcctaccccctgtctcaacttgttggtagctctgtcactgcagactgacaagcaaatcagaactggccgaagtcaaaggaactatggacgctcttcttagcgactctcttcgcgaccgtcgtcgcctatgcgaaaacaatcttggcgcgccctggacggaggtcgccgaagatattgacgtgacaatgaaagcatga

SEQ ID NO: 2101 - DNA, 3682 bp, Emericella nidulans
tggttaaagctcgggttacgtatagaacaaagaggaactccggggagaatttaaaacatgtttcaaaggtgaagcgggtccttccaggtgttttaaaaaagggttacgtttttccttcgaagagtattcgcaaaagaatacgctgtcgaggaaaaacctctgaagacccgaattaggatcgaaaatgatttaaaagagccagtttagctaaatgcgggatccctagaagaagggatctttcaggtggtctgctgaagtcatcccataaaaagtgtgccgaatcatgcctgaccaaccacatgcttgactccccgccggtcggaacaacgttatcccgtccaagtatatgcggcttcagtaagcaagaggtccggcaaaactagcattggaatgctagaagtcaataatttagtttatgcaatagttgtaaaggaatagtctgtagaagcggtatgtagctgatcgttttcatgtttgtgcgggtggggcacgaaatctatgtgtggtagttttgtaaataatctggctacccaatcgagactatgtacacacatcgaaagagagcatacggtatctacatctataaagatatttcttgaacccttgcacgtccggcataccagctgtggtctccctgcagagacgcttgacggatagcgtacaactcgtcgatgaaagtcgtagcaaagcttccagggccgcggacggagtctcttgcagcggcgttctcggcagcaatctcatacatcagaagagctgagagaaccgcaaggaacttgtcagttggattggccgcgatgaaacatccagccactgtgccgacagcgcaaccagtctgaattaagttagatatgtgtttcagcagatagggcaaatgcaaacatactccagtgacctggccgagaagttcatgtccgttctcaacggcaacaatcctttcgccatcgctaaggtaatccacggcgccggtcaagagaacgatgttttctggtcaaagttaggggcgatttgtagacatgtgcaggaatgcatactttctcgccgagcaaggtcacgggccaaccgtgccttaccctggtggtcaagcgtactaggtccgctgtcaacacctcgttgctgaacgctagtgctgcccgcgacctggcggatttctccttcgttgcctttgatgagatcgaagtatcccccggccatgagctccttgacaacccctcgtcgaatctgggtcgcaccggcgcctactggatcatacaccaccgggttgccgcgttggttgtacgctcgaatagccttgaggtactcggaaggactctggctagtcagagtgcccatgttgataagcaaggcaccgtcaaactggcacaagtccgtggcctcgtcgccatacggcgacataatcggcgatgcaccgctacactggttagtaagccattaactcgatgctagcgtaactcacatagctaacgtgacattggcgacgaagttggcgacgacgaagttgatcatgttgtggaccaacgggtggatttcaaccattttttgaacaatatgcggtaccttctcgagcaaccctgcaacattgcgaaccaaaggtccgtccgccttgcgtacaaatggcggcggagtcgcgatggcccgggcaagctctgccgccgccgctctgggatcatctgcggccatgatagcgctgacaatagcagcaccattcaagctcttccggggagaggcagactggtacagtacccgttgaacgttggagaggttgatcccaccaatacaaacagttcccacatcgcggccagattcggcaatggagtcaaggatagcctgcgtgccagctgtgccaatgatgtgcttggtgtttgttttcctgctagataagcatatattccattttctaggcacggaactcacgttggtgtagcgaataacgtcccgataccaaggtagtccgcgcccgccgcaacggccgcctgcgcctcttcaatagatgaggcgctaatgccaataattgcattttccggtagaagcttctttgcttccgaaatcactgggaatctcagcttattaatccaatttagcagaagggaacatacccatatcatcctggccgagatgcaccccctcagctcccacagcaagagcaacatcaacccggtcgttgatgatcaagggcacaccgtgggcctgagtaatccggtgaagctttcgggcagtttcgatctgagcccctgtgtcgctctttttgtcccggtattggacgaccgttacacctgcattgccaagcgtcaatagagtacaacaggaggggaggtgtcgtacctcctttgacggcttcttctactacagcacacagatcccgccccttgaggattgggggggtggagtctgtgacgaggtagacggaaagatcgagcttcattttgtcttctgacctattacccaggctgcaattgccctcattgataggaatgtgtagtgacgttaaaccatcatgcctgtttaggaaaggcgtctcgcgtgcccgcgaatgatcgtcacatgaccagataacggaagaaaaaatagtccgagcgggacgacgacttcgctcttgcgttgacttcattccggactcgagaatactcgccggtcctcgaagttctccaaccactccgaccaggctgtaagtatactccgtgcagaacgccagtctcctcactcttttatacggtgagtcattttattgctttgtttcgctgctctactctctctacgttgtctcctgcagtaagggatcatttctggaaccaattatccccatcgtctcaccgagcagtatgaacgctgcgcggtagtcctgaccacactaatgcggtaagcagtcccgtgaccgccacagcccgcatcagggtatagctcctcttcaccatgccagctggccacggcgatctgacagccatggacgacgagtcttctagagatatcgctcctcgtcagctcacgctgcgagaccgggtcactgtcgcgaccttggtgccgttccattcgtatgcgcatattcccaagtcgctgattgtgtacttatgcgaccaattgaaccgggagattgaaaagggcgacacttatgctatggtcgacccgatcccagtacggcattttgcgccgtactggttctcgaactttggcgcgatcatgctaattggggacatcaaaaatgtcaatgatgtccaggagatggacggcaatgtgaattgggccaaagtctgtcttgggagtttcaacgtcaggccaaactacccggggcgaagtagccatgtctgtaacggcatgtttcttgtcacggatgctgcgagaaataagggtgtaggtcggttaatgggagaggcctatctagattgggccgctcggctggtttgtgttatgtcgcccaaaaccgaagtgctgtgttgacaagccagggatacacatatgccgtcttcaacctcatctatgaaagcaatgttgcctcatgccgactttgggaaggtctcggcttcaagcggattggtagagtgcccaatgcaggccgagtgttgtcgagccctggagaatttgtcgacgccattatctacgggcgagacttgggatctgacggcgaagaccccgttacgcaagaccggttcgataaaatccgctactatctcaaacactctaaataccc

SEQ ID NO: 2102 - DNA, 2829 bp, Emericella nidulans
gggatgatatagggcagagatcgagaccgggccgagacgacggcgttgagcgtggaatcggcggaagaatgctgggcgagacggtcgtcagatcggtcctaggactcggtctgcggtacgatgccaggaatagaacgatatggaggaatattgggtttcaggaagagcggtggtcccgactgcaaggcgcacagggatgcagcggttcttatggctcgtcaggggcgcatgatagagtctgcctagttgattgggagacgagttgaatgagcatgctgattgtctgacagaagaagaaaggaagcgaagaggacggtcagccttaaaaaaccagctgaggagcggtctgagtctaaggtcttggaaaacgaaaggtgaggtccgttgtggcttggtggagagtaaaaatttgttagggagctagactagctcggccagttccaccgtctcagctagtcaatcagcgggaggccaatccgacgggaagtccctcagcagaccacggcagctccactctccggtatcaggaatccaagaatcaagtgtttactgtttgggctgatgcctagtcgagagaccccgtacctcctatgagggtactcagtcttgccaagtctgttgagtcacccctattgtggcaaacatcccgttttcttgtcctgcgctgatctgacgttgaggatgctgttagttcttgcgttatctgccacagctgtcgccatgtgccagtcgtcgccgatcaattggctggccaaggcagaagtatcgttcgggccttaggagtccaggctgacggggttcctgctacaagaacgagcgatggcgagaccaacccagcgggttgaaagaagaatccttggccccttggcgccccttcttgctgcaggaatgggtatgcatctagccagcttaatcgctattctggttgtctcgtcgtctcatcgtctcaagccgctcgtccaacaccgtgaccgctagtcgtgcccaggccggttttttatctacgtcgattgtggaatcgcaagtccaactttaccaaggccgtcacacccgagatcgtcgatgcgcatatacattcggattgcgttcgggattgcgttgggacttgaaggtgaggactctaggttattggacggagcactggcgaccggtgatatcccgaagagaggcctggtcatttcgcaacttgaagacagggggaatgagctctacacaaagaatgggtcgaaaacttgcaggtcaagttttctaggatggatccctaatctagtacaacatgcgatagagcacccttgcataaaccagctgcagtttctgatctgtttcttgatctgtttcttgatatcaatggttatggcgcagggtctctgatcgctgagccagtcgctgatactttaccgcttcccgtaacaccatgccttcgttcaactggctagtctccttcctgaagagctcctgccatggtgtttggctctccgggatactgtaaccccctgcggcctccaatgccgctcgtctctcgtctagttcttttcgcgagacaaggatatccacgcggcgtttgttgaggtcgacgcggagcctgtctccgtcgcgaacgagtgcaagattgcctccagcagcggcttcagggctggcgttcaggatggacggcgatccggaagttcccgattgtcgaccatcccctatgcatggcagcgacttgatcccctgtcgcaacaaatgcccaggagggtgcatattgaccacctctgcggcgccaggataacctagtggcccagtcccgcgcatcactaagatactcttgtcattgataggagcctcctccaatcggcgatggtagtcctctggcccgtcgaaaacgacaacggccccttcaaaggcattggggtcgtctgggttttccaggaaatgctgccggaactgctctgatatgacgcaagttttcataatggcagactcgaatagggtaccctggaggtgcacgaatcctgcgtctttcataaggggctcgctgtacggcttgatgacccgtcggtcccagctgtgatgccctttcacattctcagcgacggtatgtccgttgcatgtaagaatgtctgggtgcaacttcccagcatctaacagctccgccatgatagccggaaggcctcccgctcggtagtactcctcgccaagaaattctcctgctggttgcatattgagcagaagtggaatgttaaaccctagttggtcccagtcgtccagggagatatcaacgcccatatgctttgcgatagcattgatatggataggggcgttggtgctaccgccaatggccagtattacagcaattaccatttcaaaagcctcccgcgtcataatatcgctagggttcccggtcgcgtgcaccaatttcacaatttgtaaacctgtttataccccactgagctcgttccaataggcgccggatgccgccgatccttgcagagccatccaaggctttgtccgcgcgtcatggtcgaggttggcccattatacaggccctaccgtgggccttttgcgtagtaaaaacttgatgactgtttccaatcctttaaaaaagtcctatcctaattatattgcccctgggttattttccgcaaaaattctcgcccttgtgttttttgcccttttaaggcctttccataatcggttttttgtaaaaaaaaaatattttgttctcttgtgccaactacgctgttgtttataatcccctatctatacttatctttattatttactttattaataacttttcctttatcacttaaacttttttctctttttctcttcctctctaattatata

SEQ ID NO: 2103 - DNA, 3213 bp, Emericella nidulans
cctctggaatctggatcaggttttgactctttgacaagaaaagaggccacgctccggtcagatttgctcggtccctaaattggggccgtcgcaggcgccgcccggctggacttgaaagaccctgctggaaggtccgcggcatccatgggatttcattagcccaccaggcacaaaagagggtcatctcatgcatccactgcgcctccgccattacggccatggttgttcttggctgtcgaccattgggcgagacgccaattggattatttcgggtccattgaaggaatgtgccgctcagctttacgagcatcggccgattgattctcgtttcggcagcggtggatgtatattccgttgcttacataattgcccctaccgctgattgcaggagcgtagccacagtttgcaatctacgcgagacgagggcaataagatattttgagatactgtcaatcttagtcgagattactttttagattttagtcagtgcataagctctccatgcgccatggaatcataaaactgtgcgcaagttcgtggttgggcacgtgccagcctcacgctatcccaattaggaaatcatgaaacattcaggcaacgacatcacaaaaacagctggccagcttggctgctcttgtcgacacttggcgagaaaaccttgtatgaatgacactgctgctcatgttttccccctcttgaggttcttcctcagctccaatgcgcccttctccgccctaagatagagtcctgcgggtagcaacagcattcctgcttctgacacgagacaccacattcttcaccaaacaggattgcatgcccagccaatcccgcagtcgggaccgatatggtcgcgacagtgatcgcgatcgttcccgcgtccaaccacgcagaagataccacgtatccgaggacgatgacgatgacgacgatttcgacgacaacccacgcgaccgccgttacagacgagatggctaccggcgcgcgcctgttgattcacgagcttacgattctcacgacgattacgaagtagttgatgtggaggaggaaccacggagataccgatcggatacagagcgacggcgggaacgggccagggcgtcaccgggcacgtcacctcgcaaacgagaacgcacacgggactcaggcggtgggcacagacgacggcgaacagaagagagcgatggcagccaggcgccgcaagcccaccgggataggaggtcacgcacaagacgggatcgcggcctggacgatgaggatttagaagacgctgcacgaagactccgtcgccgggaacgagaacgcgagcgagaacgacgcgctgaaacctctaagcacaagagtacggactcttcgaatagttcggccgggttgttgaatgcaaacgccttggctaaactcagagcgcagcatgaagagttggaccgtcaggaacagcgtcgggcagaaaaagaagctaaagcggaaaggaaaagaaggcgcaaacgacccgcagtcgaagggcagatgcgcaccctcgatccgtttcctgatgaagtccctcggggtcaatccaaaggtcgcatcgtatcgggggcctaccttgaagaaggcagggctccagatatggaagtcagactgcgtgggggcggaagagggccaccgagggagagacgatgggagaaagatagtgatggtcagccccactgacaccgttctggaagcggaagaaatggtggtggattggagccattgtgctcgttatcgtggtcataattattgttgtcgcggtcgttgtatcgaataataagaaaagcgactcagattccgactcagattccaattcaggttcatcagattcttggggtggtgataaatcgtccttaaatggacttgatcacgacagtatcccggtaagcctgacctgccactcgtttgcgaaagaccgttatactaacatgctctagaaatccgcccaaggcacagtgcttgacccatggacatggtacgaaacaacagacttcaatgtaacctatacagacgagactgttggtgggctctctgttatgggcttgaactccacctgggacgattctgttgcgccgaacgaaaatgtaccgccacttaacaagccatttccgtatgggtcacagccaattcgtggtgtaaacatcggaggattgctgtctctcgagcccttcatcacgccctccctatttgaaggctactcatcagatgtcgttgatgagtacacgctaaccacaaaactaggcgacaacgccgccagaaagcttgaagagcactacgcaacctttatcacagaacaagattttgccgacatggctgaggctgggatcgaccatgttcgaatcccattttcctactgggcagtaaaccccagggaagatgagccctatgttgccaaaatctcgtggcgttatctacttcgcgtcatcgagtactgccgcaaatacggactacgagtaaacctcgacccgcacggtatgccgggcagccaaaatggcatgaatcacagcggacggcaaggcagcattcgctggctaaatggtgatgatggcgacacatacgcccagcgctcgctcgaatttcatgaaaagatatccaagttcttcgcccaggaccgctacaaaaacatcatcaccatctatggcctaatcaatgagccgtacatgctttccctggatgtcgagaaagttctcaattggaccgtcacagccgccgaattggttcagaagaacggcattaccgccaaaattgccttccacgacggtttcctcaatctcagcaaatggaagacaatgctgaagaatggaccctcgaaccttcttcttgacacccatcagtatactatctataatgttgcccagatcgttcttaaccacaccgcaaaggtcaacttcgtctgcaatgattgggttggcatgattggtgaaatcaattccacttctgaagggtacgttcctttcctttctccattcgtgtacgtcgcagattatataagatactgacaagaacaaagctggggtcccacaatctgcggtgaattcacacaagccgacaccgactgtgcgaaaaacctcaacaatgtcggccgcggcacccgctgggaaggcacctattctgagggcgactcgactatgtactgcccacggccgaacagaggacatgcagctgtaccgaagccaacgcagacccgtcagaatactcagatgacta

SEQ ID NO: 2104 - DNA, 1318 bp, Emericella nidulans
tccgctgttttcattcctccggcactttaccgaccctggccgggaaaaggatagactcgccattgggacgacggcagaatgttctgtccgaagaaatctagaaacgctctattctcatatccaagatgcactcataccgctcgattccatggccgcttggtttggtgacctctctggttctggctctttcttttcccctcctttcagcacggatgattttatctctgcggactttctggcctccggtcccgggcctactaaactctcgggacaattaaatgagctcatgatggaagttgttgaaacctccaggtccatggagctggagggctctagcactatgcagttgccgctcgacactacgcagcttgttcccctttttacggtctctaatgttggcatattcgtctcagtcttcttccactccctttactggcatctgccagtcgtgcattttcccacgtttgacccgggcaatatatccaatccgctcttactctcaacttttttgacaggcgcaacgtacagcaattcactcaacgaagcagccctattacccagacttctcgatgtcgctgaagagtatatcttccgaaaggtcaccgccttgtcaactcagtctggtccaccgattctcgatcctacgagcaactggagtacgatacaactcattcaagcaggtttgatcattgaaatgcttcaattcggtcaagaaagagtggaaactagacgccgcattcgagtcattcgtcatcctagcctagtttctctcatgcgttgcttgggcattttcaatctgaagcgatcaaagccttctacagttgttgatggtgatgatactttgcggaaatcattgatcgcagaggaagtctgtatacgtcttgcatcgtggacctttcttgctgatggattcctcacgctctgtttcaaaaaccgccccgcgatttccatcttcgagctcgactgtccctttccctggaagacagggctatgggaggcagagaatgcatccgccttcagccaggtcgctatggaccatgaagaggagcttccgctgccttctgtaagagaagcagttcgattactacttgaaagtccgaaccccggccccgtaccttctagattctcactgtcagcagaacatctgctaatcataatctatggtaagctctcatgcaatcgcttcttcgataccatgctaataacccaaatcccagcgctgaattctctcgctttcatggctagagttgatttctttgaggctgtatccgttggagaaaataaggcgtgctgccagtaactggaaacaaatatggga

SEQ ID NO: 2105 - DNA, 555 bp, Emericella nidulans
tacatagctgtttcatagttccagtgttgctgtttccatcgcattggatggcccgcagttgtgcaatctatgtgaggatgataccagtgaagactcatccgcgcgttttgcgactttcgttgattgttatcgtacaatagcccttgcttaatcccagcaccaccgcgtacctcacggtctccgagatcgtggtaacattcatgcaggtaccaagagtgcgcggatcagtctggaccctggcccaggctgaacatgccgtccaagctggcaagctcagcatgacatcaagccccccacgtgtgcatcgggcgtatcataggcacttcgttgataaacagaggacagctgggcatcgcttctcccggatgccaaccgacaggctggcggcctgggtctctccactccagcgcagagctgctaaggtccttgatccaataccggcgctgaaacgatacccccttgcgaccttcacccgcggcttttccgctgacgtacccgatcgaaggacccattccactaagactccggatgtcttgcggatgtctcaaggacata

SEQ ID NO: 2106 - DNA, 1102 bp, Emericella nidulans
gacattataaaaagcagcagaggtgaggagaagcgctccgtcaacacagctgataataatggccagtgtctgggccaagcaggcgctgatcaaccaagtagtgtctccgcttctgctttccgagttgtcgcaaaaagaggctccagcctttgagcactctcaccaatgatgttgtttcctaatcttctgaagaaatgtctcatataagaccaatagctggttcttcgttttcaggcctcaggattttcacgtcgtggtcggtggggtgttcttgtgccagatacgcgacaagttcgcggggaggaaaggcagcagacaaattaagcagttaatcgtgttcgaatgatcgacatatgaaatgaagcagttgtagaggatatatgtcatatataatggactaggacagactagtaaatgtgaacgtctgctgttgctgtgaagagaaaagagtggcgagcaggagaagttcgaaccccgaaatatgttttggtcacgtccaagttcactaaagatacaacattgccattgatatattgcccacttggcccccttgttttatctataagcagacaaatctcagtagtccaatcgcatcaatgtgcgcgagacttcagttaccgccataaggatataaaatagagacatatttgcctaactaactaggggttggtttctacgtatcccaactggttcgcgtcctcaaaaaaccacacttgggttcccgatatgtcggtcatggacacaaatcgagaatctcctgtcagtaaacgacggtgatgacccatgagaggagtctcgtctggcggagctctcggaaggtcaaactccaagccccgagaagcacagagaggagtcacagcgtagggattagagatccagatactttgcttgccatcatcatctctgacccagtagagaatgccattatcaacgttggccatagacaaagagtcagccacccgaagatcgagcaatgcgtgtatacaaacttgttctgtttgtgggtgataagtaattggtagaacgaacgaaagagcagatgaggacgagacatagaggaaccccatgtttttgtagtactgtggtaagtccctcgccaagt

SEQ ID NO: 2107 - DNA, 1407 bp, Emericella nidulans
gtgatatatcgtatatacctgcgaggaggccaagatactgatagcaggtgaagtagcatttttgaatggtatcatatatagtatagtcatacatgggttggccgttaaggtgtcattagaaacggtattgcgactgtccagcccgctggacgcacttatttaacttagcatcagcacctctgcttgtgacatgggatccacagtgcggcacgctactgtgccgttggtcgcgacgtccagtatcacgatctgacatgagggtgctcaaagaagcgacatcacacactactcaacctccataagaacatcactcatgatatgcagaacatacgaaaacttgcgtacgctccacttccccgcatccttcaggaggcctgcataatccagcaggatacgtcttgcagactgatacccaccttgaaacggtacaccacggaaataaacagtgcctgcattccgaatgaagttcactgccggatcatccgacggcgtgaatgtctgagtcccgcgtggttccataaaactggtgaatccctctgtcccgacacgctcccagtcgatgtcatcaaggagttcgattgacgtcccgccgacttgtagctcactggggttcggtaccatgaagatgtagaggccgaggacgagggctgctgaaaacagagagaaaaccgagtggaacattgtgtgatctgatgctttgcggttggtcatcgccttgtagatgtgtgcggcgtgaaggcatgctcgtctggcagctggtgtctgtgaccaggttgcaatgtcatctagggctttcttggcgggtcctggtcctgcgcggccggcagctagatcgaatatttgagtatctgcggttaaggtcatgcatatgttgtgccacatgacggcggcgttaggattgagccgctcgagaacctcgccgtatttgtctgcaatttgcagctggagtgagggtaaacatctggcgcgtccatccatggcatacgtatggcaaggtgcaaaaggatagcttgccctattcgaaagaaggcggtgataagcttctgataagcggagctggaccattgctagaacgccgtgaatacaaaaatcgtcgacagggctttccaagacgggcacggtgacgttctccgaaggtgccatgactgttggcattagtagacgtttgccgctacggaccaattgaatccatcgcatggagccgttggcccggaagagaccttcgttgcagggtagaatgagttggattgagtcgggaacgataatgggactggtcgagaggaaagaggaataccaggaatccaataagagaagcccagtaatcaacctgactggtcagtatttggtagaataaattgatcagtcgacataccgcttgacggattcaactttgctccaggtttgccc

SEQ ID NO: 2108 - DNA, 439 bp, Emericella nidulans
gagacatcacgactattccgtaaatgatttatgcaatttagaaaacattatgaagatgaacaaatgatgaagacgaggctgggtatgtaggtcccgtgactagttcggtcacgaaataccacgtgagaagcgaagtatgaattgggcgaactccggccaacagctttagcacgtgattcgtatcgccgctgtcggaagcgctattcccagtacggtacaccccgcgattattctttctggatagaggcaagaacttgactcactgctgctcaattaaagtgaagactcctttctttttgaatgtccgtgaaatcacaacagaagtaatatcgatacttaaaaatctgctccttttatacacggtatagccgttctttacctatctcaatcgaccatgtcgcatacgctgtcccaaaagtacctcagtacgcgggggtgg

SEQ ID NO: 2109 - DNA, 607 bp, Emericella nidulans
aatgacgagttccggctagcgtggggtacaagccctaaagtggaggccctcgcttagagcacagtggcttagctaatcatccgccccgatctcaaactcctcactttgggaattcaatccgttgtcgagtgcaacgaacatcatccgccaacgaccgtcgatacgccgacatcaagatgtgagttcatctcccgaagtcgatactcttatcctgcgaacgaaatactgctctttgatggacgtctaaggcgtgttaagcgtgccatggactgttgagctcgaagcgatgctgcttcgtctcctccgggatagaatttctcgaaaggcctcatgctgactgcgtgtgttttttctcgcattacagggtcaaccttcgcacccagaagcgcctcgccgcctccgtggttggctgcggcaagcgcaagatttggctcgaccccaacgagatgagcgaaatctccaatgccaactcccgccagaccatccgcaagctcgtcaaggacggcctcatcatccgcaagcccgtcaccatgcactcccgttcccgtgcccgtgagctcaacgccgcccgccggatcggtcgtcaccgcggtctgggtaagcgcaa

SEQ ID NO: 2110 - DNA, 2319 bp, Emericella nidulans
aagcctggaatagatttcggcaaggtatgacattctgttcaaagtatcaggatgttctgattgctgtttcccaccaactgccgttggaattcttctgcttcgctgagccatagctccacgccagattttgcatgcggatcaaagtttcagggtgttcaggcccaagaacacggttgctggcctccaccaccgcccctccaaactcctctgctttgtttagatttccaagctttttgtagattgaagaaaggagggcgatactgcctaatgtatctgaatgttctggcccgagcacacgcttgctgatctctacaacctgtagccccagttcttctgcttcggtcagtctcccaacctcagtgtaggtgctggccaagtcgtgcatgctgtttatagtaagttgatgctctgagccctgcattcgtttgccagttccaacagctgggcccaaatctcttcagcttctttgtactttccaagcccttcgtaggccagggccatgttgttcatagtttccagagtcatcagatgatctggccccagcttctctttgtgaattcttaacactggtgtctgtagcttttctggttccgtccaccgtccttggtagcaatatataagtgctaggtttcccatagcccgtaccgtagtttcgatatcagtttcatcgtgtagagacctttgtatttccagatgtcctcaaataaaagaactgcttcattaaatcgtccgtctgcattcagacaccagccaactctctggaccatcttaggtattcctcctcggaaagcctacttcactgataaatgagagaacgtgtggcagatattcccgccaaatcgctcggttggtataagtatgagttgggaagacctcatcaaagcgaaaagccgttgtggataactgctgacgaaagcgggactgtgttcttagccagtttctagtcgaaaggtggaccagtcgatggagacttagcctgccaccttgttcattgatgaaggaaaaggccttcagaagaccaactgcatcggtggatttcttcttggaaactctctcggggagtagggatttcggatgtcgcgaggattaatgcaagccatgaatagcagacaatcaggctgttgaacttgctgaaatgaaatcaaccacgttgtagccaccgggttctgtatctcattatacctccagtcatcccccaagtcttcacttaacaacttaatcatttctgattcctggtcttgcaagagctcgaggtaatcagagaagtcgatgctgttctcattgatgtatgctgctgctgggtgatcgtcaaaggaagaaaagctagctgctcaataagtttaagtgccactgcttcaccgtcgttgaggagggttttgtcaatcagtgacttctctaagatttgtaccgctgcctgtggatctggtttggagacatggatcacattagcggaacgcaatagcacagctacctttcgattccgcgtagtgaataggatatggccttgttcatgctggggcagataatcggtcagcggtattgatccgactacagtgctgcgaggccacatatccaagctatcagcgttgtcaaaaatcaatagccactttgctgctcctctctgactcaggtgggctttcactttactctttgcatctgttgccttcactccgtgtactccaagcttttgtgctatgcatatatacgcctgctcgacgctctcatggctcgtgcacgggacccaaaaatatggaataaaatctctttcacgcatgcggtaggcagtctcgagtgctatctgcgtctttccaacttccgccgagtccgcagatcgcgactttcgatggtcgtgaagtcataagttcttcaatcttggcgatttccgcttcccgaccaacgaatctcaggtttttgtgaaagggaaccatccagcgacgttcgtcttctttcttggttggtcttaattcgggctgcttgtcgtgcttagggatcaattcgagaaaagctttcgcatacgcggcggcagcaagagctgaataaccttgccattgtttgttcttgtgcgagtcacagtagtcgcagatacctcgaataaccaagcatgggaactggcccataagtccagcggcttccatctcgaatcaaagtatgtccatctcttggaaaagcgcgtctcgtctcgccgtgtccttgatgacttggtttccggaggcaatcaagccgtagtgaggatacggtcctgattctctcgcggcaggcgtttcaccaatctggtctgatcacattgagagcaatcggggccagcctcatgagcgtacg

SEQ ID NO: 2111 - DNA, 1524 bp, Emericella nidulans
tcgcacactgagttcctggcacaccttcctgagattccttaccagtacccacagtcgaactggcacctattgacgccctatcgttggcacctccatttgctctgtcatcctcgaccaaccagacaagccatttcaccagagagaccgccttctcgacatcccgttcttcagcaacaacgcgcttcaagtaaatcgcaagagcggtaacatcttcgcggaacggcccttcttgagcaaatgtggcgtgccaagctgttgcttcgtcacgtaggtcggaggggttagagaggcgcttggaggtgaatgtaggtctcggcgggaggtttggaaggttgatgtgtttttcttgatgttgagaatggcctcggtctgctggaaccgttctgggtgcggttgtggatgcggttcgttggtgaagtaatcgggagcgcttctgcttttgctcttcgaggacttcgcagcgtatatcttctggaagggcagcaaggaagtcggcggaaatttcggggtctgaagtaagttcatggtcttggaatggcgagaggcggcagggacgggtatctgacttgggaaatgcgaattttgcttgagttagagttgagggttgggatggtttgagaggagggcggccacggcgtttcttcggtggggttgttggtttgcgtagtttgagagtcgatccagagggtctgggttgcggtgatgactctgtttgtggctttgtcgagccggtgttattgacagacggctggttgtaatagcctagtacctcggcgaggacatcttctggcacgtccgctagggtttccggatctaattgggactgcggaggcagagccggcgcgggctgctggcgaacggcagggcctggacccattggtgacccagcgcgagacgtggttcgtggtttaccttgcgcaacgagcttggatcggatgtcatctgggagctcagcaacgactgcagggtccggctgggagggcataatgaactgggttccagatgtattgagcaatttctgtgtggtgtcgtttagttgcggaccatgccgtattgactccgattcacctttgcgagggctgtccagtaggtctggatcatcaataggttgtgcacgcttaggcgctgtggatgccttgaaagccaactgttgctgactgccatcagatttctcggatgtcgactttagcggctcgagcttggtcatttgaacgcccaacccccttaaatcaccaggggagatagcgaggcttcgaagcatagcaatggcctcttttccaagaacatctgctgcgttcgtggctatcccaagaatgacgctcttgttgaaaacatcgcatttcccatgacccagatgtttgacggcttccaacggggcatcgagagcccttcgcatgaccttgagtgtgagctgctggcccttcattagattctcgacgagtcttcggtgtagctcctcgcacagggaccgcatgaaatcttccgcttgatcttgagtgacaaaacgaatgccccagttaacct

SEQ ID NO: 2112 - DNA, 642 bp, Emericella nidulans
cttccggcttggacaattaccagaggtattcaatggatgagtatgaagggggacatgggtactacgatatgacgggccaggatccgatggaaggggattcacgcatgcgtgagcgcaacagcatactgagtatgggcggcgggctcatgggcagggcgaaacacatgttgggaatgaagcctgagtactctgaaatggaccttcccttgaccgaagcaggggcacgagctgcgcgagccgatagcacggtttctgaagatggccccccgcatgcgaagaaatcgagcaagccatcattcaagtttgggtttggccgtaggacagtcgactcgtctaccctcggtcctcgtataatccagttaaacaacccaccagccaacgcagtgcacaagtttgtcgataaccacgtgtccacggcaaagtacaacatcgtcacattccttccgaaattcttatacgagcagttctccaagtacgccaacttgttctttttgtttaccgcggtgctgcagcagattccaaatgtttccccgacgaatcgatatacgacgattggcccgttagtgattgtattgttggtgtctgccatcaaggaattggttgaggattataaacgaaggtcatcggacaagtccttgaact

SEQ ID NO: 2113 - DNA, 993 bp, Emericella nidulans
acgtttcccgccgtctggatacatcggatctcgtttggcacaccgacagacggtcttcaagcgcgaaattcgtgaaaccgatctcttggccacatagctagccttctccggatgaggtacggcaaatctcttcaaataaatgattgaagcttcatggcgtgctaactgctcggtggtagctggcgcacgcgggcttcttctacaacccctacgagacgaaccctgacaacacaacatgttttctctgcggaagagcactcgacggatgggaggaagatgacaacccgatcacggagcacttgaaacacgcaaaggattgtggctgggccgttatgatggatattcagcagcgtagctcgaatccagccgagatagaagaccctacaagtgagccgatagtccaggcaagactagcaaccttcggcgactcatggccacatgatggcaagaaaggctggatatgccaatcagacaaggtaaggcagcttttttgcaatcctaaggcttgtatgtctaatggtatatttcttgatggtagatggttgaaggcggatggtacttttgtcccaacgaagaaagcgccgacctcgcgagctgcgcctactgcaaattgtccctagacggctgggagcccaaagacaatccttagtaagtatagctcagttccttccttactttcttcgactaactgagcagcgacgaacactaccgccgttcttccgactgctcgttcttcgtgtttgcaaagcctgccaaaggaaagggctcgcggtcaaagagagctcgtacttctaaatcctcccgccaatcaacacagtctacgacatccgaagttctggcttcagacacggaggatatggaccagagcgcactcacccagccagccagaaccaagtcaacgaagaaatcgtccaaatcaaaatcgaaaaactcaaaaactaagaaagccgagcctcaagaggtcccaagccatatggatgtggatgagacaga

SEQ ID NO: 2114 - DNA, 3090 bp, Emericella nidulans
cgagctctcagaccagccggtgcgatgaaaaaaccgggcacgccgagagatccgcgcattgggcccattcgccgcgccgttttcatcgagaagactgttgatcgagagaacatggaaagattttcatccccagacgcagcgatccgcgagagcagcgcgtgcacgaggttagcgttctccgtcatcgtcgcgacggtgcggaggtcctcaaacggcgaggtttccatggaccagtcgaacgaaatcttggacccggtctctccatcccacacttccatagcctggtagggctgcgtccgtgagacatccaagtgatcccaagcaccgatcttctgcagaaatgacacggacgagggcgtgaggctgctgacgcggttggaaaactggtgcggatcgagcttccacgagcgggctttgtctaggtcctgcgattccacgagggcgacctttaacttcgacgttgctggggatgcgcctgtccgtcttatcagtatatcgtgagcccattctatagtaaaaatactagatgatcgagcaatgacatacggagagcagccagcagtgccagaccggcaggaccacctccaacacagactacatcgtatatatccgttaccggcgcatgttccgagccgaatctccgccgattcaggatacgcgcagatcggcactaaggacagacgttcggccgcagggcataagcagataatggccgcataatgagtggatggttggggtcaattcggtccaagattcccggatacagtatttcatgctcgggcgatcatgagataactgcaaacaggacaaacacacattactcgacgctcaaacctcctccctacacgctacactactcgtgtcccaaccggcctgtatggatcgctattcttagcatctgagctaccatcagcctgctcgagagtgccgcctaggctctggtgccggcggcgtcgctcgtacaaggctatattccctttggagttcggacgatcacaggatgcgcgcccagtcagcctcctactgcgtgcattgggatctgcttatccatcgcctcaaacagacctctgcagctggagctgcaaaaaacaagtcgtcggtgctctattcagaccaccctacctagatatgctccgatattcgccatcgctagtcccgtaacatggccaccagcctcagttacactacatagaggtaggtacatatttgccagaactgcccaggaaacaagcgataatacagcacaccctaattatagatcatcctcctgcatgatgcatatgtatttcacagggcaagggctatcaggcactagaatgactgtatgcaggtcactgccaccgtcggtaagacacgaaagtcgctgcgccacgctcccatcaatcggtcattcgcttgcggaactcaagagttttatctttgcggcgctgtgatctcccttgtgaattgctgcgtgggatactaggtacctatgtatgtaccagctaagcaatccagctgagctgcaattgccttatgagtggcaagtccatggccaccacgtctatccagattcagataatggcgtatttgcaagtagacttaataggtgtctgggccctgtaggtgttgctgttccgattactatacacccacactgcaaacggtggtttggtgtcgtggcctggaccctcaaagcctgggtacctcttacctatagttacctacactgcctacattatcttcgtctgatatctataaccctccgttacccacccacgaaccatccctcctccgcatccttacgatcctaccaggcacaggcagacaagcaggcaaggtaggcatcaaccatgacagacaccaagacctcagatcctcgagatcgttctgtttcagcattggcttcagcctcaacctcggcctccaacccagcagactccaccactacctctgcccaaacaaagaaacaaacgcagtccaactctcaatcctcttcgctctaccccggtctcggcgctaacttcgcccatgaccctaaggccccattttccgtcaattacgaccaagaggtctatttccagtttatggctggggaagaaggtactgacacggggtcacctgatgcaaacaaaaacaagaataagaataagacgctcaaccaaatctatcgggaggtgtgtatattttatttctcattaaatgatctcttcaatcttccctatcccgcaaagacgggctttgcgggtcaagcggtatatgcttaccagacttaaaaggaatgggtgcgtcgtgcattaaatcccgcgatttcagacccaaggggtgacccgagtccgatcgattttgagtgcgcggagagtcagaggattagggagaggttttgattgtttagggttgcaggaacaggggtagacgaaggctttcctctaggatacagagctagagccactaccttccactcgagaatatacctttgaatgatagttatatccagaatttctttttcggatggcgcgagagcttgaacaaagcaggaagactgggacccaggtgtgaaatcatagggacctgtcaggggtgtcaagaattggcttcgggcgttctgccagcatactgtaaggcagattccaggtgggaatgatatctaggtctaaaggtcaagggaacttgatataaacttccaaaggtgatgaaggtacgccttttgagtagcagatggtatgagacaaatagcatatagtccgtactactaaatatagccttgaggacaaggaaatcagacaatgtaggttatgcgtttgggtgagcgtcccccgtactctgttcctcctccatctcagccacaaatcgttcccaagtatttagtacaccctgataaaactcaatgtgttgttctgcgagcgcgcccaaggagtctcggaattcgattgctttgattctttcaaagtcagccacttcccggacgacctcttcgtcaaacatctccgaagtggtctttgctgattcgacttctcgtgtgagctcgtcgatccgtagctcgagtttacgcatgcgctcccggcgcgacagctcgtggtccactccgcgcatgtcttccatcttcggtga

SEQ ID NO: 2115 - DNA, 1582 bp, Emericella nidulans
tactgtacatgacgagtcgacctcagtccgcaaagtgcccgatcttctcatgtctacgaaaatcgagatggaaatcaagaactggcagctaactgggctacctccgtttcctgaactgatgcactttccgcgcgattgctggagcaagctatcgcggacggacctccgtctgatccaccatatcatcgggctctcgatcgacctccaccggcgggggctcagtagctgcactatctgggcccagaagatgccactgtaagtacccgatctggattcgagtctggggtcattgctgacggtgtagctttctgtctattgctatgtccaacgactttgtaatgagctccattttaaccttatctgcgactcatcttgcctggatcacccacaaccaggaaaccaaacagctagccttccaccatcggggtatttccattcaaggcctccagaaagcgatcagcactttctccaaagataactgtgatgggatcctcgctgcatcgatcctcctgtcatggcaagatagcgaatggtcgagctgggtatctttgcagcagggtgtgacttctgtattggactcgatgcctcagctatggaggcaggagtccgagcttgccatgttcctggaaaatcaacggtttttagcaagcgcgaactctttggtcgtttctggtctccgcttccaagaagaggatctggccagtctcgaccacactatcatcaccctccagaccatccaaaagcgagtcgcacacaaccacgaacactttcgtcgactcggggaattgctcgagttcgtgcgacatttgcagcgtgatatcctgtccttgactcccgctcaagccttcgaacgcgtgcagcctctgcggcagtggctattctttctcccgccagccatgcttcgtggaggagatggtgatatcggagccttggctattttggcgcagttctttggcgtcggagtagctctggatagtcttttacccgacctaggaggcgcctatctgggtccgatgtccgtaggacccatcgaagaaatctaccgcactatctacgcaaggaatgccaccaccccctttaaccctgacgtacaactggctacttccatcatggatctccctcgacatctagccgctaaatacagagcccgtctacaatggtccccccgaacgtctgtcgagtactactcgccgccgccgccgagtcccttccaaacggtgcaggactttcgtccagcagcgtctccatcaccttcatctgtctcggcttcttataccgcatataccccaccactgcagtctcccccggcggtgacgattgcgagctcaccctatgaggtttccgcgtcgtatgcaacggcgccagctcagcgagcctctatccccctgcccaacttctctcggacacgcgggaagaaccctctgattgcggccatccggggtctctacagcactccccgccatatcctccctcgtatctcgaagacatagtttgcggggctcgggtggatgggggccttgctctgagccctttggagctctacgaagaccacgcactccgttgtccatgactacggcacacc

SEQ ID NO: 2116 - DNA, 2410 bp, Emericella nidulans
gggactgtgtgcccggaccccaaacaggcctttccgcggcacacgtggatgaacgaaggccttcacgatgcttccagtcgtcgcttatcagccataggggaagaggataccacgtcgccctatcggtctggaaggaattcacaaggctcggcggtggaacgacatagtcgcgttttggactcgccagtatcgatgcgcgagaaaggcgatttcgaaggtgctgaatcccgagcgcacagcagctcgtcaagctcgacgatcagcggagcgagtgagacttcgtcatgggatgagacaaaagcgcgcgcagactacgtgtctgcaaaagagattcgtggatcgagagaagaccgccgcgcagcccctgcgccgtcaaacagtgcacagtcgacctcaaacgcgccggcggccaatgagaaagacgatccggacgaggacttgtccgcgatcattttggagagtgaggcagagcggattttagagaacgcgaagagacgattgtcggtatgttgcttgctacctggattcgcctctgcgtgcgaaagctaacttttgcagcttatggagggaaacttaacacgagctcgctccacaatgcgctcaactactccgtcgctttcatcctcaccggtgccttccgctccctcgcctggtctaggacagcccgttggtggcttgtaccagtcgattcaccgcgcagctgaccgcaggtcctccaatctccggccacgacagacatataagtcgcaggttacaagtaacaataggcattcgcgagtttatagcgagaccaacctgccgtccaacccacgggatgttgggaagactatgtcccgatctgtgagcgcgatgggctctagcacgagctccgacttccataatgatgagcgctcttttcattacgcgcccactcgggcgtatcttactcaccgcgcgtcggtctcgtctatacagcagaatcacttagttccatctgtgaaggaacgcgcatcctctaattcgccttcgattgaaggagtagaggaagaggaggcgaaaatctcgaatatggaagaattcaatactgcttatccagttcatgaccccccttctcgctcccaatcccagctccaggtgcgcgacctgcaggatcagatgaaagggcttcacatcaagatctcgactctgaaggtgaaggcacaggaggatggtctgcggcgccgcagcctacagagtttgcgcacgcccagccctttgacagccgcaaaccattggtacgccaatcctcttgagcacactgcacgccgcagtcctctacatttgagctcagaatatgaccaatacatgaactcccccatcaacagccattccagcggcagcgggcagacgtcaagtagcaataccgattcgactgtccttgtcccggagagtaggccttccgaggctctgcagtcgtcggacggcgctatcgttgcagcctttgaactaaccgaccatgagagcgatcactcgaccgcggaaagcctctacgaagatgcagaggaggacatcgaccgtgaggcgttagaggagattctacgagaacctctggatgatgacctcgctgatggcgagctggagtcgcttccagcggttgacgatactccgcacgaagaacgtgaggacgcttttgactacgagcactttattctgcatagcgcattgggcaattacacacagacgcgactccgtcggcaaagcaatgcgtcggaaacgtcagttgagaccacccggccaatcaacaagcgccgctctatgcgttctataaagcattccaggtccaacagcaacaactctatatccacgatcgcaacctttgcaacagccgcggaaggcagggacgacatcgaaagtgttctgtactgggaccggaaatttaatgatggtacgctttttactctcactatttctgaccaccaaaaactaataaccctagaactcaaacaccgctacgtagaacccgaggatgaacaaacagacatcgaccctgaaccagaacgcaaccctcgcaaatcgctcgcagtcgaatcggtcgcctcacagcgtcctgactctgcagcaaccggctccgcaacaccaacgtcgcttgcctcgtcgcttgtctcgacagtgcgtgcggcagcaagcccacatccaaactccacgaacagccacctaggtattaatgaagacgacactcggttgctcgaacagctgttcaaaagtctaggcgacgtttgcatgaacttgcaggaacttacgacgtcaccggactatgacgagaagcaagcgaagctactcaggcgacggttacaggccgcgaggcgcgtgcttgatgaaaagattgattgatcgacggaatttccttatctataattaactggcggtgcatttttgtgatgcccatactata

SEQ ID NO: 2117 - DNA, 4198 bp, Emericella nidulans
  unsure (1)..(4198): unsure at all n locations
cgggcgtgacgacgggctattccgcgctgctatcatcagagtgggggtatggcaggaagtggccttcgacatcaaagaccctgaggtctacatcaaggaactgtatatgaatctgaccatcacgacggggtgcgcggatagtgccagcgcacttgaatgcctacgcgcattgcccgccgcgctgaacatcatcagcactcccgtctactcaggtactggcttgggcccttggctcacccaggtggatggtgatttcctgctcgacgggccgactgagtcactcgacaagcaacatttcgtccttgtgcccatcatgtacacgaccacttcggacgatgccacggccttcagtttcgtcgattccgtgataccgatgctgactttcggaatttcatcggagctggcgggcctgacgaggcgatttcggtgattgaagcgctatatccgaaagatttggggttgccagccggctggacatcagcagctaaagaagaagcgacatatggtgcacagtggaagcgagctgtcgccttcatactgatgtggtagagacaagttcacgtcgacgaacggtagacgcctgaggtgcagcgaatggaacggcagcttagactccagatgctatgtagaggtggacggatatcggcttgagcagacgagatatattaacagtaatatgcaaagtcgaatgtattactgaggtctctagcagcagacaaccaagctaagaaaggccttatgacctttttcgaatctatgtcgtacgtgcagtagatgctcaccctttatttttcaaacacctaaatgcattatatatcaagctcagagaaaccaaacagaagtgctagttcgcaaccgtatctctcaaacaaaaagccaagcggctcgatagcatatgaatcttcagaagcagatgtcctctgtatataaaagcctgttcatgatataaatacaagaaatatgagtcgaaatctgtgttgttcaggcaatatgttaataacgccaagacctgaagtataccacagtacggtaaacatgcacatcacgtggatgatatccccgcacgggacctcactgtttctctgcttgttgacacaagtcagttcaagtcccaactccaaaacgatcaacaatgaatcccaacctccacgccgatacaccaccacccccaccgccgaaaccaggcagtcatgaggccagtcgcggcggcacaccacaagtcggctcgccatcaccaacggcagcgcagctcccgcagcagggccagtacggattggacgtaacgaaccaatacctcaacccaagcacagtcaatccgaccgcgaatggcccccggcctccggcaattgaagaaggctggctacctgagggtatcaaagaaaaatcgtaaagaccccctccacaaccgctctctcgaacctgcccagacttcgaaggtttgataggtgactgattacaattagaacaatcgacctccaaacaatcctcgaaaccccatcactaatctctgccctttccgccacccatccatctcaccattgccatcaggaaatgcttcagacgcttctgaaatataaccaagacctggcaaatcaccttctcgacctacaatctcaactcacaagtctccgctcctctaccgagacactcctgctccagcaccaatctcttgaagtctcatggcggaagaagcagggcgagatggattccgccctggcaccgtggtcgccaaaggcattgtatcagcggttaagtgcgggtatagcggaacaggaggctgtttgttttgctgttgaggagagctttttggagggcgagcatcatggtaaggcatcagagaaggaggttgctgattgggttagacgggttagggcggaaggggcaaagttagctggaagaagggaggcgaaggcgaggtgggatgaggggagggttggggggtggaggtagcatccatgctcctcaagtacggacttgttgactgcagtatgaaggtgaaaaggaatttctattcttttatgatgcaacggacggaaaatcgctggatataaatcacataacggttatgacgatttttctccgacatccttacttcgatatgcgacttgtcaatgccggcacacctcatgccgccaaatgccgcctcccgctttccaagtcaaatccgttctgcgtcatggccgccgtgacaggcatttcggactcgactctcagagtcgcccacccatcatctcccacattgctcgggcttcctacgcccttgaagaacgcatggtccctactcatggctccacacgaccacccggaaccacgctcaagaggtggactatacagcctaaacgcgacccaagcgaacgacatgcccattacagacccgaaaatgatatcgaagccatggtgcctataatcgaaccagcgagaagccgatataaagaatgctacgtgccacggcacaaacgcaaggattatcagatagatggcggcgcggcgccctgattacgggtcgcaaagcggttccgagggcgcaggtcctgtgtcagcggtgtatgcgcgaggtaggggaatttgatcgagaatttggagcacagccaaagtgagaagtaggttagaccggcgaatgaaactgtaacggccctcagcgttgcccatgaagaccatgctcaccaagaaggaatatgaacatacgagacgagtgcccactaggaaagctcacaaacccacccctcttcaacaaatccgccttattccggcagatatcccagctaaccaatgtgggagccccctgcagtctctgcccaagtccacctaccgcataagtagcaatattctcgagatccggatcacaccgcgcaagcatgtccggacgcggcttgccataaagatctttcagcccctccgtagccataaacgcagcggcacaagccagcccaagtccaagccatccggcattccattcccagatcttgcgccgcagtagtagagccctagatgacgagcgcgagtctgccccagatctgtcgattgattgccccggcgtaagaagtagacacacagctacgattatcacggcgggtgctatcagcgagacgactactagcacgcttgtgctgattgtttcgtcctctgtgtatgggtatgagtagctgacgtcggtaagggagaagggcatgtggtttggctcgactttgtgaaaaccatatccaatgagggcgatgccgctggctcatgacgttaatccgttttttctccaaataataactcgcgaaacctttacatgaggctatacatacactatgagaatccagtcgacgatgtatgaaaggaagacgctgatggagaagctcgcgtgacctcccggcaaggccggtagagctttaagtccggggagaggcatgatatattagcttagtatattattatttctgcaccgtcaccagaaaatatgaagagaagagatcccccgacttctgaatgtgtcgcgaacggaaggggttagatacgagctccctttgcatgaacactggggataggaaagggcttttaagtaatcctgattgcttgtggctacaagccgatcttatcttggcttgggtcatcctcaagaaccaagaaagtttagaccagattggaacaacaaggccggggctgtgcaagattcataagccgactcttaaacctgttgctgtttatgccattcattcactcgggccggaatcacaatgtttgtgtttgtccaagtatgactctggtccacgtataagcccgattaagaccgaagcatgcgtcagaatgttttcagtcttgggtgcatacggtgtgctctttgctcggtcgaaatcaacgagcattagacctgataacttgtcttatggagcgctcgtatactcagagtcctcgtcggcctggatgtactcagcactcgttgctataactatctgtcggtttccaacgtccatcctgatcacaggacagcccctctcagagtaatgtaactagttccgatagaaattttttgcccggccgtgatttcgacttctaagactgtatcactgattcaacattgacgggtagaactgggctgcgatttagcaaccgaactatctagtccggnctgaggatgcttgcttattgcaacagccagaaagtctagtcccgaccctgcactaattattagtgcccccaaatttttttttcccat

SEQ ID NO: 2118 - DNA, 1995 bp, Emericella nidulans
caaaccaaggtcgcagccgcacgggcattagcggcctgttaataccagcctggcgttcactcgtccaatatcgtaccgcgccagctaggacagacctcctaagcaatcttgctcagaagtcgccactcagttcgttcgcttgatcctgctgcacaagcgcaacgatcacggtcgcgacttcgtcaggcgtcacccacgcatccttcgtatcatccactatcttcagtttctccgggtggtcggtccaaagcggcgtcttgatgatgcccggtgcaacggccgtaacgcggatcccgcagcgctcgtcgagtttggcgagcgagcgaacgaacccattgatcgcatgctttgtggcgacgtagatgggcgctgcgaggaacgggttttgccctgcgatactggagatgtgcacaatcgctttgcggcgtgtgctgtctgttccggacctgaggaagtgcgagattgcgagctgtgacgtgcggatcgggtgcgtgaggttgatgtcgatgagcgcgtagcggtcgccatctggggggtcgcggctcacagccgttcctggagggcgccagaagttactccagtgctttaaccggtcggtcagcctagacggacaaggtaaggatacgtagagagaacgcaccggttcataaatcccggcgccagggcagacaatgtccacctcgccaaattccttctccgcaacctcaaacatctgctcgagctgcttccactccctcacgtcggttcgctggaatacagcccggggaatcttggccgtatactgatctaccaagctctgagcctcaggacgcagggccaagtcagcgattaggacattgcagccattctccaagagctgtttcgcgaaactcaggttgattcctgcatacaagcatttctcagtacatctcacgccgttaaggatggatcttggataaacacaccagagccagcaccagtcacaatagctgtcttgccctgcacggagaatgacatgttttgtttctagtctggtcgccagcaaagaagccctaacagcgtttgtatttgcagtgctcgcaatacttatgacgtttgcgtggttgtagttctgtcgtgaaacaaacctaggctcctgtaagaaatggtgcgtctttatatgttgtggttactgtcacacggaccacggctcagagcctataatctccctactgggcaacaaaccctggagcactatctgccgagctaccgaagtccagctagaggcgtgcgtgtcctgactcggattcggcagctgatgagattcgcggggtaagcatgtaatggagttgaggccttggtggaccggggtgtgggacaattgaggggtctggcggcggcagacggagtatagaccgatcctatatatcatctcaaggttcgaaccttgaacatctaagatatctggtcttgtttttagccggtaaataggtgagaaccgttccatattctgcaaccgccaggtctacgcataattgggtacaaactggttaacctacgcttcgttactaatcgcatgaatcgcatgtatcgcatgtatacttcggtacatgatgggggaccggacccagtccgatatcaggactccacctcggaggttccggatgatgaatcgcctaacgcctgaatctgccttttatgctgctgaattaagtggaatacagctgtggtgaactgcctcctgcacgagaaagcacatctcggcctggtagcagtctcgacctcagtcgacagcgttcgaggtcctcactcttaaagcatgagaactactctctgttctagttaaggcgctatttattcatctcactatttggccaggtatgtctttagcagaattatttgcagtgaaaactgcctgcagtctatgtaacaccaacagggactatgcgcgctcagtcttattaggtatatgatcatgaatcccagaataagaggaatttgatgagctgaaaacacgccacacaagttgaaacctga

SEQ ID NO: 2119 - DNA, 1984 bp, Emericella nidulans
aagcgccactgatatatatttttttcgtaccacactccgccactggattttcgaagtattgcatgatgcatatttagttctgcgaacgagtgaggatgtatgaacccacgagactggcagcaaacgcattaagtcctcatggttaatagtatctaagcgcccttaatggtgtcatgacataccccccattagggactcatttaggccgtcattcattatcaagtgccgtcggacctccaccaatcctctccttggggaaaggtgaactgtgtttgaacagtaaatacctactggctctacctaaatgaggaaagagactgttctgacttatatttatttgccaggtaggaccgtatccttgttttcaggattaatcgagtaatatgctacatgatattgcgagtagagtccttaaaagacaaaacttctagtctgaaagatcttttatttacagtatatccagagaccaatagaggaaaaaagaagaatggcgaattatcagcctctttccttccccaaaatcattccctcgacaatcttcctctccccactgccctcgaccatcccatggaataccccatcctcaatccccatcaataatcttggggaatccatctcgacgacttctcctctctcaaggacgacaaccctgtcgaagtccgcaattgtgctcaatctatgcgcaataacaatcaacgtacaaccccacccggcaccacaaatatcctccctcagcacccgttggatacgctgatccgattcaacgtctatactggctgttgcttcatccatgatcaggatcttcggacgagagaccaaggcgcgtgcgagacagaggagttggcgttggccttgcgagagatttttgcccccagctgctattggagtagacaacgacagctggagaatggtcaaagcgggcgaaaaggcggcgttagaagaagttgaatcgtggtcttcgtttgatattggatgttgcgttggcgataaggagaacaggcctactctctccaacgcggcgaggagctcggtatcgtcgtactgcttgaatgggtccaggacttctcggactgtcccggcaaacatgatgggatcctgcgaaatcaaacccacacgctcacgcagatcctgtagtttgacatgctcaatatcaataccatcaatatgaatgctcccctcacgaacgtccaagcagcgcagagcgtcatcgcaaagctcgatttccctgctcctgtgcgcccgacgaccccgacgcgctcgccagcgcggatgcaaaagttgaggttgcgtaagaccggagcgagatctggcgcatatgcgacagtgagactagagatttcgacttcgcccttgctcggccaggtggcggggacatcgacgccagactgtagttcctgatcaagctgggtatactcggcaatgcgctctgcggcattggagttaatttcgagtgatgcgtactgagacagaagccaagtgacgttgctggacatgtcgagggcgaagctgagtgcaaagccggccagtggcgcgtcgagggtgcgaacgctgacgaatatcattgttacagccgcgacgaactgctcggtacttgtgtgtcaacgatgcatggttccagtgttaaatagcacgctagaaggggacataccactgcgcccaccgagctaagccagatggcccgccaggaggcgaagagttttctgtgccatagagcctgacaatacgaatcgatgagatcatacatgcgcgtcaaatatgcctgctcccgcccaaaggcacgaacggttggcaggcctgtgagtagagagccgacgagctcgaagatgggagacctagccgtgctctgtagtcttttcgcctcgcgcgctgcggtcacgtagaagtacccaactgtccaggaagcacctaaagagagaatacccaggccaacaacaacgggagacgtgaccacggcggcaacaatcacgccgaggacagttatcgc

SEQ ID NO: 2120 - DNA, 2645 bp, Emericella nidulans
aagacagactggacacccatcgcacatctaagtcacgagtcatgacaccagactgcagcatcgacttgaagcggatggtaagagggaacgggagcttcactgcaccaagcaccattagcaattcataaacagtagacagacaggcatagcctgcttacaaatgacgaagcccgaaaaaaaagcatttatccagctcataatcagggtctgcggaatcatcatcatcatatttcccttcatcattcccatcatgccctccatagcagcgggatctgacattgggttagcgggtggctggccgcgactgttggggtccttcaaaaaggcgccggtttgaaagcccgtgacaaggtagttttttcgcatctcaaaagcctctttcgacagcacagctggggcgtggttacgcaggttgacggcgcggaacagggagaggcgctcgcgggattctgctagggtcgcgggaggcttcggaggggagttcattaggattgtagcatagtgtcggagcatgccggtcagaatctattgggtttgttaggaaagattgaatatgtttattagaatgggtcttaccatgacaacggagataggaatcaaaatccagtaactgcgagtttcaggtaagtctcgtctcacagatccgtgaatatggactaggtgtactcacaatagagccggatcccgaaggatcgtttgctctacaccttgcaatgccatattgatgtgaagggagagccaaggtgtaagctgtagctggcaatgatcaagagaagtgttcgaacatcgaatccccacagggtccgacaaggcggcggacctgaatctagtccatactgccgctttagcgccgaaagggacagctcgccgcaactacacgcagcagctctaagcatacccatcaaaaataaccctcttgcttctttctattttgctactgcctcctacgcgcccgcatcatatcattctttaaccatttattaattacgcaatgtcttcggaagctgcccccaaggtgcccgtctactccccgaatggtatgctggcagtaactgagtctacagctcacagcactctgaaccaactaacatccgcatctgcttaattctcgatacatgtactaattcctttttgaaacaaacacagacctcaaatcaacaacagacgacgccttagtcccctaccttaccaccctcccgcagccctacacctttaagcaagaccacttcaagacaaatgttcgtttcatcgtcggttacagcgccgtcgcaatcgcagcgttcacgttctacgcggaccgcaagcttggctgggaagcgacgacatcgtcatgggttattgccgcagttggttcgtacttcattctaaactcgctgctcacgtactgggtctgggccgtcgaggctagcgaggtctttcgggggaagcgcaagtctggggagacggtatgtatcttctcaataatgtctattcctttggttttttcactcaggggaagggagcggagcgactgttggcgacttgcgtagtttctaatacggctatgaatagatatctattcgctcgtccgtgaagaagcacacgcctctctacagactgcagattcagtataaatcggcttcgaacagcgttttagaggagatggagatcgtgtcgccgtttacagcttggttctctgctgacgggacataccatccggagcctttgcgcatgtggcttgcggatgagattaatgtgctacgcctggccgctcagaaccccagaaacaaaccgggtggcgtggctagcgtggtgggagtcgaggagtctgagcacaacgaggtctaggatgcgaagaagcgaaggtagtctaagtatggaatgtgccagatgcaggtatgcaactgaatgaagagtcccttcttaagatcttccaagcattcatggtctacctactccatgttgagatacaaccctaactggcttaccaaaccagcatgactgcgcttgagccgttgacttcaccattagcggcccttcacttcccattgcgctctatcataagattttgagatgataagcagagtctatataaggcagacaaaaaaaaaagcaagtttaacgtttgaacaagggaaatcttatctccatgcgcttgataacatcttttgaccgacaccactttctatgaagcagcctccagagtgccaggacgctcggtagcagcagcaggcttaatgtcgtccattctcttgttctgaatgagtctctgttgaaatgtagtcagttttgagcgcatttgtaataaagtctcaggacttaccagcaagttccggagcaaaacgacgatagtcaccttcccgattgagggcacgaagatggaggctttttgcttaacttcaggaccaaagttctgtttactcctgtataagcaagatgccagctagtggccgtgaagagataaacataccttctcgcttgaaaaattgatacacacggcaccgtctcgcagcaagctagtgtcgaacttgtacttgtccccagggacaccagagataacggtatcacacagcgggacaatatccttcagctcctttccctctacatcctcaacctcatgtctgcccacttcagacccgtccccgatagaacttctggatacagtg

SEQ ID NO: 2121 - DNA, 2655 bp, Emericella nidulans
acaaagccgatgtttgattttcgtaaccacagcatacgcaataggagtgggcctgtcaccagctttgtcgtatacggtaagctcgacctcgtttgccttgtctatgtcgagattgaatgtctcatcctgccacctgtcggacctggttgcctttgttctggcctttatagtatcctcgactttcacgataacaaacgtctcgggacccctggaaaatcttgagctagtcgcatgatcaacgtcctgaacggcttgaattcgcattgtcagaagaccggttagcggcttgcgcagattcggggcgcttaaactttcatctgaaatcaacgtcagctagggggagaataagtcacacagagagcaatgggtccgcaccatcaggagtatccgtcgactcaatatcaacatggagatcttcgtatcgcttgagagcctgctttagaagctgaatcttctggttactctcaattcgtcggccctcggcatctgtgcgactctttctatcgccttcgtcctggtacaatcggaccatcttctcaatgcctgctttgtattgtttctcgacactcagcttgaactcaagctgggataacataagctggatttttggtccaaggtatggggtatcatatttaatcaggtctagagaagatacgtatcagtataagaatacatttgaaatagtgcaccgaaagtgcccaggtgtccaatgcaatgaacataccgagtttagtataattcggacgggccttgggcacaggcgcgaaaggtcggggatccttgaaaggagcacccgacggcatagatccggccccaggctgcgggtgctgcgtaggatcaccataccccaaaggatctttcggcggaggggcagggccatcttcagggttcggtggcagccgtttatcggtgggtgaaccggattctcgctccatctgccgcagctgcagctctttcatcttctcttccagataagcgatgttcttgcggccatctcgaatattcgcatcgactcgttgttgcaccagaggattatcggttgactgtcgcatattcgacgcagcggcgataagggctttctcccgctcgatcttgcggtagaccgaggcgatgagctcgtccccgtccatggtgtaagaggcctgacctaggggggtcgtggtcggggaacgaactcaagagccggggcaggaaagcgaccggttgaaagagggcagagaagaagagaccctaagagaatacgtaaagaaggagaggcctcgtaaatcaagaggacggagtagatgaggtcagtagggtaggtcggtggccggcagattggagggggggattggggtggagtttgggcgagcgagaggcggaagtacagacagatagtgtcgcggggttttgttgacaataatgacagcctcaaacagagcacaaggcgaccaaacagtcctgcaaccttcaataatcctcagcagattttcagatccttgacagatgtgagacaatctgtctgtcgatgacgaaatgaagtcgttttctcaatttcctgtggccagatcgatgattgatttatccacagttcagcagaatttattgtaaggggctgtgctgggcgttccgtgacaggcaattgtcctgatactccgtttaagtgtgaatattgttaggctgccaggtgtgtgccgaagaggtctccagacttcacaaggtgtgccagtcaaagaaattgtgtcagactgggccacctcaagactttctcaacgcagaatccttgggcgctgggctagctacaaaatatggcctcacgcgtccttgatgaaaggaatgaaagactccggaattcaactcgccgatgagcggaccagccgtcgcaacacccagcttgaaacggaaacaatgtgcagaatcgagattcttgcctgagcttccagccggccagtattcgtcaccacgaaccatatctgttccattaacagggatctccggagcctacttccaaccaagacttgtctgccagaaagaacccctcttgaagccattaggctttgaacatccctgactgtaggctttcaaggcagaaagcagcatgtggttgagctacaagaatccataattctatcgatcgtccttgatcgattccacggctcacgggtgcagtctcagcatcacacccccttactgtatacaggcacttggaatctgtaaatgcatccaagggtcatgcgccctgtttctggaacatcgagtcttctggattgatccacggagatcaccgcctgtgcggccctacccggccactgtcgcagcggagttcagattccagcagccctacggtttacctctttaagtcactggattgcgtggcagatcacggcgtagactggagcacatggatgaccaggaataggacccctcgactagatccggtttagcgtccacgtgataacaaaatatctctagatagcggggaatcttggaggttcttctagttctcaatctgcactgcaaattgcaaatctactccattgcccgagaatcaaacttcagtttctccgaacaaacttgaacgcattgcaatgcctcccccgaacgtaaggttcttgcgacacgcgaggaaaccatgtttccgccgacgaactagcacaagggcaagaaattgcgcga

SEQ ID NO: 2122 - DNA, 979 bp, Emericella nidulans
ccacccaagactacgataccagcgacgatgaagctaagtcccggttctcttgaaaaccatgaccttgtgaaacgcgcattcgccggcgatgaggtcgttcaagagttcgagcaggagaaacttgacactatcgaggacgagggcgacaaggtcatcgacgagacactccctggctggggcagctggactggagacggcattagcaggaaggaaaggaagcggcagaagcgcgttttgacaaaggttgagggagtgaagcccgaaaatcggaaggatgcgaaactttctcgtgttatcatcaacgaaaagcgtattaagaaggtaaaggcttttatcgatttcgcacccatcgacgtgaatactaatatctggcttcctgcagaacaacaagtaccttgcgacgcaactgcctcacccgttcgagtcgaagcagcagtacgagaggtcgcttcgtgtcccgattggtcccgagtggtctacaaaggagactttccagtcttctaccaagccccgtgttatgatcaaacagggcgtcatcaagccgatggagaagccgatggtttagatactggccgggccttgaccttgaagttcagaacactagtcttgaccgcggagtatatagggttagacaatatatacctggatacccattcaacctgccatcaatgcagcttaatgattagttttgaaaagcattgtgtttatcttttagtgatttgtcgtcgtgttttctggtctgttctaacctggaacagttcgaaccctaaatcgaaccctctctcaccaacatctggcagtaacctatccaagtttattgtatttcgtgacccctaagccaatccaaggccatcagttacgtgataacatctgcaaaagctgagaaaagctcatctgtggctgcaataaagccatagttagcttcaatcgctcattctacctaagccattgcgcttgagcattcctactcttcactttc

SEQ ID NO: 2123 - DNA, 1748 bp, Emericella nidulans
taccgatgttgcctggtactctgacctcgagtcaagcgcccaagttctcgcctgccgttgcgtgtatgagcacgacacgtaagactttcttacatactctcccgtctttgacggttcagttgaactaacagcttgttggagcattaacggtggcggatacggccagaacattggctacggtacctctgctgatgaagttgctgtcatgatctccaacttgatgtataacgatgaaatgggttacttcgagaacctctacggacaagccaccccagacatgaccctgttcgagaaatggggccacttctctcagatcgtctggaagggaaccaccgaggtcggatgcgccactgtcgactgccctagccttggcaacgtcgattccgcctcgtctgtccccttcactgtttgcaactacagccctgcaggtaagtcgaccaaccgttcttggtctctcactcgatctgacatgtacgcttaggaaactacgacggtgaatacgccgacaatgtcctgaagcccctcggtaaccccgtgtggtctgcgtcataaatctggagctatatgcactcacttttgacggggtactgcttgtgcctcgctatatggcagtagactagatggcactatcgcacttaggtttagtgattagtcggtaccgcttgagccgactcgacttttcgtctgtagctggtgctccttgcatacctatcgtcgtgagtactgaattcgatatatgacaattgtgagattcgaatattctcttttgaacagtcattccaactttccttctcgtggctgtggcttctcggtggaaaccgcatattgcttttgcgcttgtgtcaagtctcgtgcttgtgagactcgaagctagcgttgtttatcttctcttctattgtgaatattctatcatcttcgagcttgtcacctgacaggaatccgatattatttcgtcttctctccacgttgctgctcccctgctttgtgtgaatggcgcctggatagcgtgtttctgaccaaaagatatgatgaacgttcacataacaaaacctttggtagtagactgtttaaaaaatgaatcctgtgggcgggcatgttacgtttaccacgagttgggctgcaaacggcgagtgtcggtgatgtcattcttccccccacagtgtgctcccacatacccacaaaacacgtgaccccgaacaatctccccgcatccaatccaaacgattcacgggcgactcgaagcctcccttcgtccgagaaagcttcgtcccatcgagtgtccatggtccaacgcggtacggaagatcctgcatatggcccaattgctagtttgccattctttgaaaagagtgacgccgagtggacgacattggtttcttggacgtctaagcaaattctaagttgccgccatttctgctgaccagacatcatttctacttgactgattctttcacttgcagtcctgcatcaattacagtgtactctgccacagaacttaagcctctagtgccgtttctccgcgcatgatacctacagagtagaagtctccgcgtgacatattgccaccacccgctctacgatcactactctcatatctccgcgcctcaaggcaaatcaaattatataatcttcagcccgatctaatcttcgaactcatccacaatctcacctttgggattcgatattcttctgcttataccccataccgagcgaactccgaacctagctctctcgcttggcactcggct

SEQ ID NO: 2124 - DNA, 3025 bp, Emericella nidulans
gagcgagtgatcttcaatctattttcttcttggagactagcatactgtatatcttctatacccttcatatactgtggatacccagcttcatctctactcgcaatgatcttcaaatacgtcgtacggttatctgaccagtaaccactgtttctgtcacatcgtcgtcgcggatggcaggcctacactaacgaactggagtaagcaatatacctaataatggccagcaactccaggttattgtttcataccgataaggacatttaatcttactgagcacctattatagggccctgatgggtgctcttgaactctgcgtagagtgcatttatttaggatacatctgaataccctgagttcaggccgctatctcaggttgagtttttttaccttgtgcatgtgccacacctggcaagcccgctaccgggtagctaacgtaaggtcaccaaaaagttacctgccgaaaatattagggaccgatgttgtaaccgaactatgttactggagtaagcgtggaatttgacaagaaggggctgaagttatatgcgtcaatggtggcctggagtattgtccgtagtgatagaaaaggaacgtgtctcagagctggattggttagggaagaatacctgttcttggcatagtccagcggcagaacgtatcttgcagctatttgcgaagtagctgttggtgttggacttcggcatggtcatgagaagtccaactacggtcgctatggacgagtcgctgcaccgaatgcacaagacaaacttgcctttctgcccagctgacatcttctggacatagagccaggttacgctctctgcgcatccttcttggagaatacacctccagccgacagccaataatgcacatagcttagggtactgacctcgagcagcttccgcgagatgccaccatcgcggaaacgcacttgatgcgtgcgccacagccaaaactctctttggtttggcaggatcttgctgtcgccctcctgttaagcaatactagaagtgtctttcattgatgtcggcttcatatcatcccgccggagtcatgataaggactaaccaaacggttcctgctgagactgatacatcggcatgactgagtatatgtacgtgtttttgtgagctgcgtgaggttaccgattgggtttgcaccgcacatagcaatatgacctttgaagagggcatatatgcctggtacggtgagtccggcctccgcaaaagtattatggtgccttcgagcttctgaaagtgtgctaggaagttgtcccacgacgttggcaggctctcagactacgaatgcggaacgactgttttcatcctgagcatcggcaaatagagccgctgcaatgcgcccgtgaacattcgcatcatagatcaaccccggatagtcccacaacgtcccatccaaagcccgcgcacccgtccattcctgaaatgtcgcgtaatcctctgcatcaaatggccctgtttttggctcattgatatacaccagctccggctgaaactgaaggactgatgtggaccgagcggcagtttgcatggtaaccatcagttttcccagaaagctctgctcccagtttcctcggtcaacatgctgggtaaccatcctgctctcccaaaagtcccacggatgtgtaatttctagaggaccatcgccttgaaggatgagcacacgttgcagatggctaaatgtctttgcaaagtctagtgactgtactgctcgatcggtatacagagactccatcttggaaggacaagtgaaagccagatgcgtgagatttgagctctgccgcagcgtctcccaccaacaagtggtcaaaggctgggttgcacaaggccagacgacggacccgcgaccacataagcgtcactcctaacgaccaggcagagatgtccaagcggttaagccaggtgtgcctgtaaggtgcagtgccgagaccatctcgcaaatagcagaactcctctacggcctcaaggcgcaaaatcgcgccgtacacgacattctgagccctacgattttcggtatcgttgaaaatcagatgccgcagtggcagatcaataatgaggcagcggacgttggtgctgaagagggataaaaggctgtcgatttgtcggtctgttgagtttaggctgatggttactggtgaggggaaggcgaggaatagggacctcgcccgcgttcctttgtctacacccgcagggccgtagcggccgaacctgtacagttggctctggttgaggacattttcaattcgcttgccagagttcaggtagagacagtgagtgaagaggagctcgcgggccagaggataggttagcttgcaggtgaggctgaggctgaggagagtgcgggtgacaatgtggccaggaggcaggatgcgtgacttgaacggaatgagggcctctatgacaagcaggatcaattcgggagggagttgcattatgcctctgatcgtgggtaggaatattgacgaaaggttaggagttcatacagagctgacacacagatggcgctagccctgaatttgactatcacatgaccaggctagggcactgagaggaaattatcctagtatgagatcattcctaaatgtatatagggggattgatagatacatacccatatggaaagtcagttcagcaggatacttgctacactgtcttttcaccgactgaattgtgccgccattcggagtttaagctagcccaatgtccttctggctaaagcctgatcaaccaacggacctgatgcgcagtgtcttatgctgagcatatccgtaatatttcttctactgaacggcttattgaagacaagatcgggtaagctgaacccttacataggctccttcagcaaaattttttggaattcaagggggagggcactggctttatgccaacttcgatcacggcctcgggcaaccccttcaatcccccggttggatagggcctgtgaaccaactccgcggttttcaagaggtgtcttaacagtggtttcccctaaccatgtgtttcccccccct

SEQ ID NO: 2125 - DNA, 1664 bp, Emericella nidulans
gcgtccatcaacaattttggattcggcggtacgaatgcacatcttatcgtcgagagtcaagcggctcagccgttgccctggcaagcagatggatatggcgcatcagctactaacctcgactctcagatcttcgtcttcagtgcgcgcgataagcaggcctgtgttaatatggttaacaacctgaagaaatatctcagacaaaatgccgcgacggatagccccgattttcttctccagagagttgcatacacgctgggccagcgccgtacccggttcccgtgggtaaccgctcgtcctgtgcctgttcaaaatggctttcgcgaacgtattcaagccctcgaggtcaacatgccagttccgcgccgtaccaccgggatcccacgcattgggatggtttttaccggccagggagcccagtggtatgcaatgggccgtgaactgattgcggcctatccggtctttaaagcctcactcaaggaaaccgatcggcatctcgcagcattaggagcgaggtggtctgttatagaggagctgaatcaggacataccggcgtcgcgcgttcacgacgtcgaatatagtactccattatgtgtggccgtgcagatttccctagtccgacttctgcgatcatggggcgtcaagccggtggctgtcactagccattccagtggagagatagctgctgcgtacgcagttggcgccctcggctgtcaagacgctatggctgtcgcctatcaccgtgctttgctcgcaacaagaagtagcctaggctcgaaacaggaaactatgcttgtggtaggcatgagccttgaagaaacagaaacttatcttgcacgaatcgacgctttgatttgtattgccacagtggcttgcgtgaacggcccgtcaagtatcaccgtctcaggcgatcaagacgctgtaaatgccctcgaagcgctggcaagaaacgacggcatcttcacccatcgtctgaagatacatactgctttccactcccatcacatgaatccgattgcagatctgtatcgcagcgctttacaaggagctctatcaccaaatcacgataaagtcgagagtgacatcacattctcttctcctgtcactggacgccgtatcaccaacctctcgcagctgtctgagcccgaccactgggttgacagcttgctcaaaccggtccagtttgttgatgcattcaccgacatggttcttggcgcttctggtgcatctagcgccaatgtcgacttgattctcgaagttggtcctcatactgctttgggcgcgcccattaagcagatccttgcagaaccaaaatttgccgggttagatatctcttgtctaggctctctggtccgagaggtcagtgcagtcaggagcatgcactcgctggctgctagcctagttgcagaagggcttcctctggatctggacgcagttaatttccctcatggacggccccccagcgtacgagctctttcagaccttccctcatatccctggaatcatcaaacgcgccactggtacgaatcaaggttcaacaagggcctccgcgaacggcacagccaccacatgaccttctaggcagccttgtattgggaaccgatccgaacagtcctacctggcgccacatcctgaagctcacaggacgcccctgtggttcgcgaaca

SEQ ID NO: 2126 - DNA, 1211 bp, Emericella nidulans
cattcggtgaactgcatcgccttggcaattgttgcggacagaaatacgtatcgaaccttatctggatagttgaataatggtctcttcccaaacaacacctcgcgctatgtcccgtatttagtgactgtactcttgcgaccttttgacacacttactagcatctcgcatgtaatgaatctcgtcgaagacaacccaggcgacttcgcgcatgatctcggagccgcgatacaacatagaccgcagaatctcggtcgtcataaccaagcaagtagcagtagggttgattgtcacatcacccgtcattagaccaacgtcgccaaattccgctgcaaactcccggtatttctgattactcagggctttgataggacttgtatagatgaccctctgattgttcttcaaactctgagcaatagcatattccgcgaccaccgtctttcccgcactggtatgagccgataccagcacactttctcctctctgaatcgacgagacagcaacctgctggaatggatcgagcgtaaacggccatactctcgcggggttctccggaggtttgtgttgagagattggaacgtaaggatacttcggcggaatggcgacttgatgccggacctggtgggacaagaccactgggcctgcttctttctcagcttgaagccctgcagatcctgcaatctcgcgctcttgcgcagtttcgaacaagtctgcgacaacgggttccggctcttcttctaatcgcaatcgctttgtctctggctgattgttgttatccgagcctgaagacttctcttccttgttttcttgttccgcgacatcgggagcgatattctccttgggttttgcattttccccgttttccttcacatcgccgtttatctggcgcttcttgctcttctctttcttcggtcgtctgggttcagagagctgggccgcttggggcttatcctcgaagacatcgaaaagctcatccattgttgagcaggatctagaaccacagggcgcaaataactcgagcagccgcggtggtcgggtttctgctatgtttcttcccaccgactggagcgaccaagaaatttcatgtcccgttcggggaaggtgccgcaatcgaacgaccgccggagaaactgatcggagaaactatcctcttgtaatagctggttatcacgtgactaatttggctccatcttcatcctacatttcccgcatgg

SEQ ID NO: 2127 - DNA, 2121 bp, Emericella nidulans
aacaactatgctaacactatcaataaaggcaggggagcattgctcttatccgttgttggcggcaagttgtccgagggtatcaacttctcagacaaattagggagaggtgtcttaatcgtcggtctcccgtttcccaatatacgtagcccggtttggcaagccaaaatcaaatacattgagcaaaaggcttaccgaaacgtcggatctggctccgaagaaagtcggcgattgtctgccaaagccgccgggagagatttttacgagaatgcttgtatgcgggctgtgaaccaatgtattgggcgagctattaggcaccgcaacgactatgcggccatcgtccttattgacaagcgatatgggaaaactagcatcgaagccaagctgcccggatggatcaaacaaagcctagtgaaagactccgctcttttgccagcagcgacaacgttagatgggcttgcgtgtttcttccgcagcaaaaaccactgcgggtagaatcatcatgagagggaaaagtggaaaactttacacgggtatctaccttggctctataattatccatctgttccacatcacatagtctagaatctagatcgacgttacgaaaatggctatctaatatcacgtgataatgccgagcattttcagggctaactcgcttgcttgcccttagcgcacactctagccggggaaagcccttgaattcacctccgagccagatgaacactccgaccgcatccctatcgccaaccgccaacacttgtcgaacacagcaccgtcgacaagatgcctacccgtctctctaagacaaggaagcagtgagtcgccagctccctatttttattttgccccctttcgaattggtccgacgatgcggcgagaagtggaaatcgatgaaattcgcgacaagtctccgctggaatcacgaacattaccgccagaatgagcacagggactgacatatatcgtttttttcctagccgcggtcatgtatccgccggttacggtcgtatcggaaagcaccgtaagcaccccggtggtcgtggtatggccggtggtcagcaccaccatcgcaccaacctcgacaagtaccaccctggttacttcggtaaggtcggtatgaggtacttccacaagacccagcaacagttctggaagcccacaatcaacgtcgacaaggtacgttctggcagcacatgaaatggagtatcggtagtcgcggatggaatttgcagaacacttcgacggtgaatctttacgaggttctatcgttggatgggttcaggcattgtccaaaagcggctccgaaccgcgtcacttggtgttcaaagctgatggtcctactttattagctgtggtccctcgttcccgccgagcagcgtgatgcctacattagcggccagaagaccgacactgcccccgtcattgaccttctctccctcggttactccaaggttctcggcaagggccgtcttcctgaagtccccatcgttgttcgcgcccggtacgtcagccgtgatgctgagcagaagatcaaggaggctggtggtgttgtcgagctagttgcatagattatcatgaagggaaaacgtctttttgtcttggaggcgcaacgcaaaagctaaagccggtgctgcgctgataatgggccggcgaagatagacgagtgtcatattctaaggcctcgactatgggagccgcggatcggtcagacggatccgtgtatctacaaaacaagggttcaattttttttctctttgtgtttgtgatgatcataacctccggacgctcttaacgatcacatttaccaataaaataccttgagagaacttctactagtttctcacgcagccactcaacgccctccaactgggtgcttggctatcaaaaaaaaatgctagcaatcaagttaaagatcgtttccgccaacaaacatcttttcgtactattccatatctggaattgataatcccaaagtagaggtacactggagtctcttgagttcctggaataacgtactgtgggtgcggaaggctgatggggtaacttcatcctcggcagatgcgtcgtaggatccggccaacctccactcactactaccgagagcaggtgcaagtacatatg

SEQ ID NO: 2128 - DNA, 1646 bp, Emericella nidulans
cttcttacgagcgcgtgcagccctatcttcgtctccctcgtcgaattttccgctcgcgaagtcgttctcattttcaacgtaaaagtcaaatgtcgcttcatccataaacgcaacaactctgccgattgagccgttcacgagagtatcctccatatttttgatgagcatgacttgcgaacccttcttcaggtggatcgtttgaggtgccatgcagtttgagagtaacttttcacgaaattgaatgtcttgaatagtccccgaatcgaccgcattaaaagtcatcgtttcacccgaaagacgtgccatccttgcagaattggcattgtctacttcggcgcgcgtgggaaatctgtacgaaatgttagtctagaaaggcggatattagagggcccgtacagttcagtagcctcaagagcgtcgtgaaagtccaatggacgagaaagctccttaaaagcctgtatcgtccgaggactaagtttcccaagtcgcatctcattcagcatgtcggcaaactcgggatcacgctgacggaaaacgtgtgtcaaaaggatagtgtgttgtattgaggtattccagctcgctgcagcaaatgaaaacttggcttctcgattatgaccctctggaactggcggtaattgaaagaagtctcccgtaacgacgagctgaataccaccaaacggccggccattgtttcttattagccgagcaatctcttcgagcttatcgaacaaatccccgtctaccatagaaacctcatcaatgaccaggactttcgtgcgcaaccagcggtttcttgccttttggttcttcttaatctgcggatggtcagagacatgaaatcaatgaatccaatagatccgacctttttgaccagctcaggtacaggttctttacctaagccaatgcccgcgaaactatgtaaggtgacaccttcaatattacatgcagcaaggccagtagacgctgtgactgcgatgcggtccggttctttcctgtacttatcccgtaatttcttgatgatttctctcatgaggactgatttaccagttcctgctgaacctgtaaaaaatatactctgccctttctcaacaactgctttcaagacatgcttctgctcatcactgagaaatataggagccacttgggcacggggcatatggtgtttggtgcttgattgtgttttctgggcttgcgctttcttattctgacggcgaagttccttctgctcttccttgattgcgctggctgttttattccacggagccgttgcagctggccgcgcgggtgtctctggttttgcctcatcatctatcgtaatgatattattctcttgcttccgccagggaacggttcgaggcgcggcgggcttttgaaagtgggaggggggcgaggaagaccagggcagtgcgctgctcgacggcccgggattgtcatcgggcggaacaggcggaagatcaggatacttgatgtctgattcgtaattagtcttcgaaactgtcacggccgattgcgagtccgccttgtgggataatgttgagttggatttcgcggcgtgaaacgattcttcgcggaaactgtctttctcgattctcgcgggagggatgtatggatctggtgattcaaagtccaagtcatcatcatcgtcg

SEQ ID NO: 2129 - DNA, 2848 bp, Emericella nidulans
tagatgtgtgaacgaacatcacgatgtttcgtttgagttgtccgacttgatagctctgccattaagaagcatcgggacccagaaagctttcgaaaggagttggagaacttcttgtccaatccttggttcactgcaaatggaggacttccaagctgccggcaaaaaggttgctgcgtatgctcatcttctggcgttggtggtccaggacaaggagatgtacaacgctacactagacgagctaaaggagtgtttcacaacgttccttcagttcatcgcggtaccctcggagaagactcctgatgaatcatttccctgggtaggacatgtgttgcttgttctcgagaaactactctctgatgatgctcaaccaccccaaatcaactgggccttacctgataactcggatcccagctcgatagacgatgggccggcccagttgcaggagcctctcatatccaacgaggagaaaatgcaactgtttgaagttctcgtcgaagtgcttcctagaattggaaaggacgacactctggctctctcagtgtgtcggatcctggtcatcctcaccagaattcgcagtattgccgttcgactcggtgagaaacgtaatttgcaacgattatttgtcatggtcaagcagctttcgagctccacaaatgataagcttcaaggcgctttcatgcttatcttgaggcatattattgaagacgaagataccatccggcagatcatgaggagtgaaatcgttgccaacttcgaatcaaaatctcattcacggccaatcgacactacggggtatgtcaggcaaatgtatcatttggtgctcagatcgccagaaatttttgtcgaagtctccaacgaaaagctcaaactcttgcggtacgacagccgacaacgtcctcagcacctcacgttgaagtctgagaagaagactgaagcgggcgcgaaacccagcggttctgccgagcagaagcctgacaatgcacaaactgacaaagagaagggaaaggccgctgagttgaaaactcctgtcgtggagaagccagatggggtcatccactatcttctttccgaactcctgtcttacaaggatgttgatgataaggaaccatcaggggacaatctagaaacctctgccgttgagcaatcggagactccgactcagactgatgttgagatgtcaactgacgaacctgctccttccgtttcgagcaccgagctccagggctcgcggaatcccaagaagtcagagaagcccgcattccaagcagatgatcatcccatctacatttatcgatgcttcttgcttcaatgcttgacggaactgctttcgtcctacaaccaaaccaaggttgaattcatcaacttctctcgcaaggcggatcccttggtaaccacgccctccaagcctcgctccgggattctgaactatcttctcaatgccctcgtgcctgttggcacgatggagcacgatgaatccgttgcctttaaaaaacgcagtaacacctctgcttggacaatgcgtgtcctggttgcattgtgcaccaagacaggtgaaatcggtggtcacggaaggcgccgcaatgatcagaattctaacgaagaagacgaacctgagctagccttcgtgcgaaggttcgttctggaacatgctctaaaagcgtacaaggaagcaaatgcttccaatgaagcactagatgcaaagtattctcggttgatgtcacttgcggacctatttgacaagatgctcagcggctatgcgtttgtctcaggagacactgctttcccatcctccaccaggcaaatcgctaaaactatgttcgagaagcatttcatttctgctctcactgcatctgttgccgaaattgacctgaacttcccatcctctaagcgggttatcaagtacatcttacgcccattgaacaagcttacccagactgctgtgctcttaagcgagacttctgacatttcgaccattgggggatcagaggatgacgaaatctcatccgctacctctgtgtctgacatggaagatgagcgtgaagaaacccctgacctcttccgccactctaccctgggtatgttggaacctcgccacgaagaggaaacaagttcggaggagtcagaagaagaagacgatgaaatgtatgatgatgaatacccagacgaaatggactacgaagaagagatggcggaagacgacggggaagtgatcagcgatgaagaagatgagattgaaggcgttggccctattgaaggccttcctggcgataacggaatggacattgaggttgttatcgatgatgaggatgacgatgaagacgacgaagatgatgaagacgaagacgacgacgaagacgaggatgacgatcactccgaaatggacgacgatgaaatcctcgcgggcgagatcactggtgacagagataatgaaagccttgatgagggtgatgaggacgaatgggaaagcgaagagatgtcagaagacgatgatgaagccgacattatgaaccagctcgaggacgaactagcggatatcagacacacggatcagcggcatgacgggggacgccttgaagacattttccgtgcgttgaatgaggccgctggtggcgttgaagacctccaggcggatagcttgggagatttgcatgatgacattgccgatgacgagctgaacgaagatgatggttcgtatatcctcttcgccgcagtttactccactgctaacatacgtaacagaagacgaagaaattgatgagctagaggaagagcttgatgaagcagatgaagaccaaggttcttaccatggatttgacgacgatgaagactcattgatcattggggatgg

SEQ ID NO: 2130 - DNA, 2216 bp, Emericella nidulans
atcttgctgcttcctaccatgctcttgtgatttaacaccgtcctatacgcagattagtttttctccacacaactgtcttgcgactcatgtcttaccggcacccccgtcggctcaaaactctccaccaaccgactctcatagatgagatttggattcccacggctctggctaagcttcatctgcccaaaaccagttttatccttgtattggtctaccgtcttcccgggcaaaccaccaccattcgtcgacacccccagatgcttcctcttctcgtccacactccgtcgtacatactcaagatacggcgggttcccgggcttgatcacattatccgcggctaaaacggagccaggagtgatcagtttcaattcctcgcagagcttcaggtcagtcgtgtatgcaggcttatagtggtctagaaacagcaggccgatatgcgttagtgcggctgattcgtagagacgcgcgatcgatacatcgcttggtccaataaccactttcacgacatccgataaccctgccaggtcgacgagggccataatcaccgccgcgaattcggggttcatttctaaactgtaataccgacttccaccggcggcgcgaactgcggccccgaaaaggatgctggagtaaccgacatagccgcctagttcaacctgaatgcgaccatttattagctctcttgatctagggatcgataccgcggactaaccgggacataccattgtctttggtttcacctccgcaatcaagtcacacacgatcctccccttatcctcaccgacattcatcaggtactttcttgtccgagcatactcgtcgatggcgtcaaggacactctccggcgatcctcgaatgctgtccagtttggggtgcgagtaaacaaaatgaaggagctcgatttcacggccatcgttgaaaaatgtggttccttcttgtgctgcataggccttagaggggtcaaatgcccccctttttactgtttgagatactgcttctggcatcgtgcaaatattggtgctgtagggttgtatgggatatcgaagccctaatgttctggcaacaggagagaccccaagcgtcccaacagtgatatgaagcgataagatcaggaactcagggggagatctgcaatggtcaggtgctgcttgcgtaatgctgaaaatgttcttgctgatcttgactgctacacttggttatagctgcaaccggatgtcaaatggtagagaccacttgctgttcctcaccaatcacaccagccacacagaataaaatgcaatgatgagacaggctctaaccttgcgggaagtctccatgtaccactgccgtcatgtccggcttcgatggccattgggagttgccggtgtataattccgggtcgggagggccggaaccaaccacgtaccaagatcgaaagtgcgcttaaaatattgagggaaataagtcgttgacgttccttgagaccctctatgaatgctactgttcacatgggcgattaagcttgatcctagcgcacgccatcgaccgcatgcggcgatccggctgttcccctcccgaaggttctccacgttagcttgacgtgtagccctaactcttgctcaatgacctccaggccacatccaatcttggacatctctggtgaagtagacttgtccaatctaatctcgacccttttcactttttgttcttcccctttttttccgcgggcaactagctgtcaccatgtcagacctcaaagctaggcgtctccgaaaccgccaatggcttccacgtcgaggggtacgagaagattgaatacgatttcacattcctcgatggcgtctttgagaccaagaacgcgcagctggcacaactctatgagcgctggggtcggtgcctcgccatcatggacaagaatatttacgacctctacggcgacgacatgaaacgctactttgaccaccacgaggtaaagctgcagatccatcaaacaatgattggcgagaaggccaagtcgctagagacatttacaagcattgttgatgtgatgaatgatttcggcatcatgcggaaggagcctgttctcgtcgttgtacgtcgcatgcttgcccatctaccttcagctcaagactaacctaccgcagggcggaggactcgttactgatgttgctgggtattgaatatctttgttcgcttatatgaaactgaattgttgatgattgaatatacagatttgc

SEQ ID NO: 2131 - DNA, 1089 bp, Emericella nidulans
ggagactctggaggcgcagcttgctgctctgactttaggtttacaaggagtgctagcgtctcgagatctgaggagcatcgtcagtatccagatgataccagatcttcaggcgaagggctgaggcccagcacaggttcaggttcaggctccggctcgaacgcaagcataagcacaatcacagactcacccgaaacccagggtgcagtcatgcatttcttcatccagggaccgggtcggtacgaagataaagtcgaggggaactatctaggcccatcatctggccttgcaatcgccgagaatatcagtcgtatagtccaggacgccgtgtggaagtccatccccgtgaatgagacgcacgagtttcaggcgccctgtgagaatgagaccaccggcccagcctcagcaccggacgacgcaatgggagcgcgtatccttgaggcgtatttcaagagtatgcagatgcgtttaccattcctgtgccgagccgagatttacgagttgcacgctagacgctatgagccagttggcccgagtacagcagagcaatttgcccgattcaagatctttatggtctacgcgattggcgcggccatactcaggatgacagagatgtatgactcgacgccacctaggaattactttgttacggccatgcagtatcagcctgctatccagggatcgctctccatctcgagcatcgaagctctaatgctcctcgccatgtacaatctgcagtcatccgctagctcgagcgtgtggtacatgatgggtctggcgacacgaatatgcgtcgatttcggactgcacagggaggtccagtatcggcggctcagtccgtacgaggcacagcgacgccggaggctcttctggagtgtatacctgaatgagcgctccgtcgcgtggtcgttaggtcgaccgttcagcattggcgatgaggagatcgacgcagagcccccggctgatattgacgattcgctaccagaaagtgcagacgaagattcattccgaacacccaaagaccggggcgagctgtggacgggcccgaatatccggtgtttcattgcgtgcatcaagccaaaaaggatatca

SEQ ID NO: 2132 - DNA, 1296 bp, Emericella nidulans
ttcagtctaaagtcagtcctgctgcccaccggcgtggcatatattggttctgtaacttttcttgcccaatcactgattgactctgtttcaagctgtttgtttagatacagtttatgagatggccatcaccgggtcccgtagcaagtaggacaaccttgccacccttccacagccgaacgaccttgcactgcacggcgtgcggtcacccggcttttgtccacaaacagcgtacccactaaccctttccgctcccctttttcctccttccactttttgccggccctacgagaagagaagcacggcggagataccatagcagaaaaccagattgcccaggtgccttttatggcccttccctaaacgcagacaaacctccgaatccgaccagccggatccggtggcgataagtgccagcgctaggccggtctgctggtatgtcaggtagtagctcgcgaggattatcagggtgccaagggacatgttgcggccgccgatggcgggaccgaatgctgccatctgctgactggcgatggtttttgggaggccgaaaatctggaaggctgttcacgttgatgtcagtacaggtcggccagtcaatgaatcacagcaagcagaagaaaggactacaatacccaaattatggttgacgaaccagaatggaccggttatcacggccaaggaggctatgaagcgcgcgaggtagagggcaacggtttggataagcatgatgtaactacagattggcgtcggacagaacggacagggctcggctgtgctcggtttaatgcgaggtattaacgaagttgatatgtggtatgtggtatggtaagtcgtggggacggcgtgcacctttttaaagcaggcttgattctagtctcgagcatgccgttgttggaatcctgtgtttcttataggagttgactggccgagctccttgctcttgaactcatgctcatttgcttgctgtctcagatacagactcacagcagtaataaaggatatgtgctacgtctgggcttagactattggtgaatggatttaatttgaagcaatcatgcatgaatattatcagcaactgaaccaaggctgtaaagtcattaccacttggagtggcgggaggaactgttgcgctcccaaatacctatcgtgcatataatcccggccaaggttttatcaagcgtagctgcaggagccctgcgcagggtgcagtgccgttgcccacaatgggaccaaaatattcccggcagtaccaagactggagtctagcctaagctcgcagtgctgcccagctgtcat

SEQ ID NO: 2133 - DNA, 2481 bp, Emericella nidulans
tttcccacgactcgcgtggctcgagaacattctcagctcgccaatcattgctcccattcgtttgctgaacaagcgcttcggacttgccggtggcttttttaatcagtttgatggtcaggtcgatttgctggatgatcttgatgaccattacacggcgcgtcagcacaagcgggagcgcagaattttcatccagcgcctacaggacttttccaaggctcactccatccgtgttacgattttaggtggtgatgtgcacttagcggctattggacgattttattcgaatcccaagctgggcgttcacagcgagaacgaccctcggtacatggtcaacatcgttagcagcgccattactaacaagccgcctccgaaagcagttgcgaatctgctcgcgcgacgaaacaagattcatcacctagacacagatactgatgagacgctgatggactttttcgacggtcagcctggcggagtagacaagagcgcctcctggaacaaagtcactatgccatctcgcaactacgcctgcattaccgaaattgaaacacccgctgctaacggtgatggggcgcagcaaaatggtgtgactctcccaatccccaaggacggccattcccctctgcatacgggcgagtcaacggctggctccgctcactcagcagcggacggtgtcagcagcgcgagcactctccatggtggcttgaacgtcgcaattcgcgtggagattaacccccagaacagagacggcgcagctcatggttatgggtttagcagtatgttgcctaataacacaagcatcttgcccatgacactgtaatgcgatagagctaaccttgacgcagttcccgccttatcatatgtccaaacagaagacgacgctcgaccacgaccgcaatcacgctcccgctcgctccatgcggcagcggcatctatccgctcgcattccaaccagcgtgaagcccgtcccaggacctcgacctagtcggatagagacaacaaaagaaaagactatatatgtacctgctatcctaacacaaactgttgttgctatgtatacccagttatattgtggtttcgttctgttttgttgttgattgatatccatttgttgtataatgtgtctggtcttatatctctgtctcttgtcttgctcatgtgaaaatggtcatttattcattcatgggtcgacaattatactattcatgaccaagcagtcgacgtggcgatcagctttatgtattattatgggtataatgaaaattttgcttgactgcacacttgcaaggggttatgagaatattcccctggtggattaagtactcggcacgctagactagttgatatcacctatttgacggcttccgccacttctcatgtcatcgtaaattatggaagagatgagtcgccaagctttcgacaaattaatacgtagacaggcaggaagcaggaatcagttgcagggtaggtatctttaagtcacgagtaaggttggtcaggactcgccaacgtaacagttggatctcgatcttttgcagccgcaagatcgatgctgtatccccttcgttgtctcggaacaccctcgttcggttgtggtcgcggcggtgtgccctgcagcagggaatcagaccctgtggttgaagtcgtcgttgctaccagcggcgccgcggactgtcccacggccagactcagagcctcggctgctggcttccgcctccgaacgacctggtagcccttgtcaagctcgatctcaatagcgcatcggaccttcaatgcggagatggcaggccagacgccacgttcgcctttcagtatccagtgtgctaaactggtatggtctgggttttgaaagagtttggaaaatcgcggagtccgagatctggaatgagggttaggtgggaaccagggattgtctcttcgatgagaagtcttgctaagggtactggcagcgcgccgatatagttgagctggcggagcggtgcctgatctcgagggcaacgagacgagttaaagaacgggttatattccagcggcttgtcgtgggtctgcgatcgaggaagttgagctctgagcggaaaaaagggattatgtacggacgtgtttgcgagattatgaagtggtttacattgaaaagctcagcgattcggtagagcggggattccccttcttcgtagtgggtgtgacgccagggtctgaaaaccgcatcttggctgtgtggccaggggacgattgagcctgtctcatctttgcagaagatcgtaacaggaggatagagagagttgttggtggcattggaggcgactgcagcggaccaaatcagctgtggtttcggtgtcagtacagcatcttgtatggtcctgatcgactaaacgtaccacattcggtgcagtcaagtaattgagtaaatttggtgttccactccggcctgatattgctactgtaatgtttaggatgcgtttggacctagcataagcttcctcaaat

SEQ ID NO: 2134 - DNA, 3417 bp, Emericella nidulans
cacccaagcaactccatagcccaactgaaccccagcataagaaacgtcacctagttgaacctctataaatacaaaaaccaatctgattcgcgccctccctatatcgccaactggttcgacatgctcctcgttctggccccaccgatacccccggcaccgtttcttctggcccttccatctccatccccagtcctatgaacaccgtcagaccgcagcccttccggcctccccataagaacatcctgattcaacatcttctcgtggattccgccgcgtccatgatgtactccctgcgcaacaaggcgctccctccgcacccgatctttctcctcctcggcgcgttcgatacctattatccgttcatagcgcatgttagactggaggttcgagataaagcctaaaataaagaacaactcaagacaagcgcacgcagggaacaaagactagaggttaggtaaagcgagggatcacgcacccctccagataacagcgtaaactcccatgatcaccagcgaagcgagaaggaagccgaagaggataccgagctcgcgagcaatagggacggacgacgaggggacctccggggggatattgttgtgcgcgttgatgattgtgtttgtgcttgtggacattctatcgcaagatcgttgaaggctttctttatcggcttctgctgagcttgcagatcggaatgagctgggcgcttgtctgatggacgatgaggtgagacgagaggagaggatagttaatttcgaagtagattctatcatggactagctattcattcagtgaaggaaaaacaaaaaatcaactgactagtgtgtgtagtcgtgtagcgagttcccttactatccagagaaatctaagatagaaaatactcgaaggagactaacaattaattagacaacctaagactaagtacaatcctcaaatgaacgtcttgccgttgccccatcccatgtcatgtcacagggtcgctgaggcagtgaggtgaggctgtactctggcctcgtacctcgtggtgtcaccagccagtcgggtactcgttcttactggccactgcatacgagcgagtctctgctccctgcttacgaaggtattctgagccgcgccaaaccttgtagatgctcaaagacaaagaggtgtcggcagggttaccttaaatccaagacttggtaggctgggtccgcggattggtggaatatgggttggggtcgaagtagacgtgctctatacctaggcccataactaagtatgcaagagaattttccgcgcggagatggggatgggctttcgtcatgcccagcaggccatgacaggccatgacatctgtgtagagacgtgcgctggcctaccctgctaaaaactgcattgagagaatacctccaacaggtttgagaatcaactgaaggtctggtcttgcatctttgacgtgtccgtccactgagccatgcccgccgatatcatttacacgtacataaaaccgtcagcaatccttctatacacggccttgggtatttgtaggtagcaacttggcaggtaggtatgtatgcaagcattaacactgcaggggaaggtctgcagaaacgaagcgaaacgagaaagtcatgaaagcctcccagtattagcgtagtcgtatgtaactggctgataaatgcgcgctggatgcaagacgctcatgcagcaaagagaagaagaccaaaaaaattgcggtgtccctggggacgaagaatcaaaaaggaagcgatagcaatgcataactccagatgcagatgcaaccgatgacttgtcgaaaggaaagaaaagcatagggaggcgttggtcgtcgaatccggtccagaacgagggattaccccagcatcacggccgccatggttgtgcaggtcagcccaatggccattccaatccacggagtctgtcccagtgtgccttcgctccgcttggtcaactcggtcgatgatctccgtgtccgtagcgaaagagccgtccttctgagaagagggatggctatcgtgtctggttttgcttgtgtatccgcgacttgtaggtggagcatctgctgcgtctctgactggatgtgcggtacgtcttcgggggtcgtttgcacgtccgatagaggtcttgacggggtgccattctgcagtgatgggcttggagcgacggcgtgcggcactgggtccgccgcaacgagggcagccgtgggggcgaggcagaaaagaagtgtggagggcttcattgtgataataaacaggcgatgggcggaggttgagtcgaccttgactatgcgtattgcgggaacatcaataggggttgcgatggctcggtgattattgtcgcacacttggacggctctaatcgcgcgatctagggcggctcaagagataaataataaaaatattaatgagccgtgtgctgagcggagtcggcgagggcgagacccggttgaaacgagtggcaggtcaacctctccggtctcctgagaaaacagctatcgagcgactagagcggcaagttgaacggtcgaaccactgacgcgccaacacaacaatcacaatgttgagacaaaggccaacagcaacatgcgttaggcgcaagaaaatagcctgagctgcatgagaagatccaacacgttcagcttctgcaagggagagtaaactgcacaagtgcagctggaggtggaaattgggatggagaaagccaaggcaaaggggcaggaaaagtcccttggtccctgggtctcatagtgggatggtacctgcaatgtacagctgttgattggccatccagctattgtgaggctagcgtgggccgatcgctgtctcgtgcaaccgtccgaagcttgtcggccaacgagacagcgccggctgaatcttggcggttaatcgcaaccaataatcatagggcggcacagggcgccccatcctgtgtgacgcaattagcaccaatcagacagggctcactataaatatcaagatcaaggatgtataatgcttatgattatagcagagcaccaaggctgtatcagtcgcgtagtacgtagtcctctattttttcatttatgacgacattacatctaatctacttgaatatcccatccagcgggttacaaagcacttgaccggcatcacagtatcttgctccaatctggggtcacagtaaacttgccgcttagttgtcccatagcccagaccttgtgctcatcgtcaggcatctcctctgtcacattcggcggcgttgacacgatcagcgcttcctgcagaaaatcaactgccgttgcgcggtccagttcgaagctgatcccgccccagtccatggtcacccggccggaagcgtgcacattgagcttaccggcttgtccggccttaagctgccagtccgctgccgtgacaaccttggaatgactacgataaaatagtg

SEQ ID NO: 2135 - DNA, 1799 bp, Emericella nidulans
gtatctcatcgcggtggcaaggtggcgaaccaggcgttgatctgcgattcgaactcaagcgccattggaatcagcggcggacgttggcccatgttgacgagtcttctcgataaaaagcattcaggaccctgttgccaatgcgtcggagcgcgacttccgttaggtaatagtaccagctctgttcttcattgaagagacgtgatatgtgattatatacggcttgacctggcacgaggtctgggggctcaggggccgaagcgggctcatcacgaacatcccagtctgaaatgtggttttgaccttgacgtgttgggtattcttctgaaagagtcggaggcgtggggaagagagctgggtactcatattcggcaatcgcagactgcggcagaggcagttcaacgcggatttcgacctctgatttgaagcaggaccagtacagactctgctctaagcgttgtgcaacgggcggttgctgttcagcttcgtagacggatcggtcgaggccttcgatcagcctcagtcgcaaacggtagaacgtcgaggcctggtagaagtggttccaagctgggagggggcgaaatgtgtacatgaggtagactgtgagcgtgagttcagctcggccttgtccttgtctggggctgacatacccccggcgaagaaatggcattcggccccaatgaccgaatagttcaatagcccgatccttttccgggccatcatgaaaaacgcctcgccctcgcgcagtctccccaaagaactcgacgtagaggcacgcctaccccatcccaggccatgtccttgcctggaagaagtaaatggctgcgaaatacaacccaacgcacaggccaggagtacaaggcacgactgagcatcccactggagcccgtactcgccagcatgcctggcggaccgaacgagtgcttccagatccaggatcgggttcttcgtgtggacattctgaatgaactgatccaccagtgctgggatctgttcatctggcgtgatccgaaacccacctgtgtctgggtgggcgctctggacggactgatgctcgacgcctccgtccgaggagtactggaagagcgtcgtgataagcgaattgtctcggaactggccgccgaaaatcggccaggtgagcacggcatcagcgctgcatcggcaggcggggatctgcaggtagtcctgctgccattcctgtgctcttttggggacgcgctcgggccgctgtaattgtacggcaggcgcagagtcccgaggagccagcggcgtgttgttcctggagatcaagaggtgctggatattctctactgtctcggtcagggtgtcgagccgttcaaagactttggccagttccctgcaggtgccagattcagtatgggtcacgagacgcatggatcgagtaggctgacatactgctgaccaaccgtacgctcatcgccgcgcgcagtgtaaacacaagggatctcgttagcgtggcagtacccacaagctggctggccattatcacagcggatcttccgtcgtcgacatgtttggcatggccggcttgcgccgcggcccattggtccttgcttttttgctagggggaggctggtcgtcttccacgcgactttctgatctttgagaagctgaatcgaggtctggatccatttgtcgttaacggagtggtgtgagatctgggcacgtcgaaaggagaccgggggagctggagactgggagaagaaattgtggagaagacagtctacggataactccacgtgatacttccgaaagaggaaggaggtttcactatctattat

SEQ ID NO: 2136 - DNA, 1613 bp, Emericella nidulans
tcccacctctatcagtagtattcgccagatatatctcggatgagccttactctctaaacacttaagcccttccattctgttacccaaccaagctcgtcgtaaaaaagacgtagacggtgcaaccaaacataaaccacaaaatcgaaagagacacctagagcacacgctcatttattatcactatcatgtgcctcattaatccttttccagacctcggcctccacttcagcaagcttgttccccgcgctgtgcagccacgattttgtgctttcccagaggcccccttcaccttcaccgccatcagtatgtgtacctaaatttgagctagtggcagtggcgctgtgcagaggaagggtggtggaggtagatgccgagggaggagtgtagaccgaggcgtagggtgttgttgttgagttgggaactggaccttgatattgggactggtaactgtagccagagcttgagcttggccctgatgtgtagctataagaactagctgtcgttgttgccctagctgtttgaggttgagctggatatatgcctccggtagaggacgtcgaggttgaggtaggagctgtttcgcctggggggaacgcaggtgcactggttatgatagcaggtgcagggttagggtttgaagaaggcggtacttcatgtgttcgtgtttgtaaagctggtgcaggcgtgcgcacagcgccgctcttcggtgcaggtgccggcactggaggagatgaatggtcctcaattccagctttgggttcatcttctgtagcttgcttttgctgatccttcgggatggaagctatgctactggttgggtcagggacgggcacagcacctggctgcggtggtggcggagatgcagaggcagacgtagcagtaagagattccggtggtggaatggtggttgtcgggtcatctgggatgtctggcgtaggagcctcgaggactgtcatgctggtgggtttggctgtcgcataaagaggagaataagatggtgctgttgcagtagaggcggaggctgtgcctgtggaggcagatggctcagatagcaatgtattcttctcgtcaatgtccatcggcgaagagctggaactgactttgttagtagacatgatgctgttagggtcttgatattgtagttctgactctgggcagtatatggtacgtagatggtttaggatctacgacgtcattatggtactgcacgtgatcgacaaaacacgtgtctacagcgaggagatttacggagaatcaggcgaagtaacaaaaaaaaaatacagttggcaaaaaggaaaaagcttgcaggcagtaaagtacaactggtacaagagaaaatgtcacactttgtatgctttacgcatacctctaaaagatccccttcatcattcacctcttgagttttatcccagaaagtgaccgaccccttccccaaaaggtttacaccaacaaaacagtcattttgggcgagacgcttatttgaacttcttgccgaagaggatgagctggactgggtcttaatggacaggacaccagcaccagcgacaccacgatggatgttagcaccagcacctttgagaggggacttgacaccttacggcgatgatctgcgg

SEQ ID NO: 2137 - DNA, 2375 bp, Emericella nidulans
gtgcattaaaagctcgaggttgcattcagcaccgttctgactgaaagtggaattgcgatggttctgccagtctgctaattttttcggtgggcgccagcgatccctcgccaatacccagacgctgggaacctgggaggcgaatatgctcccagctccatgaagatcttcccgaccgcgcacgctccagtcgccatccagagcagtggccatctcgaaaataaattacctctacgtggactattgctatggacgagaaagccggcgagcaattgtctgcagcggacggcggcacatttcccaactatgtgcggtgctccgttgccggatcctgatatgacgatgcgcagtgatctagttcacctagttcatctagtaagcgtacctgtctcaaagggcatcctagtgtctggtacgtctggatcccccgttccagaaccagcagaaccggcaagccaggccctcgactcgaaactagggcagctcccttgcccttttctgggtcgtagggtcttgtcggtcgagaaaggtctacgtaggcgtaataaaactcgaacatgcgatcgagatggaagaatggcattcgttcagtaatgctccgtataataagtagaatattaatccccggaaaaggactcgtccagtggatgtcgtgtgctgccttcagttcgcagcgacgctcccagactcagtctcgttggccctccacccaccgctccatccccatcatccacttctgcatgccatcctttcccatcttcctcatctagttgtgaacctggactctgaccatcctccgctgagccctgctttgtgccaaccctgagggggcccaagttccctgtcagcttgtggttgaccactggaattgactggttggctggcgtctgtctcgtgcttttcaacctttcaccctttcttacatctcccttccccctctcatcgaccacaaccttctcgacttctccttcgaacactgctttcctttccagacgttctcctacgtcgtacggaatataccacgaacctaccctgcatccgatctgccgactgtattctttgccactgggctgctgcggcctgcgcgctactcgaaccccaggctcccgtgctattttgggatcatcgtcatccccagccccgggtttccctgcgcgtcagcggcggtgacgagactgttaccggccagcgactttgctttatcactgaaccctcgattatattctaccgccggattttaatcataccgtgcccaagatggttactgggaagccgggtgaaccgttccagtcgcttccgccgacagcgcctcagcgcgaaacctcccccgcctctccgccgtcgagacgagaccttacaacatggtggaggcagttcaagagaaactctagaaaggaggagccgaaaggtacgtgcggacacaaacgttggagagagagagtacttcaggcggcgggatgggtgtagtgaatgcgacaagctagttcttaagaacccaattattgttcgcttcactgctctctaatctctttactcctatcatgccgtctttctggagacgacattgcgcttgagtttgatctccctatgaggcaccttcgtactgacaattgcgttcagagaaagcccagcagggcatttttggtatcccactcaaggttagcatcaagtatgccaacgtcgctatctctctcacaaacgacaatggcgagagttttatctatggctacgtgcctatagtggttgcaaagtgtggagtgttcttgaaggagaaagggacggaattcccattttctggtgtcgctcggtcggcgctgacctttatgctctattagcgaccgatgtcgagggaatttttcgtctaaacgggtctgcgaagcggcttaaggatctacaggagatttttgactccccggagcgatatggccaaggcctggaatggactggatatcctgcgcatgatggctgtcaatgttcttcgacgataccttaacccagttgcccgaaccaatcgtccgttagagttcttcgaggcgattcacagaggccttggcgcaattcaaattgcaggcccaggagaaaggacctttcctgactcggaggccctctagctgccaaagccgctgggcttcccacatcttaccaggagcttccgccttaaaaagagttccggtctcaatctcatctcctgctgcttgcctaacttgtcaaccggtacctttgtatgtcttcatttttacgctttctctcatcatcacattcgctcgatcatatacatccctcagttttctccttcaacaccctcccttgtttcttctccaccggtacacctctatcctgtttacccccctcttcaaccacttctctctctccgttcc

SEQ ID NO: 2138 - DNA, 2071 bp, Emericella nidulans
gagacgctgaggccggactgcgtgcctgatggatcagggggagggggtttttcggatgggtgcgaggttgcttcgatatctgttgatgccgagtgagggggtaagatgggatcggagagtctcttcgttgagcctaggtccagcaagttcaagagccggcgggtggcctgcacggcgcgagacacatcaggagccaaagcaaacatctggccccagagctgagacgagacgagcagggccagctgaacaatgaagaactgtgtctgggtgtagtgaccagcgataatctgcttcgcaccccaccagtatgcaagcgcatagacgaagttgctgaggccgtaaccgacggcgagccagaggttggtgaaggcggattgccctgttatctcgcgcatggggccctgcagggagcggcggtaggtggaaagaacttcggactcaatggccagcgcgtggacggtcttaatggatgtcacggcttcgacggttatgcccagggagcgggcgaaggcgtcattgtggcgctcctcaaagcgggctaaggttgagacacgcatgaacccagcgcccaagagaagtggcacgacggagagacaaacgagtgcaattctccaggcaatgatgtgggtcataataatggcggcgaagaggttgacgaggatgctgaggattgtgcaaatgacggatcccgtgaggccattgagcgcgttgctgtccttgacaatgagtgataggaggccggagggtgtgcgcgcttcatgccattccagcttctgctcgagaatggaacgtagagagagcacgcggactttatatatgagctgctccgcgatccagccgaagagggaccagctgatgaggtttgcgaaaaactcaatcagagccaggacgaagaacatgagcccccagaattctcccgcgtggcggatggattctgctgtctcgcacgagcttagcttgcccacaacgttaccgaatatgacagcagaaccgcagtatgtgcctccgatgacgacggcaccgatgatggctacaaggagggctagcgagtacggacggaagagagaggcaatggccttagaggtagaaccgacagagcgctcggtagtaactggttcttcgtctgctggcttctctttaggggatggagtggagctttcgtcgtcttgtaccgatgttacctctgcattcctttctttctcaagcgccgtactgtccagtgacggccgagcagacgaagacgcactctcctgcgaggcattgacattgagattctgcaaccttaccagctctgcatacgctccatctgccgcaagaagttctgcatgagagccctgctcaatgagctttccctgtctcatcacaataatgttatccgccttcttgatggtcgagagccgatgggctatagtgactagagtgcgtccagcagccgccgcctccaacgcccgttgcacgcgtaattccgtagcggaatccagagatgcggtggcttcatcaaggataaggatttgggggcttttgaccaaggctcgggcgatcgagatacgctgcttctggcccccactgatgaggttcccgcttgatccgaccattgttgcgtagccgtggtcgagcttgttgatgaagttgcttgcgtctgctaggccagctgctgtttcgaccaaggacacaatctcgcggatctggtctttgttgctgggttgcaagtcaatggcgtggttgagactcaagcctttttcccgaatagcagtggcaatatcctccaaggcactgctcttcagcacatccatcaaatgcacatgtgctgaggagttcaccagtccaagagcaatattctccagtatcgaccgatcgagcagacaaggttcctgctggacaagactaatagcactgcgcagaaaccgcacattcagctcgcgcacgtcatggcccccaatcgtcacctgcccttcctcagcatcatagaaccgcgtgatcaagcccgcgacagttgacttgccgctgccactcagctccgacaagcgccgtctgcttgcctgccgggatgcgcagcgtcagatcctgcagg

SEQ ID NO: 2139 - DNA, 3588 bp, Emericella nidulans
ggcggctgcgatcgattacaaaggggtatgctatttggtatctatcttctggatgccgaacaaggtggctaacaatctacaggtcctggtcaaagtagtgaccaaggatggcgtgagggtggaggactttgacaataaccgaatcgtcaaaagtgcttagtatatgataacaagcattttatgttttccggtatcatttccgacattttgggcctggggtttctgaaatgattgcttgcatttgactccggtgtagtctttcggccgaggatggctgctaggtagacaataaatgaaatgacatgacacgtattcagagccaaaaatgtctatataattaatccaaaaaacgcgggatggttttgctaaagcttcaagtgagctccgctgtcgagcaatgatgcaagacgaactgtgtttgtcctgtttgcatgcgtccctgggtcttccgccgtgaggttttccataacgtcctcgtctctaccgccttcgttttgctattccccggaggagtcatgatgaccaaaagacaggcggagctgtcgctagagcaagaagctgcggtcggctctccagcctctaaaaaggcgcgcacggagagtgacaaccagcaggaagatgacccgcgtcatggagcactacccttgcgccgagcaccaggacaagagatggaggacgatgaacaccgcggaatgaatatccttgcagctgcggatcaagagggagaggagcttcaagaagcagcgcaggtagatgagccggaggacgacgaagatgaggacgacgaccggcctgcaattgtggccccccaacgccaaagtgctccgatggaaggatacagcgatctctacctagatacgatcaatcgccacatcctcgactttgacttcgagaaattgtgctccgtgagtttatcaaatatcaacgtgtacgcttgccttgtgtgtgggaaatactttcagggcaggggtcctaagtcctacgcgtacttccatgccctggaagtttcacatcatgtctttataaacatgggaacgaagaaggtctacgtcttgcccgaaggatatgaggtgaaaaataagagcttggatgatattaaatacgtcgtcgacccatactacaccaaggacgaggtcgcaaaactggacaaagtagtcacagatgcattcgacttgtcggggagacgctatcgaccaggtatatcgctccctattcctgcgattcctcagataaagctaattgatgtatctacaggctttgttggtatgaacaatatcaaggccaacgactatttgaacgtcgtggctcaggctcttgcccatgtccttcccatccgcaattactttctcctccacgagtttccacaaccaggtacacctcagctggtcctgcgttttggtacacttgtgcgcaagctctggaaccccaaggcttttcgttctcacgtgtcccctcacgaactcttgcaagaagtcgctttacgttcatccaagcggttcaccctcactcagcagtctgacccagtggaatttctatcctggtttttgaacaacctacatcttgcgcttggcggctcccgaaaaccatctaagacaccaaccagtgttgttcacgctgcttttcaaggtcatctccgaattgaaagccaggcaatcacagcacactcagatacccagaacgcccgcctggtcttcaccgaatccggtaccattaacagtcaaacgacccccttcctcattctcaccctagacctccccccaacacccctattccaatccgcgaacagggaatctatcatccctcaagtacccctcaccactctcctgaacaaatacaatggcattaccgcctccgagaaactcgcccaccgtgtccgccaccgcctcctccacccgctccccccttatctcatgttccacatcaagcgattcagcaagaacagatttgtctcagagcgcaacccaaccatcgtcactttcccgtccccgcgctcgcttgacatgtcgccctacgtagaacccaacccagagatctggcctccgggcgagccgatcctatacgacctgttagcaaacatcatcctcgaccccatgattaccgctcccgggggaacggaggacgctgctgaaaagggcgtcaatgcagcgtcgggcggcggcgcctcgtccagcggtgccggtgcggggactgagaaggtctcgtggctcgtccagctgcatgataaagccatggctgctgagaataccagtatccagaatgagcagcatagcggggaacagcgcggtccggagtggctagagatccaggacttgtttgttaagcgcgccgagagtgagacgcttttcaccaaggaagggtatcttatggtttgggagcgaaggagggttccgggaatgaaaaagaaggggaaaactgctccgaagtgaattttgttcttgggtctaaagcgtcctcagctagctagcttttgtatgtatcattaaatatgagatatcatgatattgttcagaagagaatatacccaaatttacactgtactgagttggcaattgtaatcagttaggaaaacagactagaacagtgcattagtattacaaatgcgacatctggtatcgtacatgccgttccgtttcagtacatgaaccctttcagaatgcaccccatccgcaccatttcctcccaattctaatcgcagtccccgagataattccccaaacggaagcatttacggcagcctggatccccatcatgagtgtaagtttacccaaataggcgagtgtatgggattgagagcgtccaccaccccaagttcccaagggataaacatcggaccggagaacggctggagctcctttataggcaaggtatgatcttgcaagggaacggaggtaaaatgactcgaggggcgcgaaaagggccgcggtgatcatggctgctaaatgagaggccagcgagtccactggcagagaggagaggatggttactctatgggatgggatgaaggctgttgttgcggcggtatcgctagctgagttttggcgggcagcggaatcagctaagtgtggaggaaattcggagtctgcgtcggcggcagcgtcgtcgtctcggttgggtagttggttgttatcggcgtcgacggctaattcctctacgtccgatgggttattggtcgggcctgaaaccgtcggctcaagagaggaggcagcggcgttttgacctgtcggcacgccatttggttggtggccagaggcagtggctgttatggtttccccatgactggggtgtaccgcatcagtcatatcaacagcgttatatgtagcttcggagtcgagcattgttgttatgtgtccgccctggtcagatagaatcgtatcaaggagatccggaattgagtgactacccgccggtcctgcaccggcattttgtagttcgacatcgctgtctctaatagcattcctgtcatgtgtctgacggctttccagctccagttgcatggcaatgacatccgactcctggacaaactgtgcgcgaacccgaggagatgattgggaagacacaggcgactgagacctggagagaagtgtatct

SEQ ID NO: 2140 - DNA, 2972 bp, Emericella nidulans
  unsure (1)..(2972): unsure at all n locations
cccgggcgtatcggagacccaatccttcagcaccaccttcgctgcttgagtcgtcccagacaaattcctcgtcatcggagccgggtctgtattttctgtagatcgctgttgcatcgacctcctcgttgtcccaagatagctcctcgtccggatagtcatttgcaggattattctccgctattaaagcagtcccattagcttcaggcatccgcatcaaactagaaggtaactcaccgttagaggccccatcttcgctatcccacttatcctcggcatcctcatccttcgcaaagtcgtcccagtacattttatcctccggcgtaatgaccataacgccaacattctgaccactgctatcgatcccatggtggcgcaaccatgtttcttggtctaattcaatactagctaggggggccctaaagcccttgcctgggagcccattaccgatggaggtgtcgtaaacctaatcctcatcactttcaccaccggctttgtgcttccattgatggatgacccctctcaggttctggcgctggcggtgcggttcgatgcttgttaggaacccgcggctgatgtttcagcggaggcttaggcaccgcagggcgagtcggagagggggcggcgtattgattcgaacttgttggctctgcctccatttccccgtctagctctagtgcgattcgctcgaactggcttgccaatctgtccgattcctcctcccaattactctggcgagcctgcgcttccttctcaagcacttgggaaatatgatctttagcagcagaaattgccttttgccgctccgctcgccacttcttctcggcttgatttaccaccggccgctttcgaggacgagaaggcgtctcttcttgggccagggacatagcaatgtctgctcgagcggctgcatctgcaaccagagaagctcgcctggaatgtggctcacgccgcagcttttccaccaagacaaccacggcactatctgctctgcgtttctggacgcctccgcctgtagtacgtagagggctcatgggcgtgccacttcgtgaaatctggaatcgacgtatcgagggagtacctcgttcggttgaagcagaagatactaccccttcgcgggttggcgccgaatcgctcttatgtgatatagttgtggtagcttcagtctctggctttagcgaacccggcgaaccatgtagagcatttgccagtttatcctcagcctgcttgcgggcagccgcaattctcttttgttcacgaagttctgcccctggtgacgttgctctcaccataggcacgacgggcccactggcggtgtttgtagtcttgggctgatgaagactgctcacggagcgaggagttcgaatgaccctctgcggcccagagtgcgataggtgagcagagctagttccatgggcattataaccgttattaccgttcacagtgactcgttggaaaacaaagtctgtaaaccgacgcttggtctgatgcagatcagactggatatctgagcccaaatcagtcttacagaattacagtaacgggcttacaagaatgcgcctgtttataaaccgtgattttctcgctgttcaggaaacgggcgagaaagcacttacataatgtgtctaccggttcttcctctcggcgccgtttgatgctgatttgttcgggtggcaaagacatttcgagtcagtaagcagttcagcccagtcagatagacgcaatgaacataaaggatgttaggaaggcgaagatagacgatggcggtggtgctgaacattgtcgttactgaaacgcggcttggggttcttccgttccgcaacttcttcaatgggcttaaacacctgcttgcagtctggaatacttccatagcatattgctcacaaaccataactcagaagcactgtgacaacacaggcgaatccaggtttaactttactatggttgctatagcacacaattatataatcagacctctaatgtcgttgatattgtatttctgctctataccacctcttctccccaatggctcacaatctcatttcgttcttaatgattaccctcggaagtactcgagcttccctccaccatcatgcgttaggaatgctgtaatcccggattatttctgacatcacatatgcaataagagaccgagacatagaaacagaccagagccataccagtccatggtgtagccaagatcccattctcagaggcaaagagaattaagcaaaattgtaaaagtcaagaacaaatgagaaaacagagaaatgaagggggaaatgtatcatatccagctagcaatacatgtgaatggtataagcaaagggaattaaaacattaataatggggttgatctggaatgtgatactgacatcaaaagggcaaaagcaagacgaaaccaatacagtagaaacgaagcagaatgaaggatattccagtttcaggatgtttcaggatgcagaaaggatcaaccgtagcagatgaagataatgggaagggaagaaatattcaaaaactggcgtgcttatttggccccaatctcctcttctgcccagccaggcaatgagttctcgttatgaatggccaacccgaagccggagtggttgagccctccaagagcagagttgaagcccgagaagctgctctgagggtgatgggacgctccagaacgacctgggccaggttgaccagaaataggaccaaatggctcttgagagaatgatggtaagctcacagcccgcgaatgctgagcacggggaacgctgaggctgctagtgcttgcagtggcatggtgaccggagctggcggacgtgttgctgatgttgaggaaaccgttcgtagatggcttgtgctgatgcaagggagcatcgatactaccattggtgagttcgctagtggttccgttataaagggattgttgatggtgatggctgggttggggctgagattgtagaccngtcagtgtaagggaa

SEQ ID NO: 2141 - DNA, 1503 bp, Emericella nidulans
gtagactctcgctagccccatcgacgtctctcttggctttttcttccaattttgggcttgaggcttgagcttccggccattggactgcggttcgactctggcctgacggcgccgtgatatttaatcttactatatcttactatagggatcggaccagatctctcctgtactttgttcgactcccaactcgcaccccatccgccgttccgagtccaggcggttgcggttgcgggcttgcagtgctgttcctgcggctccagctcgtcccctcatgcctgtcagtggtagcagagtcggcgtcactgtgggcgtcgatgggggcgtcattgtcaaaagtgccacgaccgtcaactgtcaattgtcaataatgtcaatcgcaatcgtccgcgtctccacaacgtcgattttgccagtcatttgccagtccatttgccattggaattgccgttttcagtccccgtctcatcaacagcggcgacctggcggaagagactgacggtttccgcgagcttggaaaactgaagagaagaggcctgagctcagtgcggtggcgccaaccgatcgtttactacgtccgatattattcccagtcttggaggtaactataactgccatattattatttctataattatttgactccgatcagatcagcctagtatgaaatcgcattctgacactgacccggccggccagaataatgggaaaaaaaactttggccgcgatggcgggctagccctctgtctggccttagcacgacccgctgctaattgactggaaacgaattggatcaattgcataatttagaatatgaaacggcacagagattagttcgactccgactaaagagcaagttaacgatttgttcgcgtcgtgcgcggccgccacgtcgctggataagtttcccacatcgttcgcggccaatatccgttcgcatccagagcgtgcgtgcggacaaaatctcacgggcgtctgctgtatgtactccgtacaattatacatagaacatcatcttgggtagcatatgcccaataatgaaatacgccaaccggcttgcttcccggcgatcgaccctgcgatgcgggtgtggacaagggtcagggtatgggtgagtttctcgtgcgagacgccttggtagtctgggagacataccacgaggaaccgcgagaaatacttctaatggacctttgttggttaggtgaagtttaccgagttagatggactgttggatggactggagatccactgctagacggactgttggatggactctttgagacgatgagatctggggaaaccttccaggccaagcactattgaggggcagttcgtattatcagatgcaaaatcagtaaacagttacgataggctctagactagtcgcgaccatgtctctagttaactacacctacggacgactcagacaccaaagggagtctagtttacccatatattgcggacagcctgtcccgtctcgaagtcgcaatagcggtcagttggcac

SEQ ID NO: 2142 - DNA, 2991 bp, Emericella nidulans
gatcgacgggtatgttatatgcgtttgcgttcgttttcgaagacacttggattaatcatttctcatgtttgtcacagagcccgtattccagcctacagtcgacactttcaagggattcgaccaaggacaacatcacaatatgggtcccatggccttggaccctgaagatgaaccaaggaggggtacgtcgagagcgaatagcgttcgatttgatgaaagtgccatacacgggtattacgggcaggccaatcgttctagtagtgagcttccgataagaaccggaagcgggatgggaagccttcctcttactgagcgatctttatcacatcgctcggacggaaggcagagctcgtcaggatattctcatcattcagcccgaaccaatagcctgggtttagagacaaccaacaggataatgggctcaatgctgagcgattcgcctctcatacctccgccaggcctgtttctactaggccccgttccagctattatccggtgctggatgaccacaaatttctcgaatgattcacttctttacgcggctgcctgcagtggatcgtatagatctctgttgagccacgcgatggttcgaaagctgggttttgaggaacagctggtacaagacgttgactcgcagtatatcaagcttccaatgtatcttccagaagccagtgtgcatcaggcttcatcacgccctagtagtcctgccccccaggtccccaccttgacaatccgtttccttgttcaacatgttagcacagatgatacttcggtccagatcatccttgggagtgatgtccttcgtgcccataatgctgacatcctgttttcgcaagacaagattattatggtggacgacgaaaggaacaaggtatctattcctttggtacggcccgagaatgactctgttttcaaacacctacacactgcatcgagacatatgaccccatcaggagatatatctcgaacgtcgcttgatttgacgagtgaacgtgttgacatagaaaacccacccgccgttggtgtaatcgggaagcgtactcgcgtttcgcaagaggctcatccggcctcttctcccagtcgagactttgcgtccgagtttgcgaatagtcgagcagcagaatcaccggatgattcaaggaatggcaaagatgatagcccgcaggttccggccaaaactggcatatcaaccgacacacaaggagacagtgttgtgaaggtgcagcccgctggtgtatggggctcatggaagcgcgacacaaagactgacgcgaatgccgctggagcagggaagccctcccgtccacgtccgatgaaggttctccggccctcaaaagctacgaatcgaagtgtttcggccactgggccacctggtgcttccagcagcgaggcgacagggcctccatcatcacatcctgcatcaacaatgacctcgcctgaaagtcgaacggggaaaccactcacccccaacccgattggaggtgcttcggccttcccatggctgaatgcgtcctgatttttcggatttcaagtatgccctgattggaatatatcagagtacaacacctgtgacgacccggccaccgtgacgactttcattgattactcgcacctagcgtaagcaaaagttttggatgaggacgctctgtcgatgtcgtctgattacgttttcataacgtgtaatagcaggcatcttagcatattaatacatacaggcggacacacgtccccaaacagatcttactttaaatctttgaaagtttctctaatgcctccttagtctcttccttggtctccttcacaagccccgcaatggccttgaagtgctggtgattcgcatcccctaaaatctcaaataaaatactctcactggttgtcacaatcgctcccgcatcccgcaaccttgcaagcgcaatccccctctcctccgcgttgatactgcttacaccgtcaacaagaacatacactcgatgcccgcgctccagcagatcgagtgttgtctgcgtcacacaaatgtgtgtctcaatgccgacaatgatcgcatccatcagggcttcacctttcttcggaacgggtagaagcccatctatctctggcgtgaccatcgagaatagcgtcttgtcaatatcggcgcggacattggggccatttaaaagttgctgaagaacgggaacagtggcgccaagtcttgcgcggttttgggtggtgacaaaaattggaatggagagggtgtttgctgcgcggagaagttttgttgtagttgttactctaagttgtgttaatcagagctgcccgacagcaaggggagggtatatatttcatgtcccggtacattttggggaattcatagatggccttttcgaacttctcttgcatatcgcagatactagttcaaagtataattagtaaagtgaatgggcgctaggaactaaagtccatcacaaataaggttgcgtacaagaccgctgggttgcctggattgttacgctgttagttgggttggtttcggattcatgagttgagggcgaacgtacggatacgacaggctcttgatatggcagccattgtattttcccgcatcaaaggaaaaataaatgctccccccaaaatgtggaaagatttcgttcaaaagaaggaatgtacgtcgagaagtaggagtaataaatgaattgaaagtcgggggcgtgcggccaagtagttgagtgcgtatcgtagaaaatagggccacataaagttactcgaagtgattcgggtcgaatttcggtcggtagatatggatgatgagtcatcgtggggactattgggcattgttcatcttgattaataaggaaagcatgatgcttggcaaaaacggtcggttccttttcttcatccgcgctcttctgttctcgtcttttttctcaccaccaatctcaactccccataccggcctcattcaaccccatcagctttggacattgattctcgtcaaacaacaatccggaagctgtt

SEQ ID NO: 2143 - DNA, 1472 bp, Emericella nidulans
ggataaatgggaccgcgcagaccagggaaaaggactggatgacgggcccgttgaagatccgcagttgcccgagtataacgccccggggcagcctgggggaagcggtggcgaggggggtgcggtggcgctgggatctgggctacgagtcaagctgggattgggcatggtagggctatggattgtttgtgagtttttctgatccgctggattgaatctcaggggcgccagctgcccttgacagtgacgggtctgctagaataaggtgcgcatacctactctaataccctgcacctacatgtacagggcaaggcggacaaacaccgggatgacctatgacttgcataaagaaaaatatagatgaatggacggaatgcacaaatatgaattaagttcaatgccagcaaggccatccatgcaatgcaatgcaatatgatagtatatactaggcggtctctatcagatagaccagccaaagcctaaccaactctaagcatcaagcacgagcgctttcagcttcgcgaaatccggcgttcccagccccgtcacaggatcccacccctccgtcgcgttccaacccgcatacgggattacggggctcccatttggcgatccgttaaaccggttgttcccgtcgcagccggtgctccctccatccacgatatcgttgagcccgttcaggccatcctggtagagccaagggttgaggaatcccagcacgggcaggcctgccttcagacgcacgtcgttgagcaacgccacgatgcccgcaaatacaggcgaactgcagctcgttccgtcgaagagaccgacacggcccttgtcgacgacagcgaagttctgcgcctgcgctgcgacgtccgggaaggcgcgtccgctgcggttgaagtactgcgcctgtgtgctaccgagtttgcgcaggtatgactcaaccgcggcgttctggtacgccgggcgcgcccagtagtcggagaacccgccgctggagaagtatacaccggattcgggcgctgtgccgttcgtgccgccgacggcggtcacccaggggcaagaggccgggaactgcggcgggaagtgcgtcgtgtttttgccatcgttggtctggcaggcggcgccgacgccagagtcacccgaggagaagagcacagacacgccgcgggaaccgagctgagcgtacaggttgcagacggagcgggcgtacggctcagggattgtctgctcgtcctcgccgtaggaggtcgagatgacctggggcaggtctttctgatcgagcttgaggacggcctcaaggaagtcaaggaaaggctcgttggtgttgtcattcgggtcgggggaggagaggtcaggaatgagcttgccgcggccaccggttgtgaactcggtcacaggtagcggcgacgagacgccgatgatgtactgcaggtcgaggttcgcctcgccgctgtcggccgtggagtcctggtcgttgaggccgc

SEQ ID NO: 2144 - DNA, 3271 bp, Emericella nidulans
taatgccgggttgatatctgctgccgccgagatgacgctcgcgtggggaggttgaggaactggggagtggtttgaactgcctgggcttccatcagccttgcgttttcgcgagtcactgttggaaatgggtttgaggtcttttgcggttagcgattccaccgtcccatatgacttgaaagagacgatgtagactgggttgctggacgagccggtgatggatgttatgcgggccgggtagaaagaattatcgcccgatacccagcgggcaagtacatgctcattcacggagaacgaagccgggccggagtttgtgttgtcatctgtctgctcggccgtcgaattgcgatagccgggtttcgaagcgttgtcatctctcgagccctttaattttgctggagcggtggttggttggggagttgcaggtctgagttcggcgattgatgtttcagtgaggtttataagttcttccagctcagctttgagactttgtaattccgtgttatctgggtctacctgcaaacttgattgaacggtttcaagctgcgccggttagttgcgctcgcgatagcgatcggcctgacctacctgaagcttgaactccttgacctcagcctccagggccgcgacgtctgtcatatcgatgtgagaaaggcacgagacacaagagctcgtgtgggtagagtagtttgctggtcgtgaactctgcagtctgcacgcgtgctggtcggatgagtctgaagttcagtcgtttgacgggtgagtcacgtgatctacagcgccacatggcccattattacagaaaacgggtcctctgttttctagagataatgtataaccagatcccatatgacagggaccaagtattgtacgagagaatgccctgcctacagaacaacggcgggtctatgtgagatgcttgtcaaccctgacccgatactaagcgaacccgaaaaaaactggttcctcctgcaataataatgcatgacgggtgaagcgaatagctctgtcggatggggtgacatccggagcgccctacgaaattcaaaccgcccgcctgggccggccgtatgcgcctatccagactaaaagcatcgacccgatgagtcagacctgaagccacaaataccgcatatcgaataggatcacgctcaccaaggatcctggtcctggaatgtccgcaattttttccaaagcgcaaagccttgatctgaaatggtcagcgaatgaagcaatgtcgtggattcctcattctggctcaaagcagcccactgattttcccgctctttcgtgggtgggctagtcacgggatcctgccgtgcatccgaaagatggggtctggaacttccaggttgattgataacttattaactgaatttgcggcgtaaacttgtagcgcagtgcctgtgcagggtatagactaggcagggctggagctgcagcctgcaagcgtagaataggacgcctgtgatgatggagcatcaggctgaatgatcgtcctagctgtctggatctaattctagggatcgaaacgagaattgagaaggtcgcagaatcgaccctcgtggctgatttctaagccgcaccatatggttttgcttcctaaaagcggcagtgggtgtgaattgagagtattggctccttcgggtcatagccaataagagcggtcaatttgggctgccgctctttcggccgccacccgtgactgctgccactgcatcgccatcccctcctctgctgcctctcgcctccacgtttctcaggcttcgtcatttcgtccgatactgatcagaagagtggctcttcgtttgtttcgctgttcagccaaccatcgacagctatctgatgcactagtctggtgtctctattctttttctgacctcatatctctccttgacccctcttgcctgcagtctcacttcttagcccggccacttcactcaaaaaagcgtcgattttttctttgttctgctgctcggcatcctcagcggctgagaacagatatcgcttcactttcttcttcgaatcgagtcgctccataccaattctcggtcgtccttgacggccgaatcgacgtcccaaaatcaccgggcggagcatttgcactgtcatagtcttagctggcactgcaatttggtctggccgtccacattgagccagcaaacgggtaggaagcccgactacaccaccaatacgcttgcaacctctcttccaggaccgaacctctatcttatcgtttccttccttaagagcttagtcaaactgtacattatagcatatccataatggccgactacaattctttgtaccaacacggtctttacctttcgcctgaccagcaggacctcctcttagccgctctttcgtcgaataatccgccctcgaagcagaaacaaaacgttcagaagccggagcttggtacgaatccgaccaatactccaggtcaagcttccacgggaagcttcaatacctctcctgcattcgacggttcccatcagttcgataatcttaactatgatgagagcccttttcttgacttcaaccccgaactagaatgggactttcccggatccgagaacctgattggcgaactacctgggagtgcaacatcagacgatcacgaggtcggtgagaaacgcaaggattcaaacagcaatggcgaggtgaacggaaagaaaaggagggagagtgatgacaagagtgatgataaaacgtcgaagaagccaggaagaaagcccctgacgtcagagcctacttcggtatgtactggcggtcactggtgatagacatgaccactaatggttcctgcagaaacgcaaggcacagaatcgtgctgcgcagagagcattccgtgagcgtaaggagaaacatttgaaggatctggaagcgaaagtggaggaactacagaaggcatctgacagtgccaaccaagaaaatggcctcctcaaagctcaggtagagcgtctgcaagttgaacttcgtgagtaccgcaagcgcctttcctgggtgacacaagggaacgcgctctcggctatcaactcatatccaggcaatgccaaccgcatgtctggactcaataataacgatttcatgttcgatttcccgaagtttggggatctccctggcggccgtattttcaatggttcagtggccaagaccaatcaaaacaagaaagacgacacccccatacccggcatcttacgacattctgccctacaggcggctaacggcagggcttcaagtttccgcttcacccaagacggtcacatcgaac

SEQ ID NO: 2145 - DNA, 1404 bp, Emericella nidulans
tcagtcagtacaaatcccacacacacacgaagctcgtatcttcaaaatcgaggcgaaaaggttgacgaaccgtgccgaggcgcttcgtacttccggtgactcctattcagacaaaatgtaattagcaattgtccattggagcaattttcgtttacttcgacatcaaaatactcacatcttgaccctgttgtcgttagttgtcgaggtggtgagtgagagtgtctatctccaggtttggccgcaagtccgattttgcaacgcttaacgagtgtgggcgccgtctaagcgaggagtcttggcacttagccctgtttagctagcgcacacctattgtagccttaggcatcaagtacgtgcccacctttgttaacgttcaaatttcccgccctccatttatgactgcagttcttcgtccatatctcgtgttcgtcttttctttcctaagacttactctccagctgcggttgtctgtgcaatttttactgacctatggtggaaacactcaatagctgaaaatgatgattttgcttgtattgggcgcttaaacacaatcatagtcccaatcgtacaatacaactttgggctgacctaagctaaactaccttaagggctaaaaaacagcaagtgtagatgccaccggagacagaaagctaaaacataagggggatcaaacacagttagagaaagaaatggtggaggtgtaagcgaaggtagattgttttctcgtaacaagggcatcattcagatcttcaattgtgactttgggtgtgatgttgcaacgtcctccgacatgatgtgcgtgagtgtgaagttttacgcagctgtttccgacttgccaacgccattgctgtttccattggcgctgcctgctgcgctgccatggggactacccttcgcagcagccttcttatcatcttcgccatcgtcatcgtaatcctcgtctacatccattttacgtgcagcaggctcgtgagctggagcttgttcagcccgggcatgttcctccttgacagatacttgaacctgaacttgagtagtaggaggaatagtggcaggcccgttagatggtgtgggagcgctctcagccatcggtggaagggtgccaccggaagcatgttgcggcatgtgctgaattgaggggagagttggagggtggtgagcggcttcggaaggatggtagccttcattggcccggcgttgatcctcacggcgaacgtcggaccgttgcatctcgcctggagaaggcaagcggctaggagatggaacgcgacggccgatctgctcatccagcctggagcggttttcttcacttgcaagcttcttgactggaccgtcagcctcccattcccgcccacgcttcatggccgaaccagggcggtcttcacggtcacgcgcagagcctca

SEQ ID NO: 2146 - DNA, 3357 bp, Emericella nidulans
  unsure (1)..(3357): unsure at all n locations
gatctaccgagcttcgtcttgatgacagtctagcgcaagctgctgacactcagcaaaagtggtgggcgggttgatacacggagttatccgccatgcagcgaaaacttctcggtacgcagaccagtaggtcatataaaggactgttatcctctctggggagcgaaactctcggcaagaggcaaaccatcagacacagcaagaaggcctgattttatgcagtactctctgactagtcataatcattataaggatgtctttctggacctttgcaccgaagcccaagaccccgttggggtatcatcgggtcctctcgccaaccgcgggcgtcaaagtgtcacctctgtgcttggggggcatgaactttggtgaaggatggtacgttgagttatacgccattggctgagcggatactaaatttatttgttcagggagcactttatgggaaagtgcagtaaagacgatgcatttgcgctgatggatgcgttttataatatgggtggcaatttcattgatacgtatgtgttctgaatcttctgcttcggggtaaaacgtgcacctgaccgtttatgtatagcgccaacaactatcaagaaggcgactctgaaaggtggattggagagtggatggagagtcgtgggaatcgggaccagattgtgtatgcacacccatcagctttgagaattctggcactaaacgaattggaaaatgcagtcttgcgaccaaatatacaactggttttcgtgaccagaatattgacaccgaacgaattcagtccaatttcgttggtaattcggtcaaatcactccagacttcggtcaaacacagcttgagaaatctgcgcaccgattacattgacctgctttatgtgcactggtgggacttcacatccggtgtcgaggaggtgatgcatggcttgaacgccctagtcacggcgggcaaggtcctgtacttgggcgtgtcagatacgcccgcctgggttgttgtcaaagcgaacgagtacgcccgcgctaacggcctgcggcccttctctgtctatcaagggctctggaatccgctgcgtcgcgacatggagagtgagattatcccaatgtgtagagaccagggcatgggtatagccccgtggggtcctcttgctcagggaaagctcaagactgccaaagctcggggagtaaaaggtggaggccgatcggacggggacatgacggaggatgagatccgcgtgtcggatgcccttgatgaagtcgcgaagagcagaaataccactctcgcggctgtggtatgtgtaactagtatctagatcctaacctgaagagaactgacaatcgcaggcccttgcatatctgctccacaagacaccatacgttttcccgatagtcgggcagaggaagatcgagcacctgaaagccaacgtgcaagctcttgagatcgagctgaccaaagaagatatggacaagatcgatgcggccgtaccgttcgatcctggtttcccaatgagcttcatcttccctggcaaatacgatttgacccttactgctgccgatgttcccttgacgcggaaggccggccatatcgatgcgccccctcaacagggaatagtgccccccaggaagatgtcccagatatagatagcttaggtcaatacctacagtcgctacctttcatgtccgcatggagcaaatatacaatcaattgttctccgagtaaacaccgagggttaatcatgtgactattgctgtaccgcaagccgaagacggcctagcgccgcctagctcccgaggtcttcgcctcggcaatcgtcggccgcatccatgcttgaattattctgacatcagcagcacgtccaagcagtacgtcgtacaaaggagaacgatttgacaagcctaattttttggaggagcccgcatacaagaggtatggctcccaagattgttctttgaggttccttctcttccaattttccttgcgaattgcgaagtctgaaccttcacctaatcggcgtttgtaggcagggtccgactgccccgccctccagaggaaatgtcgcccgcagacagcgagtccgcctacttcaacaactaccctccacccaaagccctttccaaacatgaatcgctcgccagatcgtttatagagtaccatgtcgaatccagtcggcgcgtagtactcgtcacctccggaggaacaacggttcctctcgaaaaccaaactgttcgcttcatcgacaacttctctgcaggaacgcgaggagcgacatccgctgaatacttcttggagcaggggtatgcagtaatcttcctgcaccgacagtttagtctgctgccctattcccggcattacagccactcgacgaattgcttcctggatttcatggacgaggcgtttccgagtgatgttagccgttcagatcatggtcctatcgtggtgcggaaggagtaccaggatgagatgcgcgacgtgcttcgaaagtacagatacgcgaaacagaacaatcttcttctgctgcttccattcacaacggtctccgagtaccttttcgaactgcgcatgctcgccaagtgcatgaacccgctcggtcctaatgcgctgttctacctcgccgcagcggttagtgactttttcatcccgcgcgaccgaatggcagagcataagatccaatcctccgaaataccaaaggagttccaaggtaacgatgaagctgtgggtgccgatgacctttacacgggcgggttcgaacagaagcaggagtcgagcaaaaagttggtcattaacctagacccggttcccaaattcctccatcaactcgtagatggctggtcaccggagggtagcatgatcgtgtcgttgaagctcgaaaccgatcccaatctcctcgtctataaggctcagacggcgctccagcggtacgcccaccacctagttattggaaatttgctttctaccagaaaatgggaggttgtcttcgtcacaccgaacccaccttatgagcgctggattcgagttcccaagtcgcgccggagtaagagcatctccggcgtcgaagaccaggtgggcaaggctgaggcagcgaatcggtcatcaggagaccagaccttggcggccccagtgggtgaagagccgtctaaggaagaaaaggacggagaaggcacgtcccgtgagggcacggagattgaaagcttgatcataccagagctagtcaaactgcattcggagatgatcgagaagttcaagcgatagtgaacattactcattctattttgtctagataccttgatatgcccagtatngtatcactagcaagctcatattcgctgtttttttttctcaagagaaattcgataccctacatagattcgtcac

SEQ ID NO: 2147 - DNA, 1782 bp, Emericella nidulans
ctcgacacctcctcgccatacgaccaaatctcattgtctgcgccggagcagtcggctggtcctctggtttgggttcccgatccccatgtagtcgcattacgggacagaatgtggcccattgaaaccaacggtaaacaactcgcggaaggcaggatcgtccgggtttccgccatggaagcccccaatgtctgtcgtccaccagggaattcctgcaatgcccatatttaggcccgccgagagctgattgcggaacgacgaccacgacgaggcgatgtcgccgctccagacgagagcgccgtatttctggcttcctgcccaggcgcagcggagcaggttgacgatgtttgtctgccctgcagtttgcatgccttcatagaaggctcgcgcatactccttgggataagtgtttccgatctgcatgttgctgcccgcgtggtagcggtagatatcaaagtcgtagatggagtattcgggttctgcctcatcaagccagaagatccggatgcctttatcgtagtagtgcgactttgccttactccagacgaaggatcttgcggcgggattcgtggcgtcaaagtgcgtgatgtcgccgtcgcattgcatggcgatgcggagaccgcggtcgtggcggatcaggaggcctttctcaagcatctcagggtagttctctgaagctgtttcgacggttggccagatggagaccatgagttcgacgttcatctcttgcagctcctttaccatggcatctaaaccgtcagtcctcgcttgctcactataaggaaaacctacctggatcaggccagaattcagggtcaaacttccactcgccctgatgtttccagtgaaagaaatcacacactataacatcaagaggaacctgccgccgcttgtactccctcgccacattcaacaactgttcctggttccagtaccgcagcttgcactgccagaacccaagcccatattctggcatcatcggcacataccctgtcacccgggcatacgcctcctcaagttctgcaggtgagtcacctgcaacaacccagtaatccaatgccttggtcgagtacgcttcgaaactcatcgtatttgtccccagcactgccctcccaatcgctgggttattccacagaaacccatatccacgcgatgatagcgcaaatggcacactagcttgagagtttcgatgcgcaagctcaatgtcactccctttcaaattcaggcctggctgctggtactggcccatcccgaagatcttctctttagcatcgagcgactcgaaacgcatggtgagatggaaatcgccgccgagaataggccgcagctcgcgggcttcaatctccaaggcgctgcatttcgggtccgtcgggtcgcgtcggtgccgggcgtactcttctagcagcttggtgcctttggagttgtaaatggtaagcttgccgcgtttggtcacgacgcctttaatcttgccgttgctgatcgttgcttctccgttcttgtcagagggaagctcaattgctgatctgtcactctgaggtctggatgaaagagcccagttctctgcgggcatggccgcgagcttggtggccctgacgcggagtgcattctcgctccagggctcgacccagagaagatggtcatcaaagcggaagacgagcttgtcactgtcggagtagagcattgttaggcttcgggagttgcaactgtggttgagacattctaaataatgaggcgcgcgggggaagataaataccgtttcaacagcaacagctcagcatctgctgc

SEQ ID NO: 2148 - DNA, 3945 bp, Emericella nidulans
tcatcctctctgacatcactgacaaacaaacagaaatgcaagcgtccaaaaatccccgaccaaaaccctccaattggcctcctcaatctttccacaccgtcctgatccgcaatctccaattattggagctcgaccaacttgaagactggcccggcattacaccacgcactctcttgcccacgtcccagaaccagcgccagcgcgtcaaagctattgaatggatcttgtttcgattggtcgcgctttgggatccagagacagctcgcgatgtaggtacagtcttccgctcataccgctgctcctgaagaacccgaggagctgatggattgatgcccaccacattagaaactccgtcctttcttcccgccactggagcctctgcaatctgtgaacctaagggctgccctctaccgcattctgtctgatctaaaaaagaatggagatctgggccgcgagaccatcctccgcaagtccatgctggacgactgcaagggcgagaaattcgacgagctcctagctgtcttctctactaacgtgctacggaggaaaatctcaacccgcaatccggcaatcgacttatcactgacctccggcctgacacggcaagaatacacgcgccttctaccgctgattcttgctcatcgggcatcgctgagtacactcagcgagcgccgagagcgtgttcgtgatacccatgagaagttctcgcagttgttggacagaaagaaggaggaactcgacacccggtccgcaattgacacccatgccatccgagtacgggacactgaaatagaggctcttgcccacgagacgagagctaattggcaaggaagcgtggaatgggttaacgttctactctacgggggtcttagtagcagccgagacgccttcttagagctcccatttgatagtgcctggtcccaagccatggcatctacagttgataaactccgcaccaccgcaacccgctctgatctgatactggatctcgagacccgagtctcgcgacagcgagcacgtctacaacattggtgtcggtactcagattcactcaagcgttcaggactggcatcaccagcaaagcctgcagccacaaacaagggccctcaattgatcttccgggaccaccagaacctcaccattgccagcatctccaaggcagtacggcaacctgttaaccgagggcctcctgacgtcgacgatcaaaacatcctgcactccctctcgacagcaatggagcgtataaatggcgtttcgagacagcgacagagctcgccgagccccatttccgggcttgagccagagcccgaaccgaagacatcaaggtcatatccacccatcgaaagacctgaagttatcgaaccacctaccggatccaacgcttccgactacattgacgaagagtcgctcaaaaagagacacagggaaatattcacgctcacagaacgcacccgcagatccatgtccttttttgaagggatccccgagagccctccacaagcggaaccaaaccccgtcaaagattccacaaattcaagtccagaagaagaaccacccagagaatcctacaccctagttgaacgcacccggaaatccatgtccctgcttcctccaccccgtgaccctccgcgtccaccacgacaatctcgcaaatcccgcgcctccttccccgtaaatcaattcgagacgcctccaaagccttcttacgatatcccgagccgcgcatcgaccccaagggatgagttattcgaggaacaggctgattacgcgagtgtattcaagtctaggccgcgtattgcgttaagtcctgttgcgtcgccagcagtgcatattaatccgattgaggactttgatcttagcgcggatgggaatttcgggcaaggccataccaaagacgatttgaatcacgctgcactagggtcgcctttgcgttcccgggggcgatggtgatattgattgtctgtttttagagcgtaatgaaaccatttaatacacgaaccacaagcctctagatatttagtaagtcctaccccgtaacaaaacgccaggcaaatatccatatctcctccaagaaacctgaactccgaactaagatttgatgaaaaattgcgtcctcccctaagtcttcctagaattccgcgtgcgtctgcgcttctgtggtggaggggatatatcctccgtatactcttccggtgatgattcctcttcaagaacaggagacccatctctgtacaatatcctcgggattcgtcgcacagggggttttctcatttgcgctagctgaccctcgtcattgctatcattgtttccatcgagaagaaatccaccgcctcggccgacgtctccggaaagcgactcattttcggaagagatattctggacccgtcgcacaggcggctgtctcacttcgatgatcagatcaccatcatcagcatgatcgtctccgaggaggaatccgccgccgcgatcagcttcttcttcttcttcctcttcatctacaaggcctgctgggtgttgttcttctgctggtgtctgagtgtggcctcgtgcgtgtgtcgatgccttccggctagcgaagggattatgcgcatcgggtagatggccctcctcatcctctgcgtattcctcctgcacacgctgcgcaattcggagcccgaacaagaacttacgccaggtcgcgagaatcttcgcttcagcttttcgcgcttccttgcgtcgtttttcctcgttatcagcgcgccatgcatccacaacgagatccttattctcggccgcgacaacaacgccctcgataacagggacggccatctggctgccgaattcaaaccccgtcacagcctcggcgtagtcgatgcctagtttcttgcaaatacgcgcggtaccggagaaggggatgtgtactgcacccttagggaccattcgcgggacgaagcagtcgatgttgccgtactcattttttggtataatgccatctacgatgggaggaggtatgatttcctgcgtttgttcaaaggagtaaagaccctgaaggggtttctggcctgtgcggcgggcttcttcgtcgacttcgcgcttacggaggagggtgacggcgcggatggggacgtgtttgaggggcttcgctgagggtagtggctcgcggccttctttgtgccagctttcggcggtttgacatttgactacatcagagcggcgatagacattttcagctttggggctttctgttggcgtagatgcaccgttgccattggcatttttcttcttgccccctggggtaaaggtgcggacaggcagagcgcctggcctgagagcttcctcacggcggagaaagcgctccagaacgaactcggaggatgtacgtaagctctgtagagtgtcaactgtttcattagttggcttgctttttgtcggccggttgggaaccagatctttagcatcttcaatgtcgtccacggcagtgcggtccttatatggacgttcataattgcgtagaaggacccgaaaccaatctaacagatcgtcgtcaggccctttcttccccagtcggaaacccttggtctttccaggccaggtccgcctccgcagataccgagttgtgacatcctttgcggtcttgtcggctgagaatgcaatgacgtaacaaattacctgcttagccttctcagctttagcgccgcgcggttcaaaagctgcttggagctcttgggtagctgccacggcattggagagcaccagaggatcgacggagatgacttgatgcgtgattggagatactacctcggtccagtagattggaaaaggaaggtcctggtcgtaccgtggcgcacgttacggccacgagaggaaggctgagcgtcctcttcttcatcactatcaggaaaaccatccccatctgattctagatttgtatgcttcggctttgtttttgactttggagaggtatgg

SEQ ID NO: 2149 - DNA, 3894 bp, Emericella nidulans
ccctgcaatgtaaattatatagaggatgagaacaaaggatggtcgcagtgtaagccctcctcaacaaagtagccatgtttgctacattgtccaggagggatcagtctttggccaccttgcgttgacttaagtttttacagagggcaagtcatagttcagctcattctagaacatagtggaagtaagttcaatgaataagttggcttgttctatgatattgaatcgtgaattcatattatcctttgaaaatggagccctctagacggcaaacgaccagatatgtcattagtgcctcactacaacagacgctacattcaaacctagctgccagcccaggtcaatggacctcaattggtcaaataaggtcatttttctgcgccaatcgcagtaggtatattgttgcatccaaaagatcacagccacagccagagacagcccatcatggaagaacaggcagaatccataacagtcttgcacagactctcctaaactccttgatcgggatcccatgtcttaacgcaacttcatctactttcgccctctttctggggttaaccacctccctcacggacctccaatcgtgtttcccagcgcaatatgctgccacgcgatagaatccccaccgtgacgtgaatttgctcagcatataaatctttgcgaatccattgtatgctcgtgaccaggatggttgaaaaggaattgagaacccctcgtgtcgggcgcgggataaagtgaatagtatgtctgaggtctcgctgagtcggcctaggggcgttgttgccttgcgccactccaagagctcttcggctaggcggcttttatgccaggaaagttccggtttgcgggagaggccaagaacagtatgccattttttgagaaaggtggacattctgaggttgcccatcggcgttttagggttgattgaatttgatctggacttttgtaactgactgctgttggatgatggaaaggaagacacttcaagtcacgtagatggcggcttctatcaaattgatcttagtttatcagtcaggacatcatggactgtgggaagtggtagaaataaaccagctaggacctaatgtcccatatggggagatgcaaacggcccagatcctgtacctccagtaagtaagcaatctttatacaaagcaccaaccgccctagcccttgacttcgctcaatatcaccatcttagtatacgatctagatgtccatctaataggaagaacaactatatgaccgcgcacaatagcctcgcaccatggagtcacgagtggtaaacttcccgaggtagaagagccagtgagtacttggaaaggcatcgcgacagcaccaacatttcgatttctttacgaccatctaatcgtgtagctggaaggtagcaatagaagtaaggaaactttcagactcatcacgtatttatatgtagtagtttgtatagatgcgagtcatgtgatatggcgttgaggccacccagcggtgagtaaatagacctccaacgaaccaacaacaatcctttgacaagtcatattggtatcgcatttctgtaccccggacggtaaatcttgcctgacgcatccaatatgcaggctggaatctcaggtgcgttcctcccccgttgcatgcttcagacaagatgccagcaatgaagccaactccgccccgccgtacccaactgaagttccagcataagcccgagcagccacaaaaatgcatatcatgagtttatctgactgtataaagtctcccaagagctccacgatgccttctcccgttcgcgtctgatacctctatcttctgtctccccgtgacaatcagccgcggagcgcctaaccccgctttcaacgctccccttctccggctttggagagaacgcgttctacgcctcactgtcacagctaacttctgtgttggagccaaagacgcctatttacctgttaatccgccggactggatctaatctgattgccttaacgtacattccctccaacgctggggtgcgtgcaaagactctcttcgcgtctacacgggcgacgctggtgagggaattgggaagcgagaagttcagtgagacaatcttcgccacagacgaggaggaagtcatcggagagaatgcatggaaggagcgggaggcagagaagaacgggacttccactggcggttatagaagggaggatctaatgggagaaaaggaaagggaattggaagctgtgcggagggcggaggaggctgcaaggagtgggactccagggagggatattgggatcggtggaacgtttgcgagaggtccttctaggatgaaaattgaaatgcaagtggacgaggatgcgaagaatgctctaggggggctgcagcagggtggacttgtgcagatggtgagtttgacaagatatattcaattgcactgtgcgttgattaaaagctaatgttgttctaataacaggccattgacgtttcaacggagacattcaagctcactgcggctgagtctggagttgacgccaattccgtccagaatcacatctctgcttcctcaccgagatacacgttctaccactatcccgactccgacaccatcatcttcatctatacctgtccatcaggctcgtcaatcaaggagcggatgctgtacgctagttcccggatgcatgcgctccaggtggcggaagaacagggtctgaagattctgaaaaaggtacggcggcttgacgaatgacagaccgggaactaacaaagaaatggcagattgaggccggggcgcccgacgaagttacaggcgaacgccttcaggaagaagtgaaccccccgcagaacaacggtctcaggcaagggttcgcaaagcccagacgcccggggaggtagatgttgaccgccgctctctagcaagtcctgggggattgatccgggcttcagcgtaagagatatcgtacacatatatccgtagccaagattcattgccgttcttagatttcaccagtaaccgccggtaagagcagcgataataccagccagggcccgacagctctccgcaccagggacccaatagcgtaagcaggtcgaacccgcctcatcaatgatttcggaaactctttttttgataaaataaatccgtcctcgaacttcccaagtttataatcttcggacatccgtctcggtctttctctaggcgcgtacattcgaagcagtagaatgcatcactgattccctcgccaccacaaacgatacacttgttctggtagttgccgaaggagcattcgtcgcagatgcggaccagagtagtaggacgcacgtaggagtcacacacaggacacttcccatcgcatttgtcgcatagacggccaatggagatgccaggttgcttgcggcacataacgagatcgggatgatggcgcgacatgttgctgaaaagaggttgaacggagtgcgaaaagggagttgagctcgatagcgaaggtaccggagatttgaacggttctaataataaatatacctggaagcgacaagtctttagagcaaccggtcgaagctggtggaaagcgaaagagagctcggagagaagctgggaacgggcatgaccttttccaagtttctgccggcggtggttggtccgtgcacgggagtctggctctgcggctctatcgcgacagcatgtctccgattcacatatgtaatactattgctcctgcttgtacgggttagacgcgtctcatctatcgtacaatactcagtacaagtgctttgcatacttaccttgccattgcccaatattgtgcatccgtttgtcagcggtctcggacccggccataaccagacagactcacgctcaccatggcagaagggtaagcgttttctttccattatcttactgtcgcacattccagtagctaattg

SEQ ID NO: 2150 - DNA, 3993 bp, Emericella nidulans
ccgcttccgttgttgaacttatgatccaacttagaagacacttgttatcctagcaatctcagaaatctcagaaatacgcagtctccaacttcacgcaggttgcggcttcctaaattgagcgggccagtccgtcaaacggttgaaccatggttgactttgctagtgtgccagactttggtttaccgcgttattctcctctcttttctctcacccctcaccgacaagaagggctagctcgatcctcccgccaattcgcctgcctgccaagtgcccttggacgtcttgtcggcgagttattcgccaactcgcaagaccgaaaccaagacacccagaattacacccgcgctttcaggccctgattttccgggtatgcaaggaacttcaagtcaggcacccgtctcgacccatgcccgtgcatgctcatatcagatttctggccgttgcaaagaacaaagcgatcctacaagcctcgaggatctcagagcctcgagggctgcacccatactctgcgggctcaagagtacggtcgtactccccttgcttgccatgcaaggattcttccaagaatcgccgctgcaaggcaggctcaaaagctacttcagaacctggagtccccgaacatagccgacttgccaacaaatcggtggaaccgcaagggcaaatggcgttgacgaatacaaagtcgcagattcagtgcgtcgtcaatgtgcaatgtcttccggaaaattctctcatctggcattggcaaaggccgattgtctgttatcgctgcgggtcaaaagtccgctgcgtcttgacatctaaatcgctattgtatgtctactctgttccctcgtatctggactgcacgcaaggaggaagttactacggtcactgcaacgctaggcggcgcctcgacggatcgtctacggcccagatattgggtatgaactcaacaacatttggctgagagcaatcatatcatctaccgtggtagtcggccgctcgaccgctgactcgaaccgcctggacccatgacaaaggaccgccccgaaccaaattcagcactaataacccggtggaacggactgcgtttggcagaaccatggtagaagttctgcactggaccgaagtaccgaattattggatccgccgctgttaaaagcttccagtgtctcggggcacgctcggccccggtgactctatgcggggtcccatacgaccaacacagtacgtaacgccattggcatcaaccaggttatggctctggttaaatcgggagatgatcctgactatcgacgacacagcgagcactagaaagtgtgcttccacctcagtcaccggtccgtggtactggctgagctcgtctgggactaccgaacatctcgccgtctgctcgaacagacaaccaaacaccgacaccgggacggccaattcccagtactgagactaaaggatcttggtcttggtggcaaattaagtgcgcacgaagtttcttctcctcggttaatgattctgactttgtcttcttttaggtccagcctgtttcacctcctccgccgtatagtagctgcgtcgcacaatcaggcgaatgttcgattatacactcccattggctcccgatacatgcaagacagccaatagaggggcgttcgacatgaggatggacgggaagattgttcaatcagcgtcagaaaaccctgcttagcactaaagtcagagacgatccagaagcgggagaggggcggaggggcagaggggcagagggtccggcctacggtaccagtgctacagtcctgggatcgggtgacgaagacgttacaggctgcagcagcgatcgaaggaaatataaaaatagaaaaaaaagaaaaataaaacaaaaaataaaaataaaagaaaaagaaaagagcagggaagaggatcagaaaatcagaaatcagaaatcagaaaattacgtaggtgcgctcaaaaataccgaacatgctttagcgcgactcggccggttcgaatttctcggtctgaacttttgaagtttgcagctgaaaagaagcatcgcgggacggtgaagggtccgagcctaccaatcacaccggctgcagagagtctgctgacatgcattgcttactacggtccacggagtactcctgccctttggattgtttgctgtcgtaatcgtccattaccctacgcagagttgctcgatcccaagcgagcagatgcggtctggagctatcatcgattcaggcaactgacacgactctaccccggccctccagcacaaatgaagaacgagcggtccattgagactgggataatcctatcagatgctgtcgttcctatcagtatcccctggcgatactccctggatggaggacctagaaacatccagtaacggggtaacccgtgaccagccacgcttatcgtgtgactcgaatccccagaatccggcttcagcacaggacttgtgccgggccctaatctgacggtcgcacaatgatgcgaccgacaagggggcgctcgtctcctggaaatgcaggtgcctgtgactcctgtcaaaagtcggcccgtcagggcattgggcaaccacaccgcacctcgaccaacccccgctagtgaaattaattgtcgccctcccatgccacggcggcccgcaccgttcccgccaatctaatgcatgaagtgtatcgctgccgtcgcaagtcgcaaccttggatgctgaacccctgctagctttagagcttcatctctcgaccgtgtaccgtccgactaccgctcatccttcgtaggtctattatttttattggactggctcccgtctgtggctggcgaaccatgcttgactaacgcccctgtaccgcttgcctcacccccttgctctcgtcgctccgcatggactcgccaaagcgatcttcagggcgctcgcattgggtccttgcctgaagcaaggtgtcctgtttcgtttcgcggtgttgttgtagtagtagtagtagtagtagtagtagtgagtggtagtgagtggtagtcagtggtagtagagtggtagtctaccagcagtcttgcgcaagaccagattgcaacgcacgactgcaggtcgacaaactggcaggcaaactcggtgtgctacgctcgtgcgaattgatatcaggcaaacccggccgcttgcacatggcgagttccaccgagctcagtgcattagcctcgcttcgtcacattgattattgttgttattattatattattaccatgactctttggtctgtagcgtcaatgacttggaccttccataccataccgaacgggtccggaacgcggctcatacggtaataccgtaatcaaacggcttcctttttctgccaggctcagaaaattgccacgtttttcgatcccaaccggctcggtgcagccgtccgtctttccgctgcggcaccagaacccaccggccagtgcggccacaatcacctgcgttgctggcctgttgttgggctgagggctctgcgcttttcctcaggtttccttgtcccagtccttggtcttgctccaccgccgactccacactcccttcaccgccagccctgagtctgagagcactaccgcattctgcggtgagtcgtgaccacaaagttcaaactcaacgctgcgttaaggcctccagccttctcttttagccagctattcgcccctagtcgatgggccgtcgcgctgcgtgcataatctgctgcaggctactgaccgcatgcgcttggatcctgagagcgacactaagcgacggaccgtgactcaggagcgctccttttacgtgccagactctttctgggaaatctgagtctgccaatctaacggcatgtttgtcagcgcgtggcggtacgacgggacagctgaacggacacgctatttcaccactactgtcgaactagcggactagtcgactgcccaggtgcctagcgtgcggctaccccaacgacgcagggcaagccaacttgacgaagcatgccgcctgtgatcagcagtaacccc

SEQ ID NO: 2151 - DNA, 4229 bp, Emericella nidulans
gcatatagtcaataaccgcacgaagagcgcccccagccaacatctcactagatcagccgctccctgtgttgccacagcctgagttggatagagatcaatgaggagcgtgtatatgattcccagcaggggagttccgctcagaccgatgagcccctgcagtgccaatgcggccgcaagagactggcgggtttggacgatccagccgtatgtgattagcgacaaggaagccaggagcgcaaaaggcgctgcgacttggagcctggcaacttcgtacggaaagtcggcgtctgccggtttatgtacgtcggcatcctttagtgcctgggcctgatgtctctggatcctgcggtagttgatatcgagcagccttccgccaattattgacccaatgcaaccggcaattccgtaagggctattagggcaatgccgtcagcaatgttctatttattttctcagaaatgagcgaggggttgcttacagatatgagaacccgaccgatagcgtatcaaggccgtacagactgctataataactcccggtggttgcccacatggctgtgacgcccgagtagaatagactggtgaatacgacgaggatcaaggcgtccttttcagcaaggatggtgaatgcccttagtacctccgcagcaccaatgcgtctctgcggcgaggccgtgagcggccgtgctgtgtgcctgagcgcttgtaatccgaaccgcgttgcaaagatcgctggatgttctgcaccacagtccgcctccaccagcctgctggctcgatagagccattcccaacgatactgcgagcagtctcggggatgataaagatgtacgcaagcagagccgcaccgctgccgatggccaggaaccaaaatatgctcctccacccaaaactcggcgccaaaaggcccccgatcaccggaccaaatgcaaacgcgcccataacactcccctgtaacggaccaatatatcggcctctttccgcgggagacgagatatccgctgcaacagcgaatccgaatggaatggcgcagctgctgcccagactctgtaagcatcggaggacgatgagggctatgtagctgtcctgggccgcgagcccgatgttggccaccgtatagagcgcgagcgtgaacatccacgctatgcggcgtccttggagatcagaaagcgaggacatcagcgctggcgtgatgccctggacgagcgagaagacggtgacgagcaggttcatctgcgtcgtggtcacgccgtactcagcttgcaggatgggcaggacggggagcacgatgttcgttgcaatcatggtgataaccatggcgatgctcgtcagactgatgatgaagactttcccatgggtgcttgtaacacagtaaggctcagacaccgcagtcacagtggctgacgctgcagcctttttggtgccggactggtggccatgaacggccggctggctggacaggttgtcatcatcaagcacatgcatattgacgtggatattggtgttaatagttggttcctggcgtcccgctgtggagctgggtttcctgcatttctttcaactgcataaggggccaggcagcttgctaatataggcattcgaaagcattttttgctgacgaaccttgcccctgggaattgggcgcgaaaaaaaaaaaataaaataaaataaaataaaatttttactcctgtaacttagccattggatagacgttccatgggtgcaatcggcttagtctcggggtacctgatattgccgtttccggccggcagatatacggttccaaagcatattacttggatttgtcgcatggtcgccactcattaagctcaaatttgtggacacaatcgggacgtgcgagcttttcccacgcgggccaacggacccctgggagattcccgtccagcaatgaagccatccatgggtagcaatgccttgtggtgtccaggtatatacagtgcgtcctaaatgtcggcttgacgcgagatagcttgctgatagagcatcaaccatttaagtatgccaagatctcatcgtacgccttaacaatattgaagagctacagaagcctgccatcagggagcctcagggcagatagtaaactgccatcagcatttagggctagcgccatatggcgtaagaattagcactcattaggctgtctctggcctacttctaggcgcactgttcttagtgtaatcttcctccagattcctaagattaataatatatgctatgattgacttctaaatgccccttgaagctcggtaacaatatagtatccaagcaagtttacctaactatatctgtatagcggtacgggagctaccttgccggtaccgagctatacagcgggctagtatatataagcgtctgggaggggtaccacgagatcaccaccaggaatcctgacgaataagtcctatactgataatctttgtgaaattggtgtatatatttgtgaataatagcatctaacctaagagaacaatgaaatacgacccatcataatgcgagaataccaattaagtcatgtagagttgacggcagacgggtcaaagaagtgcgctttgcgcgatgtttgaatgattcaggtgggagagcatccagccaggcctattattatttgattgtcgtaagcttctgagtgggcagctgaatgaatggttcggtccaagagggccattcgggaaacggtatggtgggtatggctaccttgcctgggcgaggctcaggttcatgctgctccctacttgatctaaccgatccttgaggctcaggtaggctaacttcaaatgagtcagattttggattatcattgccaaatggccgttaagccagagatcctggagctatccatagagatcgcataataatgcatagcccgacgcggcatcaacaccgcctaacaaggataattacatatagccaagcaaaaaggtgcaagatgtgaagcaactacgtcattcatagtgtgggattgatcgaaccagtatctcaagcaatgctcctgccgaacactgcctcattgcgtatgacagcagacgaggtcggggcaatatacttcgacgaacgcgaatcactacaaatgtaactacgaatcagaaaaaccacattgaggtaaggatcgttaattcgtacttgcgccaatcgggctgaaaaaaaagattgtatgtatacatcgacgaacggggttgtagtatgcgatttacatcaaaagacaggcgacatcaatcattatgtaccaatgtaccaatgctcactcataatctccgttcttcagagattggattaattttatcgcgatatgtgctggaaataacatgctgcggctgtcgtgcactcagactcgctttacagggcagcaacaacgcccatgacgcccatgattccggcaacgcccatgaatggggtcgcgtaggcggcgacatcgtcggaatcggtcggctcagactcatcgccgctctgcgtggcgctcgcatcgtccgtcgcagaagtggtgatttccgtagtggtcgtggtggccgagccatcactgccggtagtggttgtctccacagtggtcgtcacactgtcggtcgccgaagtgagcgcatcactgacggacgacgagatactgtcgagagccgacgagacgtctgatgtcgccgtagagaagagactctcaccgacagaggtggcagagctccaggcagactcagcgtccgtcgaggcatcggtcgcccacgaggaggcgtcggaagcgacagattcagcccaggaagagacgtcggtcgggaggttggtgagggagtcggtggcggacgcaaagtcggtcgagatggcggtgccgacatcctcggcacccgaggtgacgttgtcaacaatatcgccgatgttgtcaccgagcgagttgtcgttgttgttgtcctgggcgcgcgcgagcgcggccaggaaaagagtggagaggaggagcttcattttgtatgtgatgtgttgtggtgattgttttggttatagacgggtggatatgaatgcgatatatgaattcgatcttagactctgattagatatgcgataggtataggaatacgatatgataaagccgaagaggaaggggaccggcttataaggggaaggaaacactgcgccactgccctgcctgccctggccgggggccctgacccagtgctgccatcctaaacagccccagtggaccctggcaacgtcagcccaaccgaaactcagcgg

SEQ ID NO: 2152 - DNA, 2218 bp, Emericella nidulans
atcttgtaactgccgcgaaataacggagcatgaattacattgtaagctatctatattatatgacagcgaaggatcttcctaggccgcagccgtgcggggaatgcgggtgcccgtgcggttctgactcggccattctgaggtttggtctatggataaagatatgattgggcgggctatattatttaattaggtactctcaatcagtgccccttgtatatgtgaaccgaaagcaaaaacatgtgatagtcagtcttctcttgggaccgtaggaatagtcacaggcggttcctaacaaatggagctaaccctaacttgcatcatgctgcatacataacagccatcgttttcataaatcactaggaacgtaataattataggtacctagaatgcttgtacagtctaccaggcattgttctgctttgcccggtacaacagattacgccaggcccaacccatccacctgcatatcaagatccatcccagggctaaccaccggagggggggccgactccccaaagtaatcgtgcacccacgacgatatcaacgggtcaaatccctgtgctaggtgttggaggttgattctgtcaaaatctgtcactccctggttaatggcttgtgcgttggcgtctggctcgatgtagaggtagtcgagattgatctgatcttgctcgggctggggctgaaagttctcggtaggttgacgcgagcttgtgagaagaggaaaagaaaaatccgtcccagtcgcctgtgccggcattttcatgttgatgttcgtgctggtgttcatgttcgtctggaccgaaacatcatctggcagagtccggacatcgtgatcataatcgttgccccgctctgcccttaagccaaatgcacttcctggcgtcccagcctggagatacggcgaactatctctccttgtattgttcatctccatcggcatttttatccgcggggtagcaccctcgatcgtccaaggaagcctaatcgccattccaatcggcgggatacacctcaccagctccggcagcgcattatcgtatggcaagcggccgactgcaagactataatccacacttgtcgatataagaaggtatgcgcggggaaaccgaaggaatgcttcgtgccatgtgtttgcccttccgcaccccattcccgtgtaagacgacttatccacctccaagccagccgaggccgaggccgagggtgagaggtcttgtggagggctggggctagaactgggactcgagctggaagcagagttagagctggcagttgacccgcttctctcgggcatacgggtctgttggccaccattctcgtcccaccgcaggaaaagatgctgtgaggtaatataagccagacgtaaaatatgattcgttcccgcggtcacaaagtcggtgacatcgtaaacgcgccctgaatgccgaacgatctcaccgagtgcatcgagtcgtctccggcgacgcaccatttctgccgacgtcggagagagcttgaggtcgattgccgtgaggacaagaggcatcgctacgtaggcgagcctatgaacatcttagttggcgcacaactgtcaaggagtgcggaaggggtggtgaaagacttacacactcagaggtagattctgcgcgcgtccctctcgtccaaaatattccattatggcggttagctttgccattgcgtctcgtagagtattgcctgctgagaagagatggttgaagtagtttttgccgctgaacagagggtggttctcgagcagcagcgcttcgtagtgggctaggtcaatccgggcagtcctataacatttattcgttaaccagctgtccttagactccggtaaaaagtgtgagggagacgcactggtagtacatataagtgaaattcacgaaaagcattactgcctcaggggccttctcctttccattccctttcccttcgatccctatccactggttcaaagacgaacactgctcccacctgcccattgcattctttgtcctggtaatcttgattagttcctcgtggaactgctcgaggctcaagctcggggccgcaatcccatggctcgcgaagacaaaggtaatcatttcggaaagcaatacagcgagtcgacattgctcctgcagaacctttaacagcattcgtttgatctcaagactgtagacgagcgaatcaacaatctcgtctgcgaaatccgcttgtcaggaagctccggctactt

SEQ ID NO: 2153 - DNA, 1056 bp, Emericella nidulans
aagccatgttctctaagatctcgaacggttggaccatctggtcgcagctggggcgacaatttactgcattcagtgtcaatgttactgtagtcgagatctactggtatgtatttctgtcggtcctcttactatcttgacaatccatttacttttgtgcagggtcgtcctcctcctctcccagatcttttacctgttccagctcttcaacaaagacactgcgatcgtagctctagcaggaaattcagcggcgcacttcatcctgaacaacctcttcgttgttgcgtggatcctcctctggacgagaaaccacttctggcccgccgagatcattgtgatcgcgcacattatcaaccagcatctcctgttctggcgcattcgcaatctgccaccgatttcgcatatcgcggttgtcgcaggcccatatgcctggacattgattacgctcttctggacaggagctgctgccgtcaggtctcataatttggcctcgaatatcgccgcgaacatcttcctctggattatctttttgatcggctccattcacatctttttggctgtcgatgatctcctggggtacagtctgagtctgttgaccttcggtatgtttcatgtgaagccctcgcgtagtcattcaccgtcccaaattagatgctgatttcatgtttgattgcaggcctggccgtggcccaaactagtcgcaagagccatcttcatctgcagtggatctttgcatgggtcatctttggagtcttcttgctggactcactctatgtgacctccgccaagtacgttggtcgtaatgtgttgttccggagcccgagagagccagagtcgagtgatgctgagcgcgcccccttgcttaatgacgctacggcacctgcatcgacctcttagattgccccagtggcttaaatggagcgacgagtgggttgatgagatggagtcagatgagagccagatgagagtcaattaagagatggtggagacaaggaataacgtacggcacgctaaacggggtcatggttttcgaggataggatatggttgtcgtgtaagc

SEQ ID NO: 2154 - DNA, 2299 bp, Emericella nidulans
gtttctcctctggcaagcctatatatcccgaagtagccacggctcgatgctacgtaaggccctggcggaaaaactcgggcacagcaagacacttgagttattttcctttttgcttccttttttctctattttcgctgtatttaacaaggcaagtgctgcagacttgccatcgcaccgtcgatcccgctgcagaggtacagactactcaagactactcaaggctactcgaggctacccaaggctactcaaagactattctgggtactgagtgcaggccagatccacagtaatcagcatacgtcgagtataactccgaagaccaatggacgatcggtgctaatctacttcaaacatccttatcgatctggacgctggctagctggctacagtcgcgccgggctacagtcgatctgcgttgccccaacactagaaaattgaatgagtctttccacctatacttcacccgccgttaaaaagttcactataagaatggcggtctcgataccgaaaccgtacggaccgtacggaccgtacagccgtacggctgtatggtcgatacggggccgcggccacattttggaacgccaaccacaccataaccttgatccccgcacctgcgttgtaattggccaggcctggaaggggcatccttacttgattctctatggtgcagaattagcgcgcagcgttgagtgacttgcattagacaggccagtcacagctgtccatttcgattcatgactccatgtggacacaagcgtccatccagaagcattccaacttgctcgctgtcgttgctcgtcctggtgctggtccagggcctgtgccttcagcattggtaatctcgtaagaagacatactccgttctaatgacgcgccgggcccgcgagattaggcccaaaaggaaggaagctcattctaatatgcaatggggacggtgcatgatcgtcagctctttatggcaacaactatgacatggactgctccaaatcggtttcacttgagaagcagtagtctatgacgattgaacggcacaaagcactcgacaggtgtcgggcaccgggcgtcaacgagcccactccgttgtctcaggggcccgtcacagtctgtacagagtagactgcggagtatttgtcctgcagggtatactccacccaaatatagaccgggatctacgtacccaagaagctcgttgagctgcagacgtagctgcaagagctcaagcttaccaacagaacacctgtcaaccagttcgttcccatctccgcacgatgggccaacgtcgcagcgctgcagtggtatgcagttatccgcaaatactggatctacgccacattatcactatcattatctcccttgccatggtgacactctgcaacaccttccgtctccaattcccggttctttgcgggcccaagagggtagtggtcctttgttcctcctcaattggacgacggggacgggtgctaatgcagtcgagctggagcttgccggcccggcatacattagcgcatcttatctatcagtcatgttacgtttatcacatcagtttcacagtttcacctagtatggcacgaccgtacaaccgtttgactacacccacctaggctgctagccgttctgcatagttacagggcattcgtcatatcaggatcgacgggcaggaatttgggttgcgtgagctgtcgattatcagtctggatcttttcggtggcgttacactggacggtgtacgcagagcgcagtaggacagcgacggagtcgcggatcggatcgtcacttggtatgtaacaagtgacatgtcacctgcgagatatcggaagagagaacgtgatctgcagagtacattcaaacttgggatcatgtattcctgtctattggggatcgtcgaggaaattcttaccgacattgattcccagcgcgaagtcctgatgtatgatgtcagggccgttatcattatgcatttacacagacacgtgcgttcgaacatgaagctttatcagctccattctagcgccacgtatgtcaggtagcttgcgtattagttcttggattggtggggccatatactggagaaaacgacccttacttatccggtttcgaggaacttgtaggctagagtacatggatgagtagttagggctctgggtcctgctttggatagcttaaggctgaattaaggaaacccagtgctacgaacccgaacggctcttgaataggccgtccaaagccttatcatgttatttaagatatattaagaagggggtgcaaggcagggttagctatcgatggtcctgaa

SEQ ID NO: 2155 - DNA, 1520 bp, Emericella nidulans
gcacacccccgacgaccttgagcgtgtgcgcaacaatgtgcttgcgaagacagagccctgggcctcagcctatgaggagttcagtgcctaatcctattctcaagcaaactatactttgcatgaaggccctgcgacggtcctcagcagaggcgcaatttcaaactacacctcgtttgcgcacgacgcaagggctgcgtggcagaacgcctggatgtggtacatctccaaggaccaggcgcactgggatcagagcaccacgatcctcgatgcatggggctcgaaccttaccaatattatcggcaccgaccgctcactcttgatcggcctggacgatatctttgccaacgcggctgagatcatgcggtgggagggaaactggacggaagccggtgccaagtggcagggtggcaatggattcagcatccagctctactggctcttctcgcgccagtccatccctatcgggcaggcgaactacgacatggcgagcatcaaagccctgttgagtttcgccgtatacctggacgacgtactctacaactatgcaatggacgcgttcatccaggttaactgtgctggcttgttcgcaacctacgactcgtcgacgggccaatctatcgaggctggccgggatcaaagccatactatgtctggactcatggctgggctgcatatgcagctcgcgtgggccagagctagggtgttgacttgtacagacttggggaaaatctcctcctgaagggggccgagtatgcggccaggtataatctcaatgagactgtcgagtacgatcccaagtggtacagatgcgaggctgtccttgtgaacagaccctgggatacaatctctgagtccaagcgcggcgttaccaatcagaatcctacctgggatatattctactaccaatatgtggtcaagcgaaaactcaaggcgcgttggataacaaaagccaagaatgcagaaagatttggaaggtgcgattttgggtgatgaccatcccagctggggagagctcatctgggcctattagaatacagatctggacgtacccttaacatctggagggtagcatctgaagggatatgttgctagctagattctatatgattctgaatggaccaggatccgtccccttgtaaacaatatctccatccgtacttgtactactagctgtaaataggtccaaatataacggtttgagcttgagcatagacaacgatatgtctgccataaaattgttatctatgtcaacggcaagcaatgaccagtccccagcagaacaattcctgcgcactaactctccacgccgagactactctgagtactactgagactacacactggactaccccactaaaccgacacgtagacacagcctcagggagctccacaggacgcgtatccgctgagggcttaggggcgatgccgcagtgtcttggacagcaaacagcaagaattctgccgaacgggaggagaatgcatcgatctgagcattcaaatgtcttcatgtctccataaac

SEQ ID NO: 2156 - DNA, 1878 bp, Emericella nidulans
  unsure (1)..(1878): unsure at all n locations
gccaacaacaagggaatgtaacgccgtccctctcgcctcgcggccaaaggttggcacttgccaaggtcttggcaggtaccatttgccctgtgattcggttcattggacaagtatcaaagcccagccctaagcgattctaaccgcagaagttcgttctgtacacctgcagcgccaagggcctgctaccaggttgataggtgcagcgtatgagctcactttgtgcctcctattgaggcatggtcactggtcactgtctatctctggccggagcatcctgtggcccattggataggctgcgacttcggcgccccagtcttcgggggattcccgccgtaagtgtactcctatttcgctccacttccagcagactttccctacatagccgtccttttcctgcttgtttaccaggtgcttcgcttttctgaccctggtctcaactcgagttctgccctcagccaccacaatttgcaattcctgctacgctcgacggagctatgcgcttccctcaagcgagcctcttgctcgtcatctctatgtcgtggaaactgtaaccgagtctgttaacgtcgtcgaactggatttcgtctttccccgcaacgaaacctacgcaccgacggaggatttccccgttgtctttgcggtcaagaacacgcagcatgcggagctgctgagcctcaggatcacctatacaatcttcaagtgggacgccaaaagcatctcaggctcttggcctagcaccaccatccccgaagagctgcttcgcttggattggaccaacctcagcgacccctacctcgcataccgatactacaatgggacgagtcccggtcattggtggctgacctggcacctcagctggcagagctgcgatgttgaggcgttagacgatgctgatagtgacggtggtctcttcactaacacctctcgtcgtcgcggatgtcacaatccaatactcaccttccgcaccacagaaggaagtagacctggccgctgcaaccgcagttgggaagtgcgacgaccacggtggtagcaatgctgtcggcatcaatgtcaccgacacgaccatgaatgccccctcgaatctcaactgggctgatcgtgatacctgtgttcttttgttttggtttgtattttccctcaaaaagaaaccaaattgtttcgagagtttagtgtatcctgtagacaatgacaatctggcatgcaacataactggctgttgctgctgattgacaagctcaccctaggggccctgaggaccacagcgccttattcgaacaggttgctaacgaacgaaaattggttcatcaacaaaggaagaaccgcaattgaggatgcaaaggataccgctagaacattcatgggataaagtactaccatcgccaaagacatgttgcctgactgggcaaggctggctggtacgtcgagacgcaagatgccgtctcagccccgtggactaggtcattgctggctgggacaatgtcacttccattgctctcacaaactttcttgacggaagcccggagtcagtcgagtctcacaccgagatcatctctgacggaaagctaacccctggaaacgcgaccgtcgactcgccagatggtgacgaagaaagtatgaattaaaatggctgcagcgaattacgtaccaacattgtaaagtgtatcactggtcacgccattccagccctgtggcctcgtacaccctcgttgatgcgggtcacctctgtggtgaaccccaagatatcagcaggtcgcttgacgacgatactcagagagcaactggtngtngcgttgacggaaaataatactaccttgcatatccagatggtgatgcaggggaatgcccctgtgacatttgacggacacaggctttctgcgg

SEQ ID NO: 2157 - DNA, 2315 bp, Emericella nidulans
cgggtcgcccatgaggagaaccgcgcctccctcgcccttggttccgtctcaaatttcggaggctcccaaatatcgagcgcatagggacagtctcgacatgcaacacccccagccgcgccagggtcctactggtcggtatcagtctcagttagaatcccaggcgcagatctatggtgcatctgggaatcactcggatcaatgggggttcaaaccctagcttctctgctattaacgggaaccgacgattaagtggcgcaagccgtttatcccctatatccgatgcaggctattcggagactagcatgcggtcttcgcgccagggaccaccgcggccaccaaaaatcaaggacgatgggccacttttcccagagagacccgctaaaatcaaagaaggcgaggaacgatcgtatgccgaccgtgttgtgtcacgggtaagttttatagtttccaatatatataggataatgctgactcgtcactacacagagctcggccatgcaatctcctggacgcagcacgccgcccgcccgcaagccgactggtcctcgacctctcaattccaatagccaatacaacagccccaacagaagaaggcgaaattaccgcgacagccctgaacacgttgacgaggagcatgactactaataagtgcgcgagtttgacacttagtgcgcaccacccgtttacgacacgacctcatgagcagtaacttttggttcccctttttttacgccattttctttcagtgcctggtgtcatgcatgttgcaaaacttcatccataatatactacatttactgatgacggcgctttacatgaatgtattttgttctctcatgtatctacctagcgattcccttctttgctgcatatttgttaccgtcatgtgtgtaatgaaaagcctgcacaaacatcctcaactttagcacacttatctctcagcttctccatagctctttgtctagagtactgcagctcttagctagtactacttaggtctactccgtatgttgcccccactctcgaccatcgctgcggggtaaccactatatatgcgggggtgcattcctcccatctctggcaatttacctcagcgcgatctgaatcagaatcagctgccttaatctttcccatccaaccctttacctcttccctaagctatcagccatcaaaatgccagaaacatctccaagcccacaagccctcgatttcctcatttgctccacctgtggcacccaataccccacgccctcgactctgcgctcgtgcaagatctgcgacgacccgcgccaatacgttccacctacggggtgagtcctctacatactgctactatcagataggatcctaatactagaatgtatactcctagtcaatcatggacaacccttcgagcgctgcagaactcgcaagacccgaagtataagaatatctttacgcccgatacaatccacggcgagagcttgatctcaatacacacggagccaaagcaggcaatcgggcaacgtgcgtacttgtgtcggacattttcaccaggaaactctaggctctttaatgtcctctgggactgcatcacatatattgacgattataccataacacgcatcaatgaactcgggggaatcgacgcgattgttatctcccatcctcattattatacgactcatctcgtctgggcagagattttcgactgcccggtttacttgtcatctgaagatgaggaatgggctgtcgtgaaaggggacaagcaggtgtttttcggtgaaagttcactgtcatttgcaccgtcagggaattatgggggtgatgacggaagagcagatataattgtccttaagacgggcgggcatttcccgggaagtacggtgctgtggtggaggccgttgaagacgttgttgattgcggatacgattgcggttgtgccaagtggaaggtattgggttgataggccggctggaacagcgtcgtttacgtttatgtggtcatatccaaatatggtatgttttctgaatgacactgaatgggccctggctaacctgatagattccactatctgctgatgacgtgcatggtatctggaaggctatcaagcatacggagtttgatatcactcggggcgcgtttattggaatggagacggacacagacagcaagaagcgtctgttagacagtgctcaaatcttcgtcaaggcaatgggctatctcgatcatgctattcatcaggaagaatgtcattgatgcagcgtgctaaggtggtgtacagaatgaagtcattgcataatcatgaattctgataataatggaccaagcacaac

SEQ ID NO: 2158 - DNA, 2852 bp, Emericella nidulans
cttcccttatcgatttgtcgcagcagaaaaaaccagctcatgaccgtctagcaaactaagacttcgtactggatcatgccgcgggcttctatttttcacttgtgttgcctttccaccccatactgcttcctcttttctttggtcttgtcgtctttcctcttaatttctctccacttcttctgctcattggatcttccaagcgttgaaacgagtaagctaactacacctcaatttccttgggtctcttcagtgattgggtttactgacaatctttggtatcagactattcctttggtcgtcatggatgacaccagcaacttcgtggtatctacggtgagagatgccctcgcagacgttacaaatgtacaaaacaccaagaatattgaggtgtctgccctagctcgtgagaaggggcgggtcgagccaaaggactatgactacgagaagtacgtcactgtcattccttcagaaaaaccagcagagaagggggagaactatcaagacgaacaatcctttcctgagtgggcagcaaacgctgtgaagtacgagtggaacgatgaatacggtgatgttgggccggaaaaccctcatcttgaggaacaactgttccgcgctgagttcatcaaccgtactggcctcaaaatagaaaagtgagtacgctttctctgctgctatctgtggcatacctgaccggatacagccttcaaaacattgatgttgtggctgaaagtcacgaaagaccctcgcccattaggaccgtaagtactcccccagacggcccgtccatatctgcgcttcaagggtaacatcctaaataagttcgatgatgctgggcttcatccaatcatgcgccagaacatttgtctctgcggttacgaatttcctacgcctattcaagcatacgctatccctgccgtcctgacttcacatgatttgatcgctatcgctcagactggttcgccttgagacatcataaactcatcatcttactaacatgcccaggctctggcaaaacggccgcctttctaatacctgttctttctcagttaatgggaaaggcgaaaaagctagcagcgccccggccaaacctggctgcaggctttgatcctatcacggatgtggttcgtgcagagccgctcgttctgatagtggcaccaactcgcgaactggcaacccaaatcttcgatgaggctcgtcgtctatgttatcgatcaatgctacggccttgtgttgtgtacggtggcgcgccagtagccgaccaacgcaacgaacttcaaaagggctgtgacattctgattggaaccctgggaagacttctcgacttcatggataaaccttacaccctctcccttcggcgtgtcaagtatgatacccagcaccacgtaaaaacctcaattaacctaccatctaggtacactattatcgacgaggctgacgagctgttgctctctgactgggaagaatacttcaagaaaatcatgtcaggcggaggtggttcctgtcttcccaggcgtggggctaatgctgacaagtacagacataaatgaggacgcagaccatcgttatatgatgttctcggccacattcaacaaggaatgtcgcgagcttgctcgcaaattcctcgctgacgaccatgtccgtgttcgcatcggccgcccgggctgcactcacgtcaatgtcgatcagaatgtacgtacccaggatgcccacaaaccatgcttcaaccactaagaaattcgaatatcagattatttataccgaaccgcaactgaagaaaaagtgtctttacgatctactcctggctatgcagccttcacgtactctagtgttcgtcaactcgaaagcaacagctgaccagattgacgactacctatacaatctgggattaccaagtacctcctttcacgcagatcgtactcagcgtgacgtgaggatgcattgtaagctggcaattggctccgatcctgatacacttgtgctcatgtgcttttaggcgtgcgttccgctccgcgaaatgcccgatcatggtcgccacaggcgtttccactcgtggtttagatatcaagaatgtaatgcatgttatcaattacgacctttttaatgcgttgcacggtggcatcactgactacatccacaggatcggtaagttgatttaccaatgcaagtcccgacacacgtcgtccagcaagccctaacatctgagaggacgaactgctcgtattggtaatgaaggtcttgcgacttcgttctacagcgacaaagactcagcccttgcccctgatcttgttaagatcttaatcgaggccaataaacccgtccccgacttcctctctagattcaagccccccgagggcgaaggcattgacttccacgatgacacccgacgatgagaatggtgagaacgacgagaatgcccgctctagtacttggggtggcttacaacccgcctcttccgaccatccagcaactgctgcatctgagggctgggagtaaatcatcccctggattcgtatgcgttcttacagctttgacaacgcttttcgggaacttaatgggtatgccctgacttattaattttccccgtttcggtgtctggtttagaccccaaacaacggctttacttctttcccggatggagatcacttgcaaataatagccttaagcttaattgggggcagccaagcttggggtaggaaagtgtgttcccccaggccctttttctttgagacgggggtttaccctctgaactgcacaaatatttgcccttgtaacctttatcggctcttccgaatttttgcccttttagcccaaagaagggggccaggggttgtccttaccgttttgctaacttt

SEQ ID NO: 2159 - DNA, 1122 bp, Emericella nidulans
aagatcaagatgttgaatctgcccagtttcttcgcttgcatttgcagtggcaaatggaagagcttcaagcgctgcgcctccgcgaatacgaagaaactcgaggctaggcggaagaccgaagtcaccgccgatatagagaccactgatgtccagcttcttgagacgtgcaaaattcgccggattgaaagagggcgggtaaggaacgaagacctgcggatttgagtgcaggcgcactcggaaaggtttgatatgggaagggggatggatgggtcgaccagacgagggatgtagagagccgggacatgattatcaaggacgccagattctgttgttcccagggtaatgctctgtaggtgaggaagggatgatggccagtttgtgtctgcgatgcgggacttggaggcgctgtggatttcaatgcgttggaggttaggcagactagataatagttttgtgattgttgcttgcgggattgttgtctgcgcagagactagaagaattttgagattctttgagcccttgaagaggttataaatggcttctggtgatgaaggtgatagaatctcgagatgctggaggttgggacaacggctgatgtactcgagactcctatggatagaggctttggtgaggtttgtcaagatggcatgagtgagcatcgctttagaacgacgaatataggcgagaacagaggaccagtgaatcttgcagcgggctccggtaaaatctatgcgcatgaataaatcacgcatagaggaaagaaaccggtcccatcctttcgagactcgcaaaatagccctatccggtcagaggtgaaaacggtatagccgtggcagacttacacaatctgcctaaaatcaaaataatccacaaccatcctggctatttctagcgggaatacactgaacggatcgaagcatcttgataccaacttctctttcagtttcgtatgcatttgttccacgacctacatcggattagtctcggtaccctgcaaatgacatacggcatatgcacgcacctgacgcccaggcttatcttttggtatagattttagcgcgtacgcatacgctcagcaacacttcgcgggcttcccatccaacaggagtgctttagcccatc

SEQ ID NO: 2160 - DNA, 1980 bp, Emericella nidulans
aagttgcaaatgatttttacctgactgagcacaaggagcactgcgaaacaatcacaatataaaggggatttgattgtaccaaaaggcttggaggtcaattgtcgtcaacgccgtgagacagtccgtccgaatcgggtagcacgaggagctgtagcacaagggtataattacataattaatccacattactccggcatcatttcaacagcggggagctccctccgaccaccccaacttactttgcaaccatcataccctccatcgaatagccatcgagagtgtcggctgaaggttccattgccgttgcgcctgggcccattcaggaccgttgtcgtgtccctcatcaatcttgtctaacctcaaggttagtcgcatccaaagaggatcggagactgctgcaacggcccggttacaaacctggctggtgacaagcctcctgagcaagcccgatttactcgccgcttaatactgttgttcaggttttcaatcccttcccttccatcctttctttttggaattgctggacacatcgattaattgcggctgttgaagctttttgttcttgtgccatccccgcatatctggttcggttccgcttgtcacgggtagttatcacactcgtttatttcggtatataagaggggcgatcgatcggccttaggcttatgccccctgcgtatatcacgatctctctatcgctacaaaattccggctagagacattgaatcagagccacgatgaacgagcattatttgcctgcaaaggctctgactcaacaaccgcgggccacgggtccgtctcttcttgcttgtcttctatgtcgccataagcacctcaagtgtgatggagccacgcctgtgtgtagccgttgtgccgccacaggtgcagagtgccagtataccccgtcgcggcgaggatacaagggcccctcgaagaagcggcgcgccaatccttcctcacctgagcaactaccagccgatcttgcaccatcttttgaccctaatgttgggttctacaatgtgcctgtggattggaatgctttgaatccttatccatatgtgccttcggccacccttcctgcctcaacctcctcgggaagtagtccccaattcactgaacaacctggggcttcgcagcaagtggtcaccaagaacgcacctctgacccctgaatcgtcgtcatcactttccaatgatggatatcttgtcgacatttactatcagttcttccacccttcgcaccccatcttgcctccgatcaagacactctatcacaaccgtgtgccaccttaccttgagcaagtcatcaagtttgtgggatctcatttcactcccgccgcgtcgagtgagacttatcgacccggcatcatgacgactgttatggagcaggaaggaacgttggagaagattcaagctcttctcctactcgcgattgtgctccattcgcgaaacgaacgggataaggccaaagattgccttattaccgcagttgacctggcctttgagctcggtcttcatactagggatttcgctaccacaatgggcgggggtaatccgttagggaggagtgcctaagacgtacatggtgggaattggtcatcatgaggctatgttgacagcacttggacttaaaaaaggtctcgacacatcatggcccctcgaagaccccttcctgggagagcggtatacaggacggatagagctccgcgtcaccccgatgcgcagttgatagcggctttgcaccagagcgagatctatctttacgttgaacaaacgccgtttctagacggtgggccatcagactggtgggccccagacaatggattcttgcgcgaatacagttttatactcttaataagcagctttccccccgacttacagatttcagccccaggtatggcggttactatccggtaacgttttccgcttgcaaatgggcccgctttccctttccccccccagactagagggaatttttttt

SEQ ID NO: 2161 - DNA, 2640 bp, Emericella nidulans
cggctcgccgattggccgcgcgtaacaataattcccagaccaaaaatacccatcacagcacggcgctgtctagcgggcagcttcagtttccagatcaacggcatgggcaggatagtggtcaagacatccgtgaagatgttgatggtactggcggaaaagactatggctccgtcattgagacaagtgtgcgggtatttgggctctagatcccagtatgccttgatcggtctttgaaaaattagaatctcaccaggcttgatgggttgacaaggactcaccggcattggaagatactgataaggacaaaaagcgcgctggaaacggccacaaccaccatgcctactatcatggcgatgttgtatgtcgaatagatgcccttgttgccaacaatgaggaggcgcttgcagaaccataatagtgaaagctttgtcaaggagcaagacaaagaaaggaagatctggaatatgagatttagtttggagaccatcggtatccaatccagcggcacgtcccatatatgtctgacccagccccagtcttctgttgctaagcataagacaacggccatgccgattccgaagccctagattcagtcagcgagccaagactggttccctcgccggcatatcagcttaccagccccaggacgactagaatgtcgtccagaccagctgtgcgcgtaattcgtagccgggtatataaccgaagggcagttatgatagtcgataaagccaagaagataatgcttgcaatgagcacgccatgactgcgagtgggaggattaatgtaattcggcgtgggccagctaagaagcacttcgggaggagggagtttcattttcctggtcgactactggactgagatagtagcgcgctgcggtaatcgcttcttagataccaggattccaggagagacagcgatcgagtgccaggctccgtacgttgtcacggttggggtcaagtgtcaagacactgggtgcgccgatatcttgatcatttcatcgctctgtagaaatcggaaaggagtggacgaaagtatgctgggaggcgcaactttaacaaacgaaagagaactgaaaggccggaaatctccatcattattatacaatttgctcatctcagcgtgcctggaacctgcatggggtggggatccttcgaaactcaaaaagaacgaggcatagctgaaataattggaggaacatcaatagtgtatcgaggatccacggatgcgtaccagaatgctgtgcgagggacggctgcgctatataccgtagtattattattatcggagttctgctgcagtatcaatggcgggtttcgcccgtggtatcagatgaggatctggcaattctgcgatatagtgcccaataagcgaatcctctgtctgcccgctgtgaggaactgcacagcggttactggttgtggtaacagagacggctatcactgctcttccgcatccgagtaatcgcgtgtcttgcgacgccaattctacactgactcgatggagtccctcgctaacctgataattcctcgtgggagagagctcgaccctgggaccacgagatatttcccaaacatcgtctgatcgactctaatgattatcgttcgtatccgtggttgcatcgagtatggcttggggctcgttaatagccagaaatcgtctggcgacgctttgatgcgaacgcgccttgatggctttgattcgacgagatcgctgaacagaagggtgtgcgggccgcctaatacccacacaaagtcgcaagctcgttacctgagcgccgtcgtccaaatgggaacagaaccgtggagctgaaaccgactactgaaccaatcagacaggtaatcacgaagcgaaagaaacgattgaaggaaacgactgagtgaaacgattgatttggaatgaggaccactctcgaacagagatttatggtggcgacacaccttttacagcgcgatttttatgccaggtggaggcagtggccacagcccccgcgcgataccgacttaattgacgtccttgtagatagttcagttgtagatggttcacgctcgcaggctggcagactagcagactggcactaacagactggcactggcagagtggcactggcagactggcgctggcagactggcgctggcgttgaccgaataaaaccgaggatgccagcctcgctagataacagcatgtgaggcttagtttgcagccctgggggaatggggaagaggggcagctaagcattgactttattagcccaggttgtcggctaaagactccggatgtgcgctgtcagatattgccaatcaactactagaatctaatcagaagaaacctattcttgatagttatttttgagaggattttttgagaggatttttgagagcgaggaatataacataggttaatcccagtgccgaatcggccccggcaactcgatccagtacttgatctaacgcttaattttgagacatcgacggttgtgggtgcaggttagccacctgcaaaacgtggacggtgccactctgatcatcctacttagggctgtccaaatattcagccagcaccttaactcctaagggttcggtaggttcatcccgaggctatacccacgcgctgcacagttcaagctcaaggtagaatcca

SEQ ID NO: 2162 - DNA, 1556 bp, Emericella nidulans
atcgtcaggttcttatatgattgatattttccgatcattgattggagtcatatctgataaggtcgcaggatcggcctcgcttgttcggtcaaaaggtgaagcgcattattagtcggcggtttcaagggacaagatcatcgttattgtatctcgtatcgtctccaatctgcgcttcatatgatgtggaccctcgagctggagggcttaaggtagccgtacctatatgtggcagcgagacgtcttggatataaagggcccgtcctccggctcaagtcataagaaaaagggaaagaaaaaaggtgaaaatcaactctacagacttaccttcacgcttctttgagcaacaacagtccagttcaaaatgccatcaacggttaatctcctcctgtccgctctcccggccctccccatggcgctggctgcctgcccaggccctgatgtcaacaccgcaacgacagatctcatgaaggcctttgagagctgggagcccgatgtctacgatgacggttacgggaaccctaccattggatacggccacctgtgcagcgactggtcgtgctcggatgtcgcgtatgatatccctttgtccgaagaggatggggtgaagctttttgcagaggatattgctgtgcgtctccctccacggccttcctctcatgacgggacctctgggatggaagaaagatgtaaggtgctgatacgatgagtgaaacaggtctaccaagacggcgtggtctctgccctcgactcctcggttaccttgaacgacaaccagtacggggccctcgtctcctggtgctataacgtcggcgcgggcgccgtcgccgagtcgacccttgcggctcgcctcaatgccggcgaggatcccaacactgtggcggaagaggaactgatcaagtgggtgtatgcgaacggcgaggtatcggaggggctgaaacgcagacgtaatgcggagattgagcttttccaaaccagcagtgatggtgaggctctgcctgtttcttgctgattaaacagacgtcaatcatggatcgggcgattggacgggaaattcttattaaccatcgtgatgtgtttctaaatgggtactgttgaatcggtggctattgtggtctcagatttgcattctagctgagtgatatatggccctactataatagatgatgtctgttttcatcagtgcatgcagcctttttcagctgacgatgagaattaatcataatcctaaactatctgctgctgctttcatgcttggctcgctagtgtgtggccagagtctttcagatagtagggagtagcatgttcatagttgttttgacaccgtatttgagcagcaaacctctttagtccatctccagtcgtcgatagggttagccctgtactcaaggcacttgagtctcacagctagatcaacagcattgagggctcccaatgaggaactgcagtaaatttgaattacctacgagaaggtatttgacctaatccgatgaaattaatggcagatacaggagaaatgaccgacagtcttagcgtcgcgagctgtcaatattggccaa

SEQ ID NO: 2163 - DNA, 3090 bp, Emericella nidulans
tagcgtctctgcacttagtagattacgagcggatagacattgatttcgcacctgtcatttgtccatcaaaacagttcgtcctccattgtcaagtaggaagttctccatgcaagagcactagagtatctacgaaagctagaaaaagcttgattgtatgactctaagtctgctccctgattcatttcctgtatttttcaaggtgcattatagtctttcctgatcaggacatttccttgttggagtgaatagtcgaagtgaataagactctaccacacgtcctcccactccgacatatccttaaaaatgaatctttcttttccaaaagagccgcctctttctctcttcagcatcatgccttgatgattctgaccaatagccaggttttgagctcttccacttgttatcataacatagttgagacagccatcctgctttccagacaaagcccacggttgcgaaacaaggtgcacgctcgaccccgattatagcagccgtgaaagactgagctctgtggcttctacccctcgcctagcgattcaatagactctatcctgttctacggataactcgttgttgcaagcggtctgtaacccaacaatccacctttcttcttatcctcacttgcctttgatactggcagtacagggaatcaacctcttatatctgtattcaaactcacatgagaaggtcgatacgcttcaagaaaatgaacagtgacgtcgccattgctatgtaccttaccattttcggctctgtcctgatcctcgtcgccatgtggctgaccagaggcttttctcgcatcactgaaaccttgtcctctctcttctgtcgctctcactctcaatcccattcttgctctcaaactagagaaagaactagaagcgcattcaacgaaggtgagcttgaaggcgagtccgggtggcaaacttgccgcccccggcatttgactgagcgtcgcctctctggctttcagccccctccgaccgaggaggaatataccagctctttctttcacggatggtacttgccctacaatgtcagaggtctaagtcaggtagagcccgagcccgagcccgagcccgcgcctgaggctgacgttgaactcgaagacctacctcgttacgagcaccctccggcatataccaacagaagtccgccagccgaagcccatgaaatagggagcaacagccgtaatgagtctctggatgttacggagtgccgtccggctcctggactgagcaacgagcctgataccatggccgtgaccggacaacccgacaatgctcctaatgacaggcggggcccgacgtgacggagtaccataagcctagttatgtccgttgaggagggatctgacttgacgtattgctgaacaggatgactgtaattatggacatttattatgaccacaacgcctcggcacggcaactccgcgaccccgcagtttgaatatcatggtacttattaggacgaagtatttcaataagaaaataagcctctataattctcgcaagaacgtagcagggcctggaccatctcgaagattttcgttattcgcagcactgtctctgtttgcaccttcacccgtcgtcaaccatggacctcacccagataagacgccaccattggaccacctcaatcacctatgatgccagtaatatcataacatacaatctatccgtcggcagcaaaggtcaagatctccgtcactgctgggaagagcatcccgagtttcaagccctgccgacgttcagctcgctagctgtgatcgacatcatgggaaaagtcactgttgacatgccgaaactcctgccactatataagccgagccagcacccgcatgtccacgcagagcattctctcgagataagagggccattgccaagatcgggaactctaacctctgaggcgaggattcttgacgttgtcgatcgtcgcacgggcgtcgctctgattgtgggtatttcaatcaggaatgaggatacgggggagtggatttgctatagcgagtggacctcttttctgatgaagatgccaggagacggggcgtcgaaggcttcttcgagtatgcagagtacactacttcctagccgagagcccgacgcggtgctcagccaccagacaacccctgaacaaggtgctctgtatcgagcggcaacaggcgagtggaatccaatgcatattgatcctgcgactgcccagcgggctggcttcccaggccctattctctctgggacgtgtacgatcgggattggcgtaaaccatgttatcgaggcctttgctggtggagattcggcgcgattccagagactaaagctgagacttagcaagcctgtctttcccggggaggtagtcacaaccaagatgtggcggtttaacgaaacgaagattgtttatcaacaggtggcgggggatgggagggttgtcatttcgaatgcggagattaaactgaaagctggaggaaagcagcggagccagttgtaagttagctcttgctttgtaatcgactaccttttgtgaggagtacgggaagatttacttagacttggacatccgtaggcatagatttctatcttcaggcatgcagtgatgaccaggagaaaggatccctcatgcagctaaacaaaatgacagtattgacaaccaacacaaaaaagcaggagccaaacaagaagttgaagagcattaagcaacctggcaggcagtcggcggacagtatccgtgatcacaagcaaagctgcatagccccaggtacgagttatagttctccagccacggcagcggcacaccccggacacccgtcgtcggcggcgtcggcacgggcgctccataggccgtacaggtgcatggtcctggagggcagtaaccgaagttgcagcagaaactgcatagaccgacatagttgcccggtcctgtgccggcgacgcagacatttccggtgccgccggttgggtttgtggttgtcgtcgtccgggtggttgtggttggtctggtggttgtcgttgtcctggtggttgtgctagtgctggtactggtggttggtctcgtcgtcgtggtgcgcgtggtcgtccgcgtggttcttgtagttgt

SEQ ID NO: 2164 - DNA, 134 bp, Emericella nidulans
actagtgacgaccgtagagtgcgaccaggccaatagctcactgtcacgacgctaccttcggcgccgagggagaacgggtaacatgcgcacgcagagatacatcacgtgagccggcaagtgaccggagttcacaa

SEQ ID NO: 2165 - DNA, 2546 bp, Emericella nidulans
aggcggtttgggctggacggttgaacgatcgtctatgaccttaaggtatttaatgatatattcgatagcaccactttatctggaagggttcatattgtgtagatatatatagtctatatgcattcagaacgctgacatatagtgcaatgctatgattcactttaggattaaagcttcgccttcggagaagccgcctcctcttgcgcttgcttcttaagtagtctcctcaaaatctttcctgcagcactcttcggaatctcatcaacaaatcgcacgccgccgcgcaggcgcttgtgatgcgcaaccttgccatccagccacttggcgatattctttgcttcctccgccgccgaaacacccgagctcttgctcttcgcgctccttacgacaaatgcaacagggacctcagtcccatgttcagcgctctcgacaccgacaacggcaacatcgtcgactgcaggattatcgaccaggataccctcgagctcggctggagcgacttggaagcccttgtatttgatgagttctttgacacggtctgtgatatagaagttgcccttggagtcctggtagccgacgtcgccggtgcgaaaccacccatctggagagattgagtctgctgttgcggctgggttgttgtgatagccttggaagacattcggtccacggagatagagctccccaacctcacctgtaggcacctcggtgggttctgaaccgtcctcgggcatcgtcatatacttggcctccatgttggggaggagtttaccgaccgagccgacactctcgcgccattcaccccatggttgagtgtgagtagtagggctggtctcactaagaccgtaaccctgtttgataccgatgtggaggcggttgtagacagcttcaacaagctcctgagtaagcggcgcggcaccggagttcatcattcgtagactggaaagatcgtacttttcgactatagggtgtttgcccagaaggagaacaaccggaggaactacgtagctgaatgtgatacggtagttctgaacatgctggcaccatttttcgaggtcaaacttggccatgacaaaaagctcatagcccttgtagatcgtttggtggacaagacatgtcaagccgtatatgtggaagaatggaaggaaagcaagtaagcggtcacccttaccatctgccccgccattccacgtcaggttaccggcttcgcctgcagccaactgaaggctgttggcgacaatgttgcgatggctgagcatgacacccttgggaaccccagtggtgccagagctgtaaacaagaaacgagagatctttctccgggttgatcttcgtgcgacgataacgagtggctccggagatattgcggatagaggtgaagtgtttgaacctggcctcaggatcgcgctggtctcctatcaagataatgcggtcgtcagggatgcctacctctttcgccgcggctcgcgcaactgagagaacaggtagttgagtaacaactgcctttgcaccagaattccttagctggaacgcgagttcctcaactgtatacgctgggttagagggcgagacaacaccgcctgcccagagcgcgccatacatgacaatgggagtgtcgatgctgttaggggtaaagagcgcgaacatcgcctttacgccagtcaaagagagacttcaggccttggcacaaagtaatggcagactgtttcacatcattgtaggtataggagcgtcgggtgtcggcatccgtgtagataacttgaaaacgtcagttggggtttggcaaaactacgcaagaggtaacctcacccttgttgtcagggaactgcctatcctttcgctcaaagaggaatgcccataagtcgatgttgggaatgtccactggagggtattgcgaatagacaggcatgtcgagaagagggcttgcggagttggagaggggacggcttggcaacggagaatgcggggggacaaagcgaacgagtgcctggacggtgacagacaagccgcgaggagaaactgggagatgaagggaagaaaaatttaaatgtacggattgtctaggcgaataaatcctgaatattggagagatagattactaaacagcacccaaggctccggctatacgatcgtctatcctccatccgcagtgctcggccctcggcaccttgtcacctgacttgaccccagattaccgcatccggaaggagccaaacgtttccaacggtctcggccagacaacgcttatcagcggtgcagcggtgatcaacatcaggtacactgggtctttgcaagctgcagattaattgaatagagcaatggtgctatatctatctattttcaatatatttccgaattactttctatgtatgctgtatacagagtacagaaagacgccattgttcgacttgcttcactacctggacttataatctgccggcagttggtggatcactttagtgtacccgatcttcgtcgtggttttacagtgggacatttaccgggcgactttgcagctttgtgggttttcgaataaatacactaattgtt

SEQ ID NO: 2166 - DNA, 1874 bp, Emericella nidulans
ttgggaggggcgccgcgccgtcaccggcagtctttgacattgccaaccactttgcttatatggggcggctctgagtgcgactacagcatgatgcccacccggacgggccgtcgacagttcctggaggaatacgttcggagctacgcgcaacatcagggcattccagagtcatcacaaccaaagattgttgaccaactattcgaggatgtagaccgctttcgaggtctgcctggtttatattggtcagcgtcacccccagattaagtggacgccatactaacagttgcaggggaacttgggcattgatccaagcgcaaatctcgcagattgacttcgactacgcttcatacgcggagactcggctaggcgagtattacgcatggcgggccgagacggaaggagcaagaggcgagaaacccttacgagagcgacgctgggcagaggaatgagtgcaggtatcatcttcaacagtgaatgtttgtacagcgtgtttcaacagcgtgcatgagccatcattaccagtaattagacaaaataaaaatctctagatcaaaccctatcgtcctttcaagataccactacctacagccgatgctgaacagccagctcctcctgcacctgcacctccaccctctccttgccgttcatgctaacattcacagttaccggtgctggcacctcaacatcgagtcctagcgccgcaacaaccctcctccaactatccatcccacgtctcgcatgctcccccaccgtgttcacatcgggatcattacacgtccttgaaaacagctctagactcacccacccctcgaacccgatttcaaagaacgccctcgcgatctccaacacaggaagatacccacccctctcctcttcacaggggaataaccgcgcattgcgactccagctcattcttgggggttggccctccacatgaaaggggtgcttctcgtccagcggcgccgacaaccgctcgccatcgacaagctggatgtagaagattttcctgatgtccagttctccactggagacgagagaacggagcgtctccatggacttggccacggcttgctcagcatccggcgtcttcccagtgacggaagcggggtccgcgtagatccggccagcgatgttgaagctatccaggcagatcccgaaattctctctatcaaccagcttgacgacattccacgctgcttcccatgtatcgacatgcgtcgaccagcagagcgcctcgtacacaaagcggaagccctgctttacaccgatatctgcgatcgtctgcagatctgagacgataagccttatgtcgccgcttgttcgtgcagccccggtgacagggtcattctggaggaaatttgcggggatttggatgagatctgtgcctataatgcgggcgatcgcaaaccagagcgggagtttctcagtgagcaggtacgtcgtctgatttgtgtccaccagaccctcgtagaaaccgaatggttgcaggcagataaatgtgaggttaagttgcttggcgagcgaggagatatactttgccgcttgagtgagggagccattgaatgacgatgaggcgaaatgggagaggtcatcaataaacagctcgatccccgcgaagccatgagcggccgcgacgcggagcttatggtcaagagagtgcaggcccggttttgacagggacatggttgggataccgattttgaggtttgcgggcattttgaattgccgactcttgggtctctgctggagatctaaaggtatatattatattaagaatagaatgaatgagctgattgagttgaagactgatcgaggagcagatggcggtgattatgtaccctaggcgaagtaagtaggtaggtagggtatgtttg

SEQ ID NO: 2167 - DNA, 2229 bp, Emericella nidulans
aggagttacaaagggtatatgagggcgtgttgatgggaaaaaggcggttaaagggaatggaagagttggttcagaaagaaagggtccggttgcttaaacgtgagcggagagggtagtcgcatttggttgacacggtagaaagggtgttcagcaaaaacggggactttgcaactaagaaggaggtggcccggcgaattgacgggagttcatgttggaggggaaggtggttcgcgataaataaggctggaaagttagatattaggttgtaggccgacggggaactgaagcttcggttggccaaggattctgcgagcgaaagggaaaagataccatggctgagggggttccgaatggtaccgccaaactgcccccttcattcaccggccaaattagcatcagccgggagagatgaaaagagcgcgcgtgaagatggccacgccggctgagcaggccgtaaatgcgatcatggaggctatggaggagtaggggacggaacatcagtcgcgtccgcgttggaggagacaaggcccctaatcgcgtctttggtacgtggtgtatgagaatgaaaagtaggacgaatgtgatgtgcattatcttatgacatatgctgatggggatcgcagacggttcacctgcctgccgtgggatatacaaagctggcgcagactgataacttctttataacccgcacagtggagtggagggatgcagaatgaccgaaaagcagacacgttgtctacagggcacagacattgatattgactccttatttttggtattccatgaagcagctacctattaaatctcggcgcggacgtacacatcggcagaccgtcgattcgcaccctggacaatccccaggtacgctgcctttcacacttatatacacagctgattgcctacaccaccgcccaacaagccttctgcctgcgtcgcctcagccggaaaagatcgttcatctgcctaggcttcaagcgaagcctccaccatgaccctcaatccctgctcgattgcctcctcattccgccagcctgaccaagtgtgatcgagtatcccccaggtatcgtcatagtcctggcctccggagcgaatatagtaactcccactaatggtccaaaccatccagccggcctgctgctggggaatccactccctaatacacgaagcatagacactctgccatgtcgtttcatcctgcgcgaaaccgaactccgtcaggacgacgggcatgatgttaacgatgtcggaactgttcgtatcgagcgccttgaaccccccgttccagagggcgccggagagattggcacagctcgatgcgcctgtatcgtagttgtgcaactccagcaccagtttatcagcgtaactgaaatcttcaaggtagaatctcgtcccctcacccagatcgctcccagtcgggatcggcgcaagagttgtatcgtagttcaggcccgagagaaagatcaacgcgtccggattcgcagcgttcaccaggtctgccgcttcagtcatttggctataccacgtttcccagttgtacggataactggggtttgcgctggccggctgtcgcagttcatttcgcaacccgatagacgtgaacgtctcccaggacgccgcatgggaggccatatactgcagcccgcgtttccagttgtccacatcgaagtacgtatccccaaaccaggcgttgccatcagtggtggagcagcaccacattgctttggagatatggttatctaggtgcacgtagacatcttgggctgcgcattcagcggcaacgaggtcgtacacttgcattctggttgtcgtattcgtgattaatgggttgttggttacgatctggttgaagacatccgttccattcgtaacgcccagagccttgataagcgaggctaggactgtagtatcgccatcattggcgtagatatcatcgacgagttcaatggggaacgttaggcggatcacattcatcccgatagacttaatctttgatattgtcgaggcaaccgaggcatactgcagtccttcgggaatcatggcctcaccggcgccgggccagtttacgcccgcgaatgttacgcgcgcaccggtagagtcgaggatccagcggccagaaacggtgaggggggtattgagggcggcatttatgaggccgggggtatttaggatgccgacgaggaggctaatgaggccgggtctcatagtgaatatggattgtggacactgatc

SEQ ID NO: 2168 - DNA, 2633 bp, Emericella nidulans
atctcgcggcccgccaccaatgccccatatcaaccggagtgcgaccatgcctaccccaggcggcggactatatcccggccagtcaggttatcaagatccgagggagagtacatatggaggcttgcttgatagctactacacctcggctcccgacgaccctgacatgccgaattttgatgcaatgccggactttgacaatggcaaaggaacgattgacgaagctctaccaggactcgaacagccaaagccaaaacctgattctcctgctgagtccaaaccgccgcaagggcaatacaaagctttcaatccggcaatgcataccccgccagaaaccggtactccttctggagcaaatcaatttgccgatgccggattccagtttgacctgcccggtgagcccaattctgctggtccttctcacaacggaatgggccattacgaaccttacgaggatcatttgcagtcgcaatacccaccgcagcaggcaggctatgttgaaccagaagttttggatccgcagcaaaatcctgatgctcttccacaccaccccatgccataccgcccaggtcacgattctggcggaccaccgcctcctgtgcgccaatacaacggtgcgatgaactcccaaccacaatctgctccaccacaaggggctccggaaggcccagcgccaccggagccggtgacgcatgctgaattggagcgcctccagcagcaagcgcgaggtaacccttcggaccacaaacttcaacttactctcgcgcagaaacttgttgaggcctccatagtcctggttgaggccagcagactcgacccgaagtcaaaggcgaaagcccgggagaaatacaatattgatgcccacaaaattgtcaagaagctggtttcagccggctacccagacgcccaattctacatggccgactgctatggtcaaggcctcttgggccttcagaacgatgctaaggaagcgttctcgctttatcactccgcagcgaaacaaaaccacgctcaagctgcttaccgagtcgcagtctgctgcgaaatcggacacgaagaaggcggtggcacgaaacgtgaccccttcaaagccgtccaatggtataagcgcgccgcctccttaggcgaccctcctgcgatgtataaaatgggcatgatcctcctcaagggcctcctaggacaagcccgcaacccacgcgagggaatctcatggctcaagcgcgccgccgagcgcgccgacgaagagaatccacatgcccttcatgaactcgcccttctctacgttccgccacagagaacgatattgtcattcgtgacgaagcctacgcttctcaactcctgcatcaggcctccgaactcggctacaaattctcccagtttcgtctggggcaggcctatgagtatggtcagctgggctgtcccgttgacgctaggcaaagcatcatgctctacagcgccgccgtgcgcagggcgagcaccaatctgaactcgctctgagcggttggtaccttactggcgctgaagggatcttgcagcaaagcgatacggaggcatacttgtgggctcgtaaagctgcggcttcgggtctggccaaggcggaatatgcgatgggatactttactgagacgggaataggggttactgcgcacctagaggatgcaaagaggtggtactggcgagctgccggttagtcccctttagcttctaataattggtccatagttactaactcattcttagcccaaggattccctaaagcccgtgaacgtctcgaggaactcaagtctgggggtgcacggatgcaaaaaactcggctctctcgttcagccgtgaaccagcagaaatctaatgatggggactgtgtccttatgtgatgcgatgcaatgtgatctgatctgacgccaagcttatgtactacaacctcacccttctgtcaacatctatgtccaccttcaccacccaaacttacattcacgatacctcaattttttgctatattacttaatacctctatcttatttcaccttgactacccttttggactatgctagcgatgcccttacattcatgtttactttctggtaaatagaggtttatacatcttacgaggcatcagacgatccgaactatgacaatacaaccccgttatgggagctactattatttatgtacataaatatagacttgaatacatataaacatatcaatcttaatttgtctccaactttgcatcatggattcctgatacatccaaacaatcgtacaataatacctgcagcaaaactcgcgagacattatacaatggatgtatgaatcgtacatatacattaccaaatccagtctgttccagagaattctgaagacccttaagatggatccaccgtccttgaggtgaagtgaagcgcatgactaatactgcgctcaattccgccttttcaatcacaattccgccccttgacaaatgtgaagcaattttttggaccagatggtagtacgagtacggtatggtgacagggtcagggctgcttactattgattaattaatcttatgattcgagctgaaccgtatatccgaatcgtatatatggttcccttacctccaacttcctataactctagagcgctacctctgttta

SEQ ID NO: 2169 - DNA, 2377 bp, Emericella nidulans
ctttccttgcttttttccgagtggcggggatttttcagctcccgacatgtaacccaatcttcctcctccccgtcctcctctcttgcttcgctttaaacccctatctttaatcgatcaagaaggaggccaaggaggactgggacgagcatggatcagggtataactgtttttcgcaagaatgaatcagacctccagaggcaaacggaagcagcggtcaacaagaaacccaagcgcggtccgctcaataccatcgagcaggccgctctgatcaaggtctgcgagaagagagccagatacgatgaggtttgcaacataacttcttcacaattctggttcggaatcgagatggctctcgaaagagagattggtcgtcgctactcgcactattcctgcagaaaacgcatcaacgactacatcacaaatcgtgctatatatcaaaacgacatcaagaacgggataaaaccggatcctgtgcttctgcccgacccagagatccgcaagctgctagatcgatgggaggaaatggacaaatacaaggaacagctggaaagagagaaggcattaggtcagcttgtgggacgggagcctgaagtgccgacgaaaaacaaactacagagagtcgcggactgggtcaggagccttccagacccggagcctcaagctagacccctcgtcactccgccctccaccaactcctcccaatcgccagtcaaacaggatgaatccactgttctttgggctcgatatcgcaaaattgaagattatcgggccattgcacggtctaatcaactccgtgcgttgaacaatgatttaacgagcagtcgacagcttctatcgaatatcaaagaacaattacactcgacactctacgatccgccggccaaccaaacaacgacaggtctaaagcgaactcgggaagacgaggtctctcctgaccgagcagcgccacgtcctcgaatcgaattggccgaattggaggctatggtcaagccaccattgaaacagagtcctggtaactcgaatgtccttactcaatccgaaattgcgcccgcccagatgccgattgagacggtattcagcaaattctgggaaagcatgctgccatatttcaaggaacgagctctgaaagatggcatatccctcataaagtctgagtctatcatgcacgacctatttaaagaagttggggccgccatgaccaaggcatttatgaaactagagcagcaaacctctcgatctccttccgcttacaagcctcctatataagtccgcttcacgtcgcattcgagcatacgcatcgtcatttctgctatctacgagcattttctgtcctatttccgtttccggcgcgcattgtttcgtcttcactttcatcataggccacttttgagcttgattcagttttctcattagactgcatagagtcgataccccgttttctttgggtcgtttggatttacgatttgttttacagttgcatcgcaagcatcgcaagcatcgcattgcatatctgcttgacatctcttactcttctcttattctcctgtacatacaagactgcctgcccaattgtggtgctggatatgaagcatcactcagattgatgaatgaattaaagtaaacaaacacgaaacaacttcatgcccatgctgagtactcgaatactcaatcaaaaggttgcaaaatcacattgccatctctactaagtcatacttcgtgagatcaataaataaacgccatgagagccaaagtcgctatactatactcatccaccaccgcctagaaacgcccgccctgatggtatgcaaaaaaaagacgccaaatgccgatcccaaaagaaatctaatgacataaaataatccactgattgacaatctcctccatatcatgcgcaataccccactgcgaaattagacaccgaaacagcttctgcatcgaattcatctcataaagaaggttgcggaccgccgcaaccccaggtggagaatccgtccttccctccgttacaaaccggctcgtttcagagcctgtagatggccggaatccagactcacagccgaggttcaagtccgcatgcgaaagcagcgcgtcctgccatacaactgtgcgcgggagatgaatattcgctatacccgcgagagcgaagacaacgtagactgttgctgcggcggaaagcgaagagggcatatggatgacgtgggcgcgggcgcggggtggttgtgcgatgatgtcttctatggcgatggcatggagtaaggcgcggcgggcgtcttcggtgttaacgcgatttagcatggcaaagcctggacggagggtgcgcgaaccgccaggaactggttgcgggatgtcgtaactggtgcagacgtggcggcagggg

SEQ ID NO: 2170 - DNA, 1918 bp, Emericella nidulans
atgctgggcagtggttgctgtgggggcggaggggactgttgacaattgacatgctcgctggacgaaccccttgaactccaatcaatgactcgatcgagtattctttttatctcccagccagtgttccgttcacggccttgcctttgtccagaatacgactgagcacatcgttctctatctcagtctcatttctatgaagatcttgcccattttatcccggcgatccctctatcaatagaaatctagcagctctgctcaatcccctctattcaagtcaaacgcatcctcacggcacattttcgcttgcaattcctgaatgtcctcgaacctgcatatcgctcaacatgttgacggttgacgagtcgtgggttaatgtgcagcagaagacattcacaaaatggtccgtccacccgaaagccatcccctccgtcgaagccggcctgctcacccgcaccgcccatgtttcggagctcgccaatgtgatctcttttgttctctatggctcggattcagctgacttcatcttctattcttgcaggctcaataacaagctaaaggttcgcgatatttttgtgaataatctggtgccggaactttcaaacggggtaagtcgtctatagctccagcgcgaagcccgtattgctgatactgcgcttgctgttattcaggtcacacttatccatttactcgagatcctcggcggagactcactcggtcgatatgctgccaacccaaagcttcgtgtgcaaaaattcgaaaatgttaacaaaagtctcgactatatcaaggggcggggaattcagatgaccaatattggtgcggaggatattgttgatggtaaccagaagatcatcctaggtctaatttggacgcttatcctgcggtttactattagcgatatcaatgaggagggcatgaccgcgaaggccggcctcttactttggtgtcaaaggaaaacagcatgctatgagggtgtggaagttcgagacttctctacgagttggaacgacggcctcgcattctgtgcgctcttagatattcaccggccagacctgatcgactatgactctttggacaaaaacgaccaccgaggaaacatgaagctagcctttgatatcgccgcgaacgaagtcggtatccctgatctactcgatgtcgacgacgtgtgcgatgtcgccaaacccgacgaacgatccttgatgacatatattgcgtactggttccacgccttttcccagctggagagggtagaaaatgcgggacggcgtgtggagaagtttgtgaacaacatgcacggcgcatgggagatgcagaactcttacgagaaaagaatgagggaactcttacgattgattcgcgcccagcgtgaagagtggaaaaacgcctcattcgaagggacatacaaggacgcaaaggagcaggcctcccagtttgccatgtataagcggaaccagaaacgtcagtgggtagcggagaaatcagacctcgcagctctcttgggaaatatcaaaacgaagcttagcacgtatcgccttcgtgcttatgatcctccgccagagttgtctcccgaagcctgtgatcaagagtgggaatgtttgacccgtgacgagcatgagcgcagtcagctcattaacgaaaccattcgagatattaagaacgctctgcgccgctcattcgcagataaagcgaacgacttcgcgcttaccttgaagacgctgtctcttgcaatctcaggccttgacggagacgttgaagatcaacttgcccacgtcaagcgactgaacgacaacttaccgccgctcgatgccttcttggaaactattgcggagcttgatgagcaatgccaggaagcaaatgttgaagagaatgactacacaacatatacattggacgaactggcttatgagttgagcctggt

SEQ ID NO: 2171 - DNA, 4158 bp, Emericella nidulans
  unsure (1)..(4158): unsure at all n locations
acggatctgtctgctataccaggttccatttgcttgactagacccctgctctccacatacgccgagtgcagaagcgggtcacaggaaggtattatagtaacttgcatccgagcaggggtagagagctgagagagtatgtgagaggatgtgagaggatgtatttttaaactagagaagcctgcattggcgttcatatacctgtcagtcagtacggatagcgagctgcacccaacactagcaggttgcaagcatggtgaaaggctccaaccgagctttactccactccatcgtactatatcgtagcatatcaactgaatacagactggcagagaacacaaagaggctggtatcgacgttgtcagcatggtcaaggaccactagaagcgctactgctggaccagagctcggtagacacgtaggccgcactaatactgaacttctgtgacgcagtcgatctaagatcagcaaagtgacatcaaactacgggctgttttgtaagtacttgggcgctaatagtggacgggggccgggctgggctctaatgacgaacttcctccactggtctggacctagagaacggcgatccttatcttccttcacgcttgacaaatacaaagagcagggattgactcgtatagaccccagttgggcatttgagggggccactacagttatgcagccatgcattcagcagtttctcgatgtgctttgacagcggcagcgaagctggcatgaggatatgctgtccagaaagagactacgtcagtttaagaccgctatgatgggatatacgttgctgtgaaccgtaaggattctagctgcagactcatatactgtacaagcagtgaaatcgagaccaaagagagaaaagaaaagataaggataaagccaacctcagctacatactcttctaaacccactgctcgatggcagtggagttcgcgcatgacaacggagctggtaggagaggtgacgatttaggtgcaagtagggcgaatattatcaacgacctaggttcctgctatccccgatagaaaccccccaaaaaattccaaaaattgccaaaaaggcaaaaaagcttaccccctgctttccccaagtgacgggttggccctttgacgtctttgtactccgtatgacggaccggctctgcagtaaggctcatactcagggtccagtcccatgacttcatggggttaagcactgcgatgtactgtgtaccaagacgacggagacctccaccaggcctatgacatacgtcccatacactctgtagcctcttgccacactcttccccagcattgagtttgtcgctcatctcgatctccttcatccgccatcataatagcaggagcattatcatcatcatcaatcatcatcgccatatcatcaccatcattatcaatcgctggtgccgtaatttgatgctctgttgtactcaaagagtactccgtactctgtcactctagactccactctatactccgtagtcaccgtagttctaggttgacgtcatcgccataacgtcgccctaagagaatcatgtactttgcctcaggcacggggcccgtcagattcaatagcgcgatagcgcgagtccacaacgggtacaaggcgcagacgctgttctcgcagactttgcacagattcccagatacccagatagccgacactccacagttggctgggatgtatagcaatcctcgtcttcgcagatctgttcagatctgatcagacctggaccggattagatcagtggcattgcagtggcaacgcaatggcaatggcaatggtcatggccgagtccccgtcagtcccaaccctgaacatcgccatctcgaaaacccgctgtttctgctccccacagtgctattgcttggcaaacccgcgggaactggataatgggatggactgtattattgtctgctcatacatatcgtgtacggagccggagactagttccgaacgatgtatttgctggtaagtatcgcccgtaccgcatatggtttgtcggtctgtaccgtccgtgtcttctctgggcacttgaacactcggatctcgagctgtagagtgaggtcatctgcatctggactccgccgatgaaggcagagtggaggaactgcggaagcgtaacgccttagggctcaggaactgtgatgtcattgctgctcttctcagccaatgactgggtctgcacgatgatcaccatgtggccgaccctctgcgtctgcaaaggtagagggtacttcgaccggacgatacgtagtgatacagtgatttgtcacaagtaatatgacatccctgtgctgcggctcgctcgacgccttttaagcccatcgaattcggacctgcaatccgaactgcacctataatttctgatccaaactaacgcgaacgtgactgactgcccgacgattgactgcccgaccaactggtgatacaacattctacctcttataaggtacgcggtgagagctagggttccctggtccctcatactgcttcccgcttccccttaccctgccagaacggccggtgttggcgatggcctgtatcaggctacccaatgttgactgtcggcctcgacgttcgtctcaccttggttcacccttcggcgatgtctccctagcggccgactcgacgcttctgatccataccagcatgatgtgtccatgccagcatgactgactcgtcacagacatcctgtccagccatccccaagatacactgtccaaatgccctccgccagcgcccatacagcgtccgtgtcccataatcaagactctggtccgcctcccggcgccatgaatgccaatgtcagcgccagcaaccgcaacgttatctaccccggtcaatctggcggcagcggcggtcacagccgccgctcgtccaccaccgtcgaagactattcgcgcatcatgctcgagtacacccaacgccgcatggccgggtttgcagatcgccccggtgacagcggcagaaggtcagccactagccgcagcagcaggagcagtaacaccagtggccagagcggcacttcgatgagcggcttcctagcaggacaagcaacgggcccgggccctggatctggctctggctctgcactgactggccgcacccattctccggctgattctaagatccgccatgttgactttggcgcgggggtctcggatggcgaataggaattgtcgcaggtgtagtgcagcgcattacgttcgacagttttgataatctagcacaggcccggagtcttggtttcataattgagcgagtatgaaagcaggtctttcagagaacgtcatcgcgatcagctcgacctgatatcggcagatgtggttgcgactcaatcggtccttagattttgagcgttaaattctagcgatagcgactgcgggtatgacaacaatagcgatactgcgacaacagcaatagcgacggtttcacgcctaccttgcatacttccctgctctttctttctacagcctcctacccgtcccttcttccccagctggggctcttgttttgagtgcgtttctgctttacagctacattgacagcgacatcctttcttttctacatccttattgatcgtccgcctgcttcagttgacagttataaacgaggcaggtccaaaatatcctaccgtattgatctacctgatgtgtgcgatacctgtacgacgtaatgacccttcgttttacgccgatgtatcctaaggtctcaggagacggtatggcagcttgctgccaatgctagcagttgctagcaattgcaatgggatgcgtttgaattttgatcattgattctcgtggttctttgattttcttgtttccttccgagtctgtcaggactggcatatcatagtatataatagcatatatggcagcattacttacataaccagtaatcttgcgggtatgctacccaaatgaattatgctctgctatgctatgctgtgctctgctctgctatgctgtgctctgctctgctatgctatgctctgctcaagacanagcatgaatggcctcatcatcattccttccttatgcaggcagggcgcgaaaggcttatctctaaccgatccttgcttgtcgcatggcttgcgctggcttgtagcctccagggcaggctgacaaatggacccctaccctagcg

SEQ ID NO: 2172 - DNA, 1903 bp, Emericella nidulans
tcgccctttcaataatgggatccgcacaactaaccctaattctctccaggtgtagccggactgacaagactcagcacatcagtaaccccccactccttcctggcagccttcagtgcatcccgaatagcgaaaaacgccgcgctgcccatgaaaagcggtggctcgccgacgcctctactgcgctggatcgtccgcaggttctcccactctacgtccttaaggagactaacgttgaatatttgcggaatgtcacggaagcccggaattttgtagtttccaggacctttagtgaatatttggccagttgtgcggtgccaaaggctttcttctgttgtgaagagaccctggccctgaatgtatgcgccttctatctgaccgtagtcgatggaggggttgattgtgcggccgacatccattttgatatctgcccggaggggcgtccagtcgccggtgagcgtatcgatttcgacttcagcggctgtaacgccctgcgtgaagtagaagaacatttgacccttgttctcaccccaggtatagccgatgtctggggtgcggtagtagccttgggcagaaaggttgacacggtcgaagtaagcagcgtgaaaaggtccttcaagggtgcgttgggcatcttttcacggtagggcttgagacgttcgttcagttgggtgcaggcgttatagatggcatagccgttgaggtcggagctggcagaagccgctgtagaggatgtgtttgcgacggtgttggtggctgtttcggagatgaagacgtccgacaagggaacgcctagggcttcggctgctatcatggtcatctttgtgtggagaccttggcccatttccacgccgccgtgggcgacgaggacgcttccgtcgtggtagatatgaacgagggcgcccgcttggttgagaaagagggccgtgaaagagataccaaacttggtggggataatggccatgccacgcttggaccacttgtgcgtgcggttatattcctccacggccatgcggcgctcaaaatactcgctcacatatagaacctgatcgtacatcaacggaacatgccagtccttaagttcttggttgaaatgagtcatgtcacccggttcgtacatgttgagcctccggagctgttccacctgaaggtctagtttatctttgacttctgagatgattgactcggcgggaaagagaccttgagggccaccaaagccccggaatgccgtatttgagacggtgttcgtcttgcatatcctgccccggacgtaaatgttcgggaatcgatatacgttgtcaatgtgtgaaagacttcgctccacaacagcacctgaaagatcctgtgtatgtccaccatttgcgtacacgtccgcatcaagtgcaagcagcttgccctcccttgtcaccccgactttccatttacaatagaatgggtgacgctgtccagaagtcgcaatgtcttcatcgcgattgagcatacaccgcactggacgcctgacttttgcggctgctgtggcgcatatacctgcgagctggactgaccgcgtctctttaccaccaaagcctcctccaaggcgcttgacccttgacacgatcttgttggcagccacgccagtaacctgtgctacatatgattgcctgcccaagtcagctttgctcagagaaatagaaatgaacgtacgtttccgtcggattctgggtactgctccagatttccatttcgccgtcttctgctttagggatagccacacaagcttgtgtttctaaataaaaatgttcctggccccccattcgagatacaccctcaaagacatggtcagcgtctctgaaggcgctttccgggtctccattcttgatataacggaagctttaaatcgcgcacgttactagaggatcagatcccc

SEQ ID NO: 2173 - DNA, 240 bp, Emericella nidulans
  unsure (1)..(240): unsure at all n locations
acggaagctgacagagtgcgtgataaagttantgattagattcaagtgcgcggttgctcaaggagatactgtggncnttgaaaacggcgtcgatttggtgaacaatggaagagngaggcgtttaacatgatagtgaatgagcatatcgcttgatggagttagtgtagatggtctggggctagataatgtnttggtagtcgagnatgggacagcaggttgacanagtaggtgagaacgtag

SEQ ID NO: 2174 - DNA, 3337 bp, Emericella nidulans
aatcactgccctcactcgtccgcactccatggctctcatggttagcgcatatcgccctccttggcggacttccactgctgcgtcaggtcccggcttcggccactttcctatcttgagatgcaagccaggacgcgctcttgtaccccaacccttcgtctttttgtctagctgtctctccgagttctcgtagtccaataacagctctgggagggtcactcgtcatgcatttggaccgttgaagctctaacttttgtgctccgcaagtaaccttccctgatccccatacttcgtcttttacgctgcgacacaaatttttggccgttcgcttctctaagccgtccgatcgcccgggtcccgggtaggtcgagcaggccgctatcgctctggggcaggtcactcttgcacctgtatcacacagttctctttcagcaaggggcgcaaatagcacgcccgaatgcggtgcgacctcgaggctctcacaaaatctcacttgagcattttcgagccaccatctagccctcatctctatttcccgcgacccgtggttaccgattgggtggcttaatttgagctattgcggtcttgtgtggcctagtaaacaacaaagagtttacctgtaaactgcttgttaaaatagatcgtcatgctggtgcaggtgaaggctttattggttagacaaccttagttcatgtgaaggaatctatcagcatgtgtagctaggccgtggaacccaattgacaatatgccggtctttatagagtcgattctgtttcctgatgcggacggagcggtctgacaactaagctcgtttatatatatagcgcgcggggagagcttgccgggcatgctctgagtttatgcttgaattcgctctttcatggcagagactaacccgatcatccggattgataacgagacctgtaggaatgaatgttactgtgtggttgttcagaggaagtcttgattaccttgatcgccctgagtcatgaggtcagttcgggtgtcaaaaggtcggcaagcattgttcttgcatatggtccagaatttgataaacgtagtagatcgttagcttgaatgaaatcttcatgataactctatacagggtcgtcgctgctgaggttgcagtagtcatcgtcctcaggtcgagtgcatggccgagtgagcccaacactcgctaccgactatcaagaattcggcgaagaaccaaaacctttcatcacaatcagatccagatcaaagatcttcaatctggcagatataacggcttactaagagtatagtagccgtgcattccagaacactgcaccttgccgttttgctataaacagcagacaacggcggatggccatcaccaccgccccatgcatgatcatttcatgctcgctctagtcgaccatatccaaaacgcaggaaccattttgaagtcctcgcttgcttgtgtatcaacgggcggtgacacagagtgctcatctcgcatctcaagctcagaataaaagttgggatgtagaccggcttcaatccggcatctcacccccgttgcggggtattgagggcctgtggacgtcgatcagtgaacttgatagtatatatcgtatgattcccttcgctgaaaaccgggcacagctcaccagccttgcagcttgccggggcgggggccgcatattgggtcgagctcccaactatgcggtcaatagcattcttgacagatacagcagatgaaactccttatagctggtactgtgagattgacccatcaattcctcgtccctgagctcttctcagctagcgttgccaaccacatacgaccaactcgggaagaagaatgaactctctctctccgctaaagcccgctggcgagaacatctggctctacgagccaaccacgacggctaacaagcccgtccctgataaagatccagcactcatcgtcttatgtacctggctgggaggtgcgacgcctcgacggatatgcaaatatgtgagccaccatcgtcagctctttcctgggtctgccatcctccttatcacgaccggtatgatcgatatcacgattcgctcgatcagcgccattcggtctcgattgaagcccgcacgggaaataattcggcggatttttgggctctatgggggaggcgctggaggcgctgagaggacccccaaaggagtgcttttgcatattttttcccacggcggcagcaacatcgccttgcagttgatcctctctatgcaaaatcccaggcacccgagcggcatccacagacttcccttgcaagggatcatctttgacagttgtcccggaggcaccactttcatgcgcaattatcacgcgagcgttcattccctgccgcatgctcctccgcctatacagttgctgagcaaagcgctgctcttcccagctataggggccgtcactggacttcaagccctaggggtcatgagttccatcggcgagatgcaaaagcagattaatgatagcttggtgatctctgctcgcgtcccgcggttatatctcttctcgaaagcggatgtgacgatctactgggaggaggtgcaggcccatcttaacgatgctagaatccggggctacaatgtgtctagtgaaatattccataagagcccacactgtgctctgatagctgaagatgaggaacggtactggggcgctgttcaacggttctgggaacagattgtggaaggcaatgcgctggcggatatgatgacgggtgaggtcgctttaagtgtcccagcgggtgttcgaggaagtaaattatgattatactgcaagaagctgtttcgcaatgatcagatagcgcacgttctatgctcaattaatccctaggtaaagttcctttgtagagtctagacacacgattcaggtactgaacggcaccccacattagagtcgccggcagaaaacatctctctaacttcaacctctctcctctcttccatggatcttctatccatcctccctgaaatttcgataaaatcgttctcccatatcctcccgccgctcgaaagaagcagagtcaatacagtcgacctcatttcgctggataccctcgaaatcgcgaaacgcgcccacgttccccctgcagacgttcgccgtttagccaaccacgtcataaaagccctgcacaacgatgtcggatttgaagaaggcccccgtcctgagcaggaacagcctgatagcagccctgacctcgaattaccgctgatttcaggaccgcgaacgaaactcgacctatcgcaatggcgcacgattagcactcttgacgccgccttagataccctgttgaatggaggaattgcaaccggatatgtgaccgaagtgact

SEQ ID NO: 2175 - DNA, 1255 bp, Emericella nidulans
acagggctcactttccggaataaatgtaccttagaatattcgcctttgcacaacgaggttccttgcttctccaccattgccatatatcattcttgaatggtcaggctaccttatagatagttatcggcaatcctagtccaagagcccgtgggatcctccttctattttgtatccctgagtcgtatccactgttactcacaccgttatcaagtcaagaactataaattagacgcaaaaggataaatcatggtattggcttgttatttcgccgaccacgtattaataacactacccattccaacataatatactattttgaggggaaagaggctcgctctagcgctggtcaatactaataccccaaagggccgtcagttaaactgttgatggatctagagtttcatataaggatggtccatgctcagatgaaagtacaaattctggtgataattcgagcaaccctaacggaactatccgatgaccgatcacgtgcccggccgatcagggcgattccgacgtctagctaaacctccgaccatcggcaaaccatcacttcattctattcaactcacattcaagataaacacctcaaaatgcttgctcgtgccattcagcgttgccaaagacccagattatctctctatagacagctgtcaagtttccgtatcagccaatccagcctcccggcagcctattaccgcggcggaacatcccgcgccgtcttcttcaaccaagatgacctccctaagagccgggatgaatgggccccaatctttcgaggagtaatcggcagtccagatccctacgggcgccagctcgacggcctcggcggcggaatctcgagcctgtcgaaagtctgcgttgtcgggaaatcagcgcatcccgatgcagacgtggactatacatttgccgcattaggaatcagagataccgacgtcgacttttctagcaactgtggcaacatggtaagtgcggttgggccgtatgctgttgacagtgggcttttcgccgcacacaaggacgccgaatctgcggttgtgcggattcataatacgaacactggcaaaattatccatgccaccttccctatcattaatggagaggctgctgcggctggtgaactagcaattgatggtgttgcggggacggcggcgcctattaagctggactttgtcaacccagctggatcacggacggggaagttacttccgactgaggctgtcaaagatgtcttcgatggcgtcgaagcgacgtg

SEQ ID NO: 2176 - DNA, 1464 bp, Emericella nidulans
tgatttgaatatttctacgcagaatgagcagtcaatgatctcaccagagatcccaatgaccaatgaggagcctgaagtgcctgcgctagcggattaacctccaactagtgcccatctgcccggttgagctgtctgttcggaggggctcggtcgcatctcgatgctggatacggtgtagcactgttgacgcactactgcagaggttgcgctactctgtaccagcgttctcaggtcattctgggctaccccacgtcctaccaacaggatacacacgacagaaacaggggtcccctgcccgccggggtgcccgaggcgtcgagataggtgatctgcccgattacaacttgtaaatgtcacctgctgggacatcgacgcaataccccttgcgtcaaccacaggacggtcagcctcgcatccacgtttcctcagagtgacactgccctgataacaggaccgtaaccagttcctctcttgcttcccctcctttggttgaaatttccctgatcttcactgcggccaacccagtccgtctcaagatggtaagatacgtacgctatgctagtcaggacggatcggcggcgcccaacatgactaacagtgaacaccaacaaagcgtggagcagggcggtgagtattcccagcgaagatctgtcatgatttcctgaggatccttattgtcctggcacgatagaggccgtgctcaggtcgcgcactcgaaagagctgtcacaatagccctcgactagtggttttttcggcacggatctccccatcgagtcgatggctcgagcggtctgagtgggaagaacacggttagcttagggcaagactacccatgaagaagagtaaatggaataactaatcaatattaataatgtaaggatgcggagccggacttcatgacttggtcgaatcggtccaggagaccggctccattgggacacactctcccgaccacctggtcatcagcccaaggatgcgctaaatcgagatttccaaatcactgggattgcataggcgtcagattgaaaattatatagtaacaatgacaaggatgtcctcaagctagacggccgggacgcatggacagggactaagaacaatagtcgtgaaagctgctgcccttagcgggaaatggaagcgatggcggcgggggttaaccgccgggcctgctcggtactgccttagttctcaggcggagataagcacagccacatgcaggatcgccgactccgaggttcgtgaagcaaaggaaaaagaaagttacgaactaaaaaaaaattttgctgaagcccaatggttccagccacagagtgttcaagccacacaaacaagagcggcggtgcgtggagcagtggcggagcactcgtggcttgacaccaactgacaatagcctcaggtttccaaggtcgagttggcgcgcttctccagtccgaggtctagtagcccactgttgtccttagaa

SEQ ID NO: 2177 - DNA, 1053 bp, Emericella nidulans
gctatacttttacttctgtgtcaagatctaagttctatccaccgcgtctagagctcttgcgcgacacggtagtctccgaccttcagcagagctccaagacagtttgtgagtgaagccgccaacagtacactctccacagccatgtctggcgatactggcgcaaaacctcgtctccattcaacacgctcgtttcctcgaatggacaataattcggacacgagagctcccactattcgttcaagagcgaaaaccgtacagtccgtggcgataccagagtcggaagactcgcttcatctggatctttcggagagcgaacacaaccaagttactggcccagacttgttcgagaagtcagcatcatcatatgtggaaaatggcgcagacggtgaaacttcagttctctcgcagaatgtaccgaatcagcaagaggagctcccgattgagctgatcagtcttactgaccggtatggagttcgttgggttctatatcacggccgctgattttcgtacagattcgtcagctccctcagcgcgcgggtacactcctcccctccgaccatagaaagaatatcgacgctcttccaagacttctacctccgagcggaatcccacatagcgactcatatctctgcccttgcttcccggataaaccgcgacccttcgccgcacctaccagatcggaaagataccaacgcctccagccgccagatgttgacggcttcggaagtgacagagaagcgaatagctcgaaagcttttagcgtctaagcaggtcagtcttgaagaggccgtagaacggagagtttgcgaaagtatctatgataagatttggagacataagagtacattggatgaagtcagagatgaaaagttgcggtcaaagacggcagccctgcttttggtcggaatcaacctaaatgagcttggtgtcgatatcgacattactgcgatcgacgaaaaaagccaaaaagatgctgatgactgcttttcactgcgcgtgattctctcatgaaatgaacgaggaaggtatcattggggagcttcgacacctgct

SEQ ID NO: 2178 - DNA, 2750 bp, Emericella nidulans
ctgtttaccatttagtgagaagtggctccgtagaggccggaacattgcacttacttttcctttattgcagtgtttgaggatagggtggttggacttattgagcatcaatctcagaatggtgttcaccacacgctctggcgttttgatagcagggtccttattcgcgatgaatggaatacgatgatgggtgatcccagtttcttcaaggaacttctcgtggctctgtgtgtagggctcatcaacgagggtactataaaccatatgtaagccatagtcccacaatacgtggacaagctcttacattatggttcgcagccctagagttttgagcgccggaaggttccagggctggggaaacgcgcaacggtaaattcctttcacgacctcgccaaaattctcagggagttctagttttccaacatctgattcccccggatccaacggcgaaaccgtggtgacctgtttctctattataccggcaaccagcgttagcttgcaaggaagatacaggtcttcagctgaagaaactaaccttgctggctttcgttcacattattgatgattttcttcgtcaaagggtaagtcatcgtgaaggcgtgtccagagacgataggtgaataactcgacctgtcgtccagggtcaaaagaagagacaccgttggaactatccagagctcagaagagagtgtcaactcctgaaaaccacctatgtgtcgaattgagaggaaagaagaatgtgattgcaaatctgacgtagaccggaagtctagctgtctttttgaaggccaaccatgttggatgaaggcattaaatagtcgagctgaacagaacagacgacaaaaaaagctgctttttgattaacgttcagtgagtttcagtgagtggaagagatgttgggaggtaaaggtttggtgttatagtaaaggtacgggggcggtgaggtgtgaagagaagtaaacaagtgcaagatgctgcagaaaaaaaggtctcttcgtgtgcagtatgaaagagaagcaaattaggcacgaacagtgatcaaggacgcttaaaatctggcaaaaaacaaagatgtcaaggtaggtaagaaggcatgagaatgcttagtagcggaatcacagtactaaagacatttctataaccggcaatatgatagggtgggctccgcgggaaggtagagttgcttgatgagctgcataggaaagtgctaagacagagagcgcccagtgaaaatgaaagggaagatggtggagaagggacgaaggacggacgccacaacggggcatttgtatggcatggcagtaaggagagtggccgtctagcaacaccggaatcaacacttgcgagacttactccagaactcgttttagttggtggtgaaaatttgcccctgatctagatctatacagccaaaaaaaaaaaaaaaggaaaagtacaaagctcgctccattcttatccacaagcttggtattataattcactgagttgctgagaaagcagcgggtatgctttgaggaaggaactaaggagcatcttctcccagcccgaacatcttgatcgaattggcccacgcactgagagtgaggattagcagtgaaaatatcagtagatgggaaagaagacccacgcttcgcaaacctcttccacagtgattcccttgacgccagcaatgacatgcgcaacctgagctatggcaacaggctcatttcggcctttgaccatgcatcccttttgccatttttctttcttgactgccttcggtaaggggggtgccccatctaagaatttcgacgaggcgtgcgagggacggatctcacactgaaagtttaaaaaatcagtaaccatagataaaatatggcaatgaactttctcacccaaggaccatccgtctcaatctgaatacgctccaatggaatggcctttaccacttccaagttttcttctgtcttcagactgcacccgttgaccccgatgtccagaccaagtgcgaccagtctttgcatctcctccattgtccctgtaaagctatgaacgagtcctcgcttcggaagcttctccagcctctgtgtcaaaagcctctcaaagtcttcgctggcggcccgcgaatgcaggaagagtggaagttgaatctcaacagcaagatcaagctgagcctcaaagtactttagctgcggttccttggggctcaagaaaagcctgtcataatccaacccaaattctccaaaggcaacggcgtgacctgcttgcttcgcctccagcgctaacgaccgaagctcctctaacagtttttccgggccaccggggaagctgtcgaaaagcttggcttgacaaggatgaactccaaccgttgcatagcagaagccagctgctagacgtcaatctttatggtctgaagaaaggggcactcttaacatacggtatttctgagcgatttcaatggcacgcttggattcctctagatcagagccagttaccatgaacttctgacagcccacatcgcgtgcgcgctgaacgatgtcgtccaagtcactctcatggacttcttttccatgataattgccctggaaaaccggatcgctcaggttgattccgatctgagtttcaagcctctaattagctttcaaatggcgaactaccggacacgaggtacacacattcacatatttggggttggacctgtctcacccatctgaacaattggacagatgccgatgatacgcacgcctcccacttggcaattgcaaaaacacgaa

SEQ ID NO: 2179 - DNA, 3751 bp, Emericella nidulans
agcaggtgaggattaaaataagatttttttccccaacgaaagcaattgcttttcccacatttagccggattttggggtatctttactccgacactaggccctcctcagggccccttgggggacccccccccagagaggtggtgttatcatcacctaatttgttacagcggcttcgtgtcttaaactgagctttcacggtacttggactaggtttattaaacaggaaatgtgaatgctcattagcataaagcgccatttaggtatctgcgcgagcaggttaccggagaagctgagtaaataagagttaaaatgtgcgctttgtgttcaagaaatctagtaaatcaccttttggtttttgaccgttaacatgaaagaaagcctaggtcatccatcgctggctatcaaggtacggagaaagtggggagctatgacgcacgtgatagccgccgtccttatcgataagcttatctgaaaagaatgcggcacgtgactctggctggccgagatccagtggaaagctgaaaggttttgattgcattcagcattacgtatgaaagtattgaggccgcagtagatggaaaccggtttctgcagtatccaaatatggtatgtcgtctttaacgcgatgttcggtgggagggagccagtggccggtcccgacatccagatcaacgagcaaacgaagagagcaccatcataatgcaagaaatgcacagatctggccttgggtatacaatggatagatcgtatgcatgcaatgcaccttaaatttgcggcaggcggtcatggtcgccgccttcagagcccgacgacaagagcctcacctccatttgacagatcatcctgatcttcaagaagaaccccccagtcaagcgtcaagccaaccaacattagggccttggcttagcagatcaatgcgtgagagacaatagcgccgtcgaaattgaaaatcaccagatgtggtgttgtttcgtgaagcgccgagagcttgagctgcgacccatcagcaagatgaggtgcagtcttagcacggaaaaggcgtccggacgaaatgttggaagccgatctatatgctcgtaagctttgccactgcgctggcgcatagtagtgcgcttcggccattgtccggacttcggagatttttggtatatgagtactaaacggttgccttcttttgccttgcgcgccgccaaatagaaatgagaccttaatgataaagctacggcctaaatgcggctgggctgttaatgacaggctgccactatggtctcgagggctcaggccggcttaggcccaatgtcgccctgaggaagtggaaagtgtacgtatgccagccctatcacctcaatgtctgtacagctgtagcaagtcattcagacttgagggccattcaaggcgtcttacctagaaacaaagcgaggaaggagccaaccaaccagagccaatcgaaccgatcccatcttggccgaactagtcgagatcctgtaccacgtcggtgggtcagactcgatgctaatgcatgcaccgcacatggatgatgccagatgactagatcgtgatgctccgtgccgattccaaatcatattcactcggaagattcctagcctgttttcaaaattaccgtcattactgagacccacaaggcccaaccaagaaggcagcaaagcaacgatccaacatctgggaggtctgactctaagaatgaaatggcggttttgacttaatcaacccggtcaagatccaaagcccccttggccaaacatccccatacagagatagcgtagtagggaactcccagcctagttcgcaatcaaaccattggtctgatccagatctggcccaggaccaaacggatcgtttgcacccgcatccgccggcgccgcatttcatgtaagagaacaaaccactgacaaacagctgattgaggtccaagtcctgcattggcagatggagatcggaaacgataagaattgtcagagactgagcactagcagcgattgcccgtcttggatttcacctccaccacgcagtaggcgtagatggctcgatagtggatgcggaccggcgatcgctgaactgaattcgccgtgaacttgatctgcgccttatctgtgatgaatggttaaagctagattacctggttctgggtaccgatacgggacgcgaactgcagtacagattggctgataagtaagataaggttcgatatgttcctgaacattactctggctttgttgcactgccactgtcgatctgcagtcacagatgaaagtctccattacaaggaaaaagaaacgaagctgagacctcaagctctcagacccaaggttggcttggttgaaactatcagatggaacttgaaagaggtcagtatttgaaatcaaccccacctcgctcccattgaagcctccaggagccccctactggagctgtgtccaccaacactgacacgaagtccacactgttttcgagtagtgattagaaacggtcaggatccaggacgaccggccttgaccctcctgtatcctgatttgaagcttgctgctggctgctgcatagtgcatggctatgtaccacccatgcagtaataagtcatatttgcatcgtcttggttgaagcatatcataatcccctcgtgttcgtaaaaatgtcagacagcacggcaggaccagcgaccccgcggccccagtccatactgactctgacttgctgactcgcagcaaattgaaataaaccgggtcagtgggtattgaaattcaaattcatccatatggttacaacctttacgcatgcgcaataaatctgccttcggactctgcgaaaatgcataggcccatcccgattcccgcttgagatccagactaagatacagactcgaaacttgcggtaaggagtatggataggtccgatccgtggcgcaggtctgcttcaaccttcagattcagatttcaagacatcatgaacaggtgccaacaaccacagcaggcttacacgccatctcaacatgtccatgtgcggcagctatacggcataatatatcccggagttgtattccgagtatttcaaatactcgtgaccaaagcaagattctggcagcagcgataaccctgaatatgatttactgttttgtgcaaccatcccagacatgcccaaaaggagaggcttggctgatgctgtaccaacatccaacgttgcgcgtgcaacacaccatcccagatcgaacctgaagcgcgagtcaactctgactgacgcagataagacagacacccaggccatattgaaacaatggcctactgcagcgctccatgatcatcaactgcttgtccgccaaccttgaaagccgaagatgatgttgtgttaccgtaacactcgatcaagctacaggaatagcagtgcatgatggcgtccaacagtcagcaggttacgtatgttttcatggtttgatattcatgctctctataacatctgaatacttcagatatcacctttggacgtgggattgttttccgatgcccgccatccgtagctatcgatgaggatcgaacatgaatgcggtctcctgatcgtaaatacacgggtatgttcggtggccagctcgataggtaagttttcttgacaaacgtgcgttgtcagagcatggaggaaaacccaaaaaaaaaaaaagaaagaaaaccaaaacaaacttttttgtaactgagaagtgatggcccaggcaaagtcgtagcgatagagtaattagccgtatctatag

SEQ ID NO: 2180 - DNA, 3005 bp, Emericella nidulans
acagaggcagaagccggccgacatgctgttagacagggtttttctggcagcaataaatttatttgagtaggatgaatgattgaagtgcttactgcagtattatgaaccgaccgaggggtcattcgggctatataccagccttgggcgcgtcagtgccatggaaacagggctgcacgccaggcgcgagtggaggtggggggaggagacccagtacatagccttatgcctaataacttttaattaattaccttgtttaagacgtatttttgtaacaggaagcgtaagcgcccaaggtaggaaagggaagttttactgagagcggaacgtgctgataatcgagcaggcccaccggtcagatttctgcagagtgtagaagccagaaaccttgaattccagttgacacgtcgaggtcagattgcttcaggctgttacagcaaggcatagctcagaccatagggtgcaatggatgatcaaggctgctgaaggaacgctctctgccgacgagtgcgattcgattttccgccagctagacccaagattcattccttatgatggccacaaagtgatacgcaaccggacagtatcatttacattgcggcttgccttgagggcttattattcgccccttaacacgcagagatttgtggcggcccagtgcagaaatgtgcttttgggcacttggagctagaaatgcgctgccgtctgtaactgtagaaataaaaatatagagatccatcaatggaaaaatcaataaaataaaataaaatgacataacaactggaattgaatttcaagtcagcggtagtctcttctgtctttgtgctcgatcgagcctttgctcgcgtggtccacgatgagttagcaaccctcgtctgtgaatgccccgtagcctactccagccttctcagccgggtcgaagtaaaccaagttgttgaccgcgtcaattgatggaatgccgaacaggtctacgtttatctcttcctttctccaagtatgtctgattgccgctcacctcgtggccaaaagcccaacgcccctctgttatgaggggacgagtaaaccgatgaggagtggctcctgtcaatcccagtttcgtcaatgactgagcatacaatagtgcgcacaagccagccataggactagcgcctaagcggacaatcgtgtatattttatatttcacgtatgtacagtacatgaacatctgccctcgcggtcgaacgccagtctcatttgtcctgagtaggtacatataacaaattcttttcctgaataagagcccaaatccgttcctcgtcacgggaaacgcccagtttcacagggctcaacagctgggccagtcggaaggcaaagaaccctgttactggcaacgagtaataatgtcgtataccgctctagaccttcttctcgtccattgccgactgcctatggtccgagattagaaggagagttcggctttcattgaaagccgcgtctacgcacaagcgccgctggtcaatccgtctccgttttggaccagttgcattcagggatgcagggaactggtaggaacgacgagcctttagagccgtgaaaggaactaaggtagatataccatcaaagctctttgagacgctgatcgcagggactgattttcactggctgacgctgactcaaatctacgccgatagcttgctcagcccctgtgctttggtattggctagggcgatggaagcgaaaaggcgaaagagaagcggtgtgaccgctcaaaaggtgctgctagcttctggtgtagacgctacagactatcgcgaggcgtttccagcgctctactttctaatatttcggctgtcgaccgtatagtttaaggagaacactatccagtctgctttgagattggctctctgccgttaacccttctatcttaatattaggattaagactgaagatcgggggcaagagttgaggcccgaagaatactctgaaatattaccctgacgggggacggtggaaacgaccaccacttccagtatagtcccccaactgagtttgttttggagtcgaaatataatgttatactgcattctctagctttgctttggtactctctagtttcggcatcaacatcgcttcagaccacatgcgggtgtatctttttgtttcacattgcagtgcatttggtctagtagtagcaacttccctctacctactgcatatcaagaatatattactccccttcagtatacatggcattttcgttttgaactctacatggcccctttgccaatattttcaatccagcatcgtctaccccgagttatattataaggcatcccagcgagttattggtgtctgtagtacatgcttattgccttgcccactgggcaaacagatccagcattcctttgctcacaatcccgcaatcatccctgaattggtccagctcgccaacaactttattataagcagttctgaggtcgcgcaactcaattttcagccgcgaggttttcaaccgtaactcattgtctcttgctgtttggcaacttgggatagtcggggcatttggggggcagccaatgttgatcaggcgagcgtgtcactagttccagcgtacctgcggctgcttctactgcaatgacagttcttggagagccagtgaacaggccggatgaggtggcttgtccttgcattgcatggtctgggtctggcgcaggctggccttctatctgccagttcaccctcccagctgtgacaggcggactggtttgtgcatatgagggtcctggaaccatctcagacagaaatgatacgctgggactaacatggtgcgtaacgtcggtgcctttccgtcctggcgacatggtggatgatactccgattttctcaacagactggcgtggtcctgccgatgttgccggcactacagtctcctgctctatgtgtcgttgcagctgtccgggctgtgcctgaggtacctaaattagttagagaagcgatcagtagtgttcaatcttatagctagtggataa

SEQ ID NO: 2181 - DNA, 1617 bp, Emericella nidulans
cgtttgtgaagttggcgatgtgacggagagtcgagggctgggtgcgagtgaggagtggtcgtcttccgtcaaagagctgttgaccggatcgtggccagctgctgtgtgagcttcgagacggcgatgcatgcgctcgattttggcgaacttgacgctcgcgtcgtggatcatcttcttcacatctggtcgggagagataccggcgcgtgttggtactgatgtctgcgaggcggtgccattcgttcattccaaactcgccgacaccgacttcgacgttcagtcggtaatagttgtctttgttgacaccgcgcttggggaggtgctcccggagcatggcgtggtgaatgtcctcgcagccttcgatcttggctatcagccgacggcgcgcctcggcgaatgtgcccagagcgtcgccaaagaagtcctcccaccactcgtgctggcgattattcgtgtctggaggacgcttgcctgtaccgacactgatgaacactccaatctctcgtcccggccactcgataaatgctgcttcgtccaagacctccggtgccggattgtacgtgcccgctccttcatcgataaaataatgctgaccgatctgaataggcttgaatgcgagcccggtcgcagacgtcgcgcgaccggcctgccagatagtacaatgctgttcggggcgccggctccttgcgagagtcataggaccgtagcaacaccgagttgccgttcttaggcgtgccccgatacaccgccgtcacagccgtcttcgtgcggttctcccggttatcatacagcagcgcatctggattcccccacctcaacccgttgatgaacgcagaacttcggttgttaatgcttgaatgcgttgtgctctggctcgcccgactcccggaccgctgcgggattgacgtcgtcgagaaattcggactgaagggcgcataagtaggggatgttggtgacgtgctgtcgttcccctcggtctcgtagattgtatgttcccgcacgcactcccggatcgcctcttcgagtttcgacgccttgaaaagcgtcgaccgaaaagggataccagcaaacgtcttgtctgtctcaaatacacggcgcgtcatgcgcacatacacatccttgcaggtctcgaggtccaggcgtaagcgccccagcatcagagcaatgagtcctccggttcctgtgccggcgatgaggtcgaagtagtcgcatggtttggggatctggtcgcgtcgcggtggtttgccttctatttccacatagatacggtgcatcagttcctggagcaagatgagcatcgagtatccccgcacaccaccgccgtctgtttcatttcactgttagctgcgtttcgtcattgaagaacgatggttgccggaggaaggaaccctaccgagggacagaatccgaaggggagggcccttggtggtatctttgcggcgaacttggtccatggcgattcccagtctcgcacagcagagagtgaagatgagacccgggttcaaagataacaaaagtgagcaggcgtgaggaggggagacgaagttgaggtggtgcagcaagacttcttgcacagccgcagtttgtgtctcagctggtggctaattttatgcctaac

SEQ ID NO: 2182 - DNA, 2483 bp, Emericella nidulans
atcgccattactgatatcaaccccaagtacgtctggggaggtgacgccatcactctgaacgacgtggatatggtctggatcgaccacgttactgtacgtcttacttgcgcacgccataccctaaccctatcagtggtcctacggccaggagtatatgctaacgttagcaaagaccgctcgcattgctcgtcagcacatcgtcctcggcaccgaagccgacaaccgcgtgaccatctccaactcgttcatcaacggtgaatccgactactcggccacttgcgatggttaccactactggggtatctacctcgacggctccagcgacatggtcaccatgaagggcaactacatctaccacaccagcggtcgtagtcccaaggtccagggtaacactctgctgcacgctgtatgtccttcataccaacaattgaagacgatctgacaaagctaatgcgaataggtcaacaactactggcacgacaactctgatcacgccttcgagatcggtgagggtgcctacgtgctcgctgaaggaaacgttttccagaacatccccaccgtggccgaggaccccattgagggtgagctcttcgcttctccctccgaatctgccaacgaggtttgctcgacttaccttggccgtgtttgcgagctcaacgggttcggcagctctggcaccttcaaccaggccgacaccgatttcctcagcaagttcgagggcaagaacatcgcatccgccgactcctacagcagcgtcgcttctagtgtcgcctcttctgccggtaacaccctttaaactgtgctgctcgagtgtcgtgcgctggtcgagtttggtgggataagctatggtaaagaagagttcgatcaagcttgtaacttacttattcgccttgtaaattacactgcaatgcacggaatctatgctgctcagtgggcaaaaaaagtgtgccattaggttgctagcaagctaccctactagccaattgccttttcgtctcttttttttttccatagtaatacatctaaggatacattccacctgtgcctattgcacaataaacaaagccgggccatagactgtcgctcgagccactgcctcggcattggcaaatggtcccctgcgatttacaacagccataaccgtcagcccgttcatgaggaaatcgtcgaatgggacaacgacatcagcagttgacttgtgcccgtcacaagcgacaacctgcagcggggcaacgatgggcgcgttgtgctggttgatgtatgcaacccacaggaggctttccttcgactcgtcggaaccgtggctccaagagatctgaatcttgtgtgtgcggggttcagggcgagtcatgatctcaagaggctcaaagatccgcagtttgatgtctccgaggttggggcaggtgccgggaagggcgaagctgttcgcccaggtaaaggcgaagtcgacatcgcttgttgtcagagtcgggacctcgcggggactgtcctggaaggtccggaaccatccttgctgggcgcccttggtgccgattatgcccgtcatgatccgcgcaaggtccgcgtcgccgtgagttgccaagcgctctgtaatgtcctggagggtagcaagcgagtgagaggtaaaggtggtagccagagcaatggcttcatcgatgttcgtgacagggaaccagtagcggcacggctcaatagttgggatgccgaagtgttgcagggcattgttggctgtaagagcgtgtatttcctcttgctaagagctagtcagcctatgacaaattaataggagatcgagacaacctaccgcgagggtggccatgaggctccgaagggcaaactctcgctcagcatcattgatgaatacgtaaccaggaacattccggctgatgttcccaataagctggtcgaagaaagcaacctcaacgtgctcttggaaggcgagcagttgcaggtttgtgatccccgcggcgctgacgttggtgggcagaggtaggccgggaagtgtgccatgggcggcttgctctatctgctgaagctgctccggactgggatgaggcagaccatgtgggagtagaggcgtgttgtcaacgttctctgctgttggggcagcgaatgcaaatgagagggatggtaccaaagcaagaagtggcgaagagaaatgcattttgacgatgggtaagtaacaataccaagatcagaacgtggacaagatagaaatgcaaagataactgacaatggtctgaaacagactgtgccgggacgaggtcaataatgaagaagaacaaaactcgagaagggaacaggcgcttcttttaagctgccggagcatgcccatcgagccttccaattctgtgctcctggcgcaactgctggctgcaggcgggccagtacccagaaggtaagagaaaggaatcagcattttataagtgaaccgttcgtttcgatttcctttgcgcacaaatctcacagggagtcctggcggc

SEQ ID NO: 2183 - DNA, 1399 bp, Emericella nidulans
gctgatctagagcaacaaattgcccagctcaaagcggatatttctgacctggaagtgctgaaggagattaatgacgagctcgagtggaatcatgttgagacggagaagcaattgcaagaggagatcgagtatcgggaaacgctctataacgatcaggtgcacaagatttcgcagcaggatgaagtgattgaagatctagaatacacactgacgcgttttcgagagcttgtttctaatctgcaggcagatttggaggatatgcgggcgtcgcaacaaataacggaggcagaggccaccgaccttacagcacgttctagagcgatgatggatctgaacctcaaactgcagtcgtcagtcgcaaaagcccagacaaaaacgatcgacatcgagctcaaacgcatagaagccgaggaagactctcaacacttatcgattgtgaagctgtatttaccggaatactatgagaatgaacggaattctgtcctcgcactattgcgctttaggcgagtcaggtcgaaggcgtcattaatgggtagcactatcgagggaatgatatctgagcaagcgtctgtccctcctgctttggaggacatctttaacgcgcctgatgtcttagagaagcttctctggatagactctatctgcggtcgatttgggagttacatcgcaaattgttctgctgagagcttttccgatatccaaggtgctttctacgaactggaaccggttgaacgtacgttgaatttctggctcgaaggcctaaagaagaacgagataaacatgaaaaagtgtgcggtggaattacagagatccattgctctactttcgcatctggcagagacacttctcccaacttccttggagacatttgctgatgaactctgtatgagcacgacattgacccagtcatacattgagaattcagtgtcctcaatgtcgcgattgctctcattactgcagtcgaaacttccgaaagccgaggaaggcgatgaagaagcctcgtttttgtttaacaagatggagggctttatctctcaggctcgcagcttgaaagttgctacagtgaagatcaaccgtgccgttgatgatttaaggtcaaggtccctggctctttctcatgatgcgtgtggtcctttcaagcaagcagagaatgctgccaaagatcttgcaagcttatcgcgacaaatgggtgagaatattgtgcaattaattagcgatgacagtcgtgcggagcccatttccttgcaagaggttttgacgaacatgtctcaaatatctgcattgtaccagtcagaagccgcagagaacaacgatggcatgtcgctcattttcaccatgctacgcagcctgagcggcactctcgaagaactcggttctatttcgtctgacttatcaatta

SEQ ID NO: 2184 - DNA, 1258 bp, Emericella nidulans
tcagacaagcaaactctccagatgccgaggaagaaatccgccggcttaaaaatgagatccacgaggcgtcttctgcactgggcgtcaaagacaaaacaattgaggagcaagccattaaggtagagctcgtcgaatcccgcatgcgtgaggcaagcaagaaggcggctgctgtaagggacttggaagcaaagattcaggaaatgacaacaaaagaatctgctctccaagctgtagtggaaaaccagcgcaaagacttgcaaaatctcgaggccgaacgggacgaaattaaagcccaactcgacagagtaaaacgactttcgggaaccgctggagccgccgcatcccctggcaccgtcgttgacaatgctgcctccctagcagctatgcaagaaaacgaagctctccgcgcagagatcgcatccctccagtccgctgtccgcttcctccgcgaggaaaaccgccgccaaacaatcctggatccgtactctgtgcaacgctcctcagaactctacgcctggctcgatgcacctcttacgaagaaacctgtccctccagcccagcgcgaaaagattcagcaaaccgcatcggaaagccgtgatgtcctctcgcatcttctcaaacttactaaagagtctagtattgctgacctcaaggccagccgccctaactctggcaccgccagcggctggcgcacgtctaaggaaaagctcaaataccaggtcctccagcagcgcgagaactttgaacggtgggctgagtggaagaatgaggttgtgggtctcgaacgcgaacaggatagacttgtcgctgcgaagcaggagagggctgcgaggggtggacgtgcagggggccgtggacatgcttcgcatccgtctatgggatacggaatgatgggacgagcgtggcaaatccttgggatgccaccggatcgcaaggcaaaaactgttcagcctgttgagcgagcaattaaaccaaccttatagcagaccttttctatgggatgcttagccatctattttcgttgtttcgtgtggacatggcacactgtacattgttcttatacccatttacacagtgtagattaaacttgatataccttgccactatgttattcacttcgcgcatgtctacctactcatgtagacaaatccagaaagtacaaaggcccccactatgtcaatcatctagtatttaaaaaccagggcaaaatagacctaacaccaaggaaataagggcaatcaacgatcaagagaggccg

SEQ ID NO: 2185 - DNA, 3990 bp, Emericella nidulans
accataagatgatggtaatgcacacggatacgttgaatttgggagccttataaacattgtcgggcttacatgaaagttcgattgggggacggggagtgcgacaagcacgaattcactatgacacaatatcacaaccacgttagtcaatatacgcctgattttattctacggccgttttggacgtcttatggatagggacagtatacgactcgaatcgcagcggcgatgcgatcaagaccaacagaaccagtagccgatcccttagatctctgttcaaactcaatcacccacgcttgagcaaatttcatcttccattcggcagcaaagagcgcgcgaaggatgatatcaatttgtcggttttgtccgaaacaaggtgtcatgagaagctctagtgtgaatgttgtatcgtcatcgggatcgtagcgaaggttcggttggaaacctttttcttgcgcattagccgagaagtagggcaagataaagaaagggaggatagcttacctgtcgacacgttgagagggagggaattgaggatcctcgacgcggcataaagatcatgcctagccccacgtgaccaactatgtcattgcacgttgtggagcttcgaaagggcagcaacttccacattttcctggctccacgaggtttgatgaacaaagctgtatgatggtaagcctccttcttcattgtggaacaccgtaactacgagacgaggcttcatacctgggttttatgaaatgcgatattgacaaacttcctaagatctaggaacagcacatgatttgattgataccggcgcaacggctcctcgatagaatagaacgatccactttgagatggcatcctggatccaacgacagaacaactcacaccaggtccagctcgctgcaactgcagtgctgtccggagctgctgttgcaggcgcgatactcggttttcaaaaataccggagacgagaagctgtgaagcggttaaaggcttctataccaacaatcgatgagaagcaccgtgcagagagcctgaatgaatttggcgccgcagtcccgggaccatactggagcaaagaggatgaacgtggtgcagctcttgcgcggagggcgcaagagggggactacgatgagggtgagaagctactcttttggaatgagcatggcaagcgcacaagctaaccctgttctctccggtagagcttatcctcgagcagctcgcccgaaaccgcgtcttctaaaggatgagggtctcgcaaaactccgcgacgcgttcataattgttgttgggtgtgaaggcgtcggctcgcatgctgttgcttcgctggctcgatcgggcgtatccaaaatccgtttgattgatttcgatcaagtcacgctctcttctttgaatcggcacgcccttgccacattagcggatgttggaacacccaaggtacattgcattcgcaggagactgcagcagatcgtcccgtgggtgaagttcgactgccgaaacgagctctttggcgcatctgctgccgatgacttgctggcaccatggactctggacgatgccgacaaaggacagaagcccgtctatgtgcttgattgcattgacaacatccaatctaaggttgagctgctgcactactgtcactcgcattccatcccggtgatatcctctatgggtgctggatgtaaatcagatcccacgcgcgtcatgatcacggatatgtcagtcagctcagacgaccgactttcacgcagcaccaggaggaggcttaaactgctgggagtaactactggtatcccagtggtgttttccacggaaaagcccggccccggcaaggcgacactattcgcgctggcagaagaggagttcgccaagggctaggtaggcgacgtatcagaactgtcggatttccgttctcgaatcctccccgtacttggaaccatgcctgccgtctttggatacactcttgcaaatcacgtcatttgcgagatctctgaatacccaacagactatagcatgggtggtaagggcaaagacaagctctacgacaccgtccacgcacagctactggtgacccttgaacgactcgctcgagcggaaagtgaatcaggcacccagcctattggactgcgtctcccgatgagcagagacgatgtcatctatctcgttgacgagatttggcggggcaagagtgtcgttactggacttcctagtcggctagcacttaccctatggaaccgaccatccaatgggtttaagccggatccccaatgggagaaagaagggcaaatcttgattccattcaagcctgaggatttagtgcttatgaccaaggaggaagccacccgccatgagaaggaagttcttatgggtggaaagaaggtcgaagacctgtacagcgaggagattatccagaaggtgaatcagcgccagaaggagatggcatactatgagcaatttcgatgattgtatattagaattcgtggtgatgattcttaagttagagcatggccgttatctactcaacatgataagacgaaaatgtaaatgcctagtagccctgccacaagatctgttacaaggcacaattccagcgcggcaacgaaccattggtggttagtacaatattaatagtaataacagtggaaactaggacgacattgtacaatctgattgactgaagtgagaaacttggaccccttaaggccaagagctaagcctgtgtagggttgatctccaggccagttgtcgctacattggaacccaggcacacgacacttgacctcaacaacaactcttcacattcaattgaaactctcgtattttcccgtcccacgggaatatatccacattacccaaaagaaattgtcgaatcgacccaaggtatcgccaaagtttgcctacatactccagtcaaatggcagaccgcgaccgctcgcgcgaccgcgaggccctcgacatttccgacgacatctctgaagacggtctatacccccctcatccatcatcatcatcaccgccaacgcgtctcagccggttcgcgcggccgttaatcgactacgtccgtaacgagtggcaatcaaattctggtgcaaaatacagccatttagggagcgcctcgtcgaattccgtctcggaccgaaccgacgctccgagatgggtacaaatcgtgctgtcgatcgttctgcgccgcgttttcgacgatacgtgctcgtttaccttgctctgttgggggcttgcatattggggtggcagttcttccctgtttccgcgtgtaaaggagaactcggcgatattgacggcgctagatccgaaggagaagtcaaaagttggaggttggttcggcgcgaatgcggtgccgcagttggaagacatgattcaacttaagacattagatccggcactgctgccggccagggaggcgaaggaggatgatagtaagcatagctcaaggagattagttattgttgcggatgcgcacgggtgcaaggaggagtgtgcgtataccccagtctctttacccattattttggtggcgctgacatctaggcaaacagtggaaaaactcctcgacaaagtctccttccaggaagaacgcgaccacctaatcttaccggcgatctcattgaaaaggggcctgacagctagcgtcgtggacctcgcccgacactacaacgcttctgtgtccgtgtaacacgaagaccgcttctgtactcgtaacacatgctgagtcatatcactgcgactatggacatgttatcaagccgcaagtccggactaccgtagttgcgcagcaagaaagctgacctgccgtctcgatgtgacaacacaaatggcagttggcccagccgtttccagctgttctgagagtcctcaggagaataactgattccacccgcagcttttaaaggacggtatgccaccctatttatataaataaaccctgctaaaaaaccctctgaaaagtataacttatttctgtcatgccttcttttttcttccctctac

SEQ ID NO: 2186 - DNA, 1205 bp, Emericella nidulans
aaagatgggctgcgttcaagccgcttagtgacctgttcgttatccatttccattgacgcctctgtccacaagatgctgtgtgcttatcctacgcctgtttctcgtcatgttcaggcttttccggttcttcattcgatgttttctccaaaccctttgcattttatgttatatctcctgcagctcctgttataccgatgataaggcctagcctgaacagtcaataactcaaccagaagtcgtttgttgactctattcatgtgcaagaatggcagtatcacttcgatattggatcattcctcgcaaccaccaagtgaagaattacctttctccttccggaactcagggtttggttatcagtatcgtctttactagccttgcggcattcttagtcctcgctcgagtatacacccggacaaagctgatcaaacggatggaagctaatgactgggtgataataattgctttggtacagcatatgacaaacttacaactacaacaattgctaataaatctagacagatcctctcattcttcttcatgtcttcctttttagtggaagccttaaacggtatgggcatgcacttggtcgacatccccactccgatcctcttaaagcagatgaaggtaccgatataagccgtacggctcaattgaccgtgatctaacagatgagctgaacaggccttctggttaagcatccctttttacaacgccgcgctcctctgcgcgaaggcatcgattctgatgcaatactttcgcgtctttccgtccagatgcatgcgccgcatttgctggaccatgatagggatcctcgtcacatacggcacatgggctgtgcttagcgggttcttgaactgcataccagtagcacgtttctgggacccaacaatcccgggatcatgtctcagttcgaaggctctgtggttctccaatgcttcaatgcatattgcgacggaccttgctatcctagttatccctatacctgccttgtatagtcttgatttgccaaggaagcagagagttgctcttattgcaatttttgcggtggggggtttgtacgttttctgttccatggtcggtgtgtgcatctgctaatcctgagtaattctagcgtctgcataacaagcatttgccgtttgatgtcctaaaaagaatcgctgactcttcggacccaacctgtacgtccctccatcaacccaaaaaaa

SEQ ID NO: 2187 - DNA, 2415 bp, Emericella nidulans
taagaccgtcccctgcaaacgaggagacaaagactttgccgtcgaccttaagctgcgctgggaggttcgcgtattgggcgatcttctgcccaacctggtatccttggccggtgttataccagttgaaatcgaacgatatgaagactttcatgtcattgttggcagcggactgataggcgagattgagttgctggtcggtgtagggatcaaccccgatgttcaacgcgaaagcatcgattccgagagacttggcacgtttcatatcatcgtcgtagtcggctgcggaattgcggttgctgacgattccaatctgctcccgtcagtctgtagaatcgtaacaaggccactagaggtaccatgaagtgagcaaagacaagccggtcgtccgaggactgcctgggtttgttagcgactgcattcggggcagccgagatcagctggggaagagctcccagagcagagagaaatgtgctgagcttcatttttgttggtcttgatgctcaacaatgggattgctgcacttgatcaatcgggcctcctaagggttatataccctcgttgcatactcaaccacaccaacatcaacaactaaaactatcgacagatgatggactgattggctgccttttccaccccttgtagcatcgctcattgttcgctacaaacaaatggcagcgagcgcaattatttcactcagatagcaacactacagcgaaggtggttatagtccacgcgcacagccatggccaggaacagttagattcctccgcgcggactgagttcatgcggcactaacctcactaacccggcttagacgttgctgggtagtatcggtaaggattagccctatagctctccgcattatgatcggggccatcagctgcaggggccatcgtcatgtggttcctgagtgagacacatcgagcattcctgtaataacgctttgtaatcaaggtatttccagcgaaagtttagacgaagatcaggcatatactacgcttggggagagtatccatagaaacccctaggctcgccgacggatcttgtaaaatacccaagaatatggattgtgttacatctaccgtctggatgtgaccatgcagtctgcaggcatacatcgatgggtcggctgaccgattcgagcggggcccagtctgtaagccatggtatccgactctgcatctcagcgaggtgatggagtgaggcccttcaaatgctttgacagttcattatgacagacatcatccagccggtcgggacacctgagaatttgcattgcccagcgctgtgacaggggaaccaacaatccttattaaaaaagtaggggacggcgaggatttgactcgcgatgctcgcggcatgctcggcataatgcttgtattaagcttaacaattgaattaatgcttcagacgggccattaccggcattcattatggcgtcagaagttgttcatgcactggactgcggcttagtccaccggccgtcattatccgttctaggaaacagacaggctgtcctgtcgtcctttatgacggagtctactacttcagtgcggagattggggatgagagcagtctcagggattgctgcactcgtaatataaataagccctgtagcgcaggggatcccctggtatacttggtacatgtatgccagatggcgcatgtgaccactatcaatttccttttctgttttaactactcacacttgtcccctgccgatgctcatgtggtaacacttcggagcattcatctggccagtgaaacccctgctggtcatccaggtatatagacgaatcaatgaattccaggtcgagagggggctgttccaggagcccttgcaagaaatgatagaagagcgccgtcccgagtgacacatccgtggatgtagacgacactcagtgattgctgcatccagaattgaattataggcagaatcttgtggcgctgtggcattttcacttgcggattggacgcctaggcggacttttgtggagtgcatgaggtcagtagtggcctcgatgtgtttatggaattcggcagcggcgtagttgccattaccctgcagctgtaccaggaagctgaccgctacttcgaactgctcttcgtcgctctggcggtctttccgtggagtaaggtggaaattgctaagacggtagtagctgagaatagatactgggtgtagaaaaaatcgaagaccagaaaggagccgtttgtccaactgtcaaccaacatactgcatgaatgacgagcgcaacggatgcaagttttggacagagcagtggctgaggcagttacactagtctctttgcctagttgtgcaccagtttcaagatgcacgcagtaaacgtggaggaggatcaggctagaagcgaggatggtgaggttgacgcgccagttagtagaaggaaaggg

SEQ ID NO: 2188 - DNA, 2228 bp, Emericella nidulans
tgaatagccgaatctaccgtaggtgcaacgacagccgggttgcggggaacagtcggagtattgtcgtttggaacactagacgcgtctgaaccggcccatccacctaacgcatcgagagcatcgttgctgtcttcttcatagctggaatcaagggcactgtcgcggccagtttgcgtcccagttttactatcactgcggcggcgcataatgacagggccggagctgcggtcacgtttgtcgttgtgggaattcgaagttcttcgtctagtgagcttattcgcagcgcctctagagattcggcgcatcaagcccgtacccttgatagagtttgggataaccgtatctcccgggtaggaagcactgatggttgcggggacagccatgatgctatccccaagctctagagaaggcgcagaggtgggaggaagtggtgtaactcgatcccgaagggagtcgactgctgagaggaaaggggtgcccaaagggcttgaatcatttgacggagtgcaagagggaggtagagatgttggagttgttgtgtatgaagacgcgtaggtaggtgccagagcagcaggtattgctgatgaagtaaaaatatgatgtagcttaggcctggggcgtgaagcagcaagctttaaacttgcttgagggtcgccatgaacggccgaggttgatgaggtagctgcataagtcattgcggctactgactaggggggtaatcctgagctgcaaccgtaagattgtggccctgtcgtgggtcgagctagagtcttgagtcacctggactcgtgcaaaaacgaataaacagtgaggcgggacccgagtggccgtgttggggcagggctatagctgatgtgcaatacggagcgaaagatcgaacgtgtttggctggaattatgcaaaagccacgtccttagcggtattgctctgtttttgatatctgcattttggcctgccttggacgcgatgcggagagccctgcctgagagcactcgcagtgaacgggatccgatttcctaataacaaccaacacaggcgcctagagtcgtgtaacaatggctttatctggacgcctgctgttcgttctcgctatcaggttcactctgacagtctctgcgcctgatgttcttgcgcaactggttcgagacacgataatttcgcagacgtctcagtccttctctaatcacctttcgcttcttttgtttgagcctggttgtcgttcagccctctttgagtggttgatctttctaaagacgcggggaaagctgttatcctgtaggtaaggaagcgtgcggagaccgaccaattgctagtcgcgttgctgaaggagtgaagtaacccaccggggggaaataagcaaatagagaatgaaaagcaaggaaattaatggtaaatcaaaataatatgcaagtcagtagtggtgtccgccctgcacatgtactctgatggtagcagagcccctccgcaagtgtctttcacggtgacagcgattggaggtaagagattgacgtcggctctggttggtgaactccacaggtatgcgcaatggcacgagagtcaaggcggaatgctcaaggatgagctcaggcaatgggggtaagcgtcgacgagggatgagcactgccaatgcaggatcgcctgccagcgcagtgatgcaggcggtccaaagcggaaggaagaggacgagctagatatcggagattggaccgaggaaaagatggtgagggttgtaagcgtttagtgcgaattaggcgatccctgagtgtcccaatttcttgcagttacttgagcaaggacctgcagcagaacccgcagggatgaatgtaagaaagagaagatcatgcgacgaaagacagggccggcgctgtcctttgcttagactgcggggagtgaagaaggttgattcgggaatcaaaacgaagatgtcgggaagcaatataagaatttctcgatgttccggatctcccgtagtgtttctgaatcttgttcttagtcgattccgcggcagagctgaggttgggagaaggaagcgtcagagaaagattttggaagggcttaattatttcgagaaaccgatggatgtttcagttgaaagaaagctgagagagtggagcctgcggtgacgtacagtattgccaggtattggtaatgaatcaaccagtatggtatcggtaacggtcacgttggtaatgcttgtcttctatcgaaaggaaaaaagcaaaaggaaa

SEQ ID NO: 2189 - DNA, 2061 bp, Emericella nidulans
aatgtctgatcccgtccgacctaggggcaggccagcccgtaagttcaacttaacctgaccattaatgcagcgcttacaataaacgaacctagacacacccggaacgacggttctgacatatacccctgacggccgatacattatcactggaggctcgaattccgcgatccgaatctataccgatggagaagatggggaacccaaaaccgtggaagaaggcgccgatgcacatctcgctataggagctacggtaggcgcagcttgtattcttagcagcttagggatgcaggctgatatgcgcagaatgagtacttttttatgggcgccgaagacggcacagtctggcagtacgaagtcaagtcggggagaatggacaaactccttacacgcactgcgctggcagtgcgcgatatcgccattacgaaggataatggatgggttgctgtcgcgagcgagtaagttgactaccgcttaccatgactttgacggtatcagctgatgcgggctagtgagcttactgtaaaactggtgaacatcgaggacatgaccaaggtcaagtatatgagggaacagacaaagggaacgaaacacatcacctttgacccgaatggaaggtatgttgcggtgtcgtgtacggatggaatcgtatatctctactcaatggacaccgaggagcccgaactggcgcggaagctagacggtgtgatccggcggctcgaacccgaagatgaagcgaccgcgagggtggtctggcatcctgatggtactgcatttgcgacggcggatgcgagccgggatattgccttgttctccgtgggcgagtggaagaaggagatgtcgttctctggtggccataatggggatatcacggccatgagttggtctcctaacggggcgctcatggtgaccgctgcaaaggacggccaggtgctgctctgggaaagtaagacgcagaagattctccatcgatacaactttccaaacgtgatcaacctcgcatggcatccgacaaagaacggtgtctcactcaccacgtcagacggagagatattcatcttcgacggatttgtgcccaaggactaccaagctctacttcagaagccgctacaagcagcacctatatttcccggcgcattgactgagatatccgataatgtgcagcgacccttggcgagtcggcctaaggaggcactgcgcaggggcagcattgactcgctagatgatatcctgggttacgaccaagacatggaagactttgtcgaagacgacgatggagctggttatgttgaggatgtcaatgggttcgggaagcgcacgaacaagcatctgggtgatattgagggtcatatggataaacggacattgacatcgtttccgaagccaaagatccacccgccacttcaacctggtagcacgccttggagggggaatcgccggtatttatgtaagagcaccgtctcctaacatgtcacgtactgacaggataggcttgaacttgacgggtgctgtgtggactgtggaccaggaaacccataatactgtgacggtggaattttatgaccgggaactgcaccgtgactttcactttactgacccgtttttgtatgatcgggcatgcctaagtaagtcaactattccggatgtaatcgcctactaacagcatcagatgaaaatggggctcttttctcaaacaatccagttgatgatagccctgccacgatcttgtatcgtccgatgagacgtggacaacgcgagcagactggaaaactactctgccaaaaggagaacacatcgagggttggggcagtttaagttttgggattagaaattaccacgcggcgctgggcttagtgattcgacattgtcgcataacccaaaaacttggtagggttttccttttttggccactttaggggtccatcagaaagccggcggactgtgcgttgaggctttttttaccatgcaatggcctttgaggactgccaagggcacttttcttttcaaatttagccgaaaattccaaaagggttttgtttccgggggttgttaagatttcaaatc

SEQ ID NO: 2190 - DNA, 2079 bp, Emericella nidulans
catctccacatgaagcttgacagtgcaaaagtgcttttcacaaacttctgacttcttcgggtgtgccacagagccgctgatgagcgcaaacagtctgctgaactgggagtgtgtcaaaagccagaactcttgggcgtctttggttcggttggggtgctcgtatccagccacaagcaggcgcctgagaaccttgagagcaataagactttgttccatagcttccggaagccccgcagtgccataattaccctgctccagggcaggggcccatgtgttcactttatccacgtatatgccaccgagaacatgaagtatttctggaacaattgattgcaggctctgtcgtgttctctgcaaccgagctgtcgaaagttccttgacgatttgtaggagaataataagcgtccgcggtaactgcaacgggttcgcgccaggttggacagatgcgcggagggaatcgatgacggcaggaattccttcaggcctttaacatattagcaacaagttaccagtacgtgagaaagactgcactcctcaccattcttgcgggtactcaagacgcatgatcttcgcgagcacgaacgcgttgtgaagagccaggaggggcgctggttcgacaacaccggcttgtaaggccctgactttgatatggtctttttcttctttcttgattgcactgcaaagctagtcagtaagctccgcgattcctttgtccggcaggtgtccctactttggtgctgtcttgcgccaatacttgtcgatcccgttctttaactgtataatggcgaggtatcgagcttcattagggactgtctggtctagaaacacatcctacataggttagtacattcaaatatgaaaactgtaaaacctctagagcaaagacccgttggaagtgcatacctgaagaaacgtatagtacttttcctgcttctcccagttctggagctgcttggtaccggtctgaacctgctgctgcgtagagctagcagcttgcgtcaaggagttcaggacattctgcggcgtcagaggatttgactcccccgccagctcaatgacgtgagccataacggaaatgcaagaggagccccgatctattaacaccgagatagtagctccaaggcgaacttatagctcaagttcaatgtatgtgacagtctctaagaccgacaagccatagaaacaagaacgtcgaagcctaggagcgtttagctggttgacggtgtttgtggcgcgttttcggcgggcctgcagctttcttgcattgtactctttatgctgactccccacctgcggcataacacggaatttagtttttccgaaaaggagccctaggttatgacccttgacgctagaccatattgagacagcaacctagggcttgagctctgttatacagcaaatcccatctcttccatctacctgcctcggtcaataccttcacccgtcatgctttgaaacgccccacatatgagtattgtttattaccgtgtagcaattgaactcgaagctccgcacctttctgaatcagttaaagcgtaccgccccctctatcaaccgtacgcgggacatattgtgtacgccccatcgaccaggtcagcgtcgagtaataatgtggccccaccaagtaaccatcttggactaagcatcttagtgcgccatccaggttcttatattcttctatgttttgcggagaagtttgcggacccacgcctccaatttcagaacaacgagactttagaggttgagacgggcctgggactcggaaataatggagactataaaaccatggtcgcggtccttggtttggctaatctgcccagtgcttgcgctctgactgcttgcaaaccctacatcaggatggcccaagtcgaagttccaagcaccaacggcagcgggaagtctgtcgagactcgtctctttatcaatggcgaagtttgtcaatggccgtgctgcatcagtttgtgaaataataatctaatggatatagttccaaccctcgtccgatgggaagacattcagtctgatcgacccattcacgcagaattcagttgcagaaggttggcagaagaattatag

SEQ ID NO: 2191 - DNA, 3386 bp, Emericella nidulans
taataaaagaagaatgaatacaataataaaagtgaataatcataaccaatgtttaaagcttgaacataacaaaaaaagggtatccatacacaggaaaggacagttaggggtgaaccatgtcaataaatcagtaaatgcactccgggacagtaatccgatcatgtcttcacatagatcagctcgatcaacctcgcagtcgtagttgacgaatagttcgaccatgaagctgggaatacgtgccagtacgccaatgctctctaccattgcttctcgggtttctggcttcctggagcccccttccagtcccagcttctgtcgatctttcactggcactggggttgaccgcccgctgctactctgcgagggagggggcttcaccaatttaggcgcctgtgggactccttcgtaaagggtaggatcaatgcccggttcccggggtatttctacccgtgggtgaagacacgcgactaggtaggagagatagagctcttgttggagtttcaatacggaacgacaggttaaaatcagcgtaccagctactctgagagagctggtgagaatagccaggttctcagagcggacaagttggaagaggtgacggcaaaggtcgttttgagccaaggatgctaggctcggatgtcttgcaatcgaaggtcctgcaacttccaacgccacgtcaattatcctcaaggccattactcgcatggggtccgtgtgttgtcgattttctgggtctagaaggtcgatgagcacgcggaacagctctcggatggaagccaaagagtaagggctgacttcctcgcccaggtcatcttcagggttcggtggggcagcgactgcgtttccattcagtggttgatcagtcgaactatcgtagctggcgtgatcacgatccgtgaccgcggtgtcagagcccatagccgaggggtgctgagaagcgactgtggttccgtccacagaagggtccattttcaagtttgtttgttcggcgtcgtctggacgttcctgtggtgaagtctcgtcgtctgcagttgttgaagtggcatccaacacggacaggcgcatgaatatgacctggcacatattgaccatggctatctcggcagacctccgcagcacttccgagagacggacctgacaacacatgctcagccccgtttccatcatctcacagacactctcatctcccaggagttcgccctccggccccgccagcatgccctccatcaatttcaggatcctcaacaagacaatctcatcggcggcggaatcactggcttcgaaccggcagtgggtgattgctgcagatagcagctgcatagccatcgagatcctcggagagttacggtcgatgatcttgtaggagaagaacttggtcaaggcgagcaaagcaagagaggtgattgcggcggacgtcgaagaggagcgaacgacctggaggaacgggtgtaataacgctggggcgtcaaaggtcttgatatctttgcagtccttgaggtcattccgtaaccgagtgaaggcggatatcagagggttatcctgtatactcttgcctctcttccccctcagaccccaccgattcgcgagggcgtgatcatcgtccgcggagagcctcgacctagagcgggtaggtgtagccccattgagcggactggaagaaggagacaaatcacggtcatagactcgagaaacagtactgctgccgagaatggccgcaacggacgagtgtgcccaacgggcatgtttccgcatggccgacgtgaccgtaatacattctgtggtcactaaggctacagggtcaacggcaattggcagagaggaggaagacatggcgggcagaagcgagcggcggagaatgggagtgcccggtagaggaacaagctcaaatcatggccctgttgattgcgtagtatatagatggtcccaggccgatgtggatgtggacacaattcagcagctccaaaggcggagagggctgtttacccgactgggattagcgcattctttcccagttaggcttagccgttactattactcagcaattaccgaacacatacaccaataatgagtactctaatgttagagctcagtcgtttggagtacaaggacatgacaatgatcgctaatggttctgtgtggattcaggagaataattgcaagagttgcgaatgatatacatagttttggcaacgagagatgttggatcaagcattctgctgaacgtgatgctgttactagtactgttgggggatccatagttaagcggtgtggttcaggttcaggtgttgatagcttcagttccccacccgcaccccgtaaacaaacccgagagctgttccgacgtgcagctccttgcttcagagtccaatataatcgaaatcataataataatggccaggaacttgcagtttacctcccgtgcagctggtcttcttttctttttttcgccggatcctgttgacaagggcgaccaccagcagcagcagtacacgtgttggaagtgggtgctttctggtctcgaatggaattacgccaggatgaaattatgttagatctcgagtaggcccaatgcaatagatctacttaagccagtcctctgtctggagactgcctacgtactagtattactggaaagccgaatgcatcagccaatgctgggtgggcgcaagtcatctggagctgcatctcgaccacaacaacaaatcaccagctcccaagaacctactacgccttgccttcttctgctctggtggtctcagggtctttttaggatcttgctctgtttctgtttcagagaagagggtgtgctagtgactgtttttctacactccttcgtttcttctcctcattctcctcattctaattgccaccctcgtcggcctcgatggaggggctctctttcggcttccgtcgcattgaccgttcgctcactcgttgactctttccttctcgtcaggcctatcggctataatatttacaccacccttctctatcatgtcactcatcgatttcctatgtttctagttttctagttttcgaaccttggatgtgtctcgtcttcgtcgctctctcctcacagctgaccttcgggctgccttccaggtggtaccttggcccttccagcagtcgagcttccagctcaacgattcagttccttccctcgcttttcctgagccagctcttttataaatactcaatttaatactcgatccatcgctctttcccgctcggtctctacgtgtcgcgcgcgcggtcaaccttccttgcccgccatggctaccgcttcgtgtgccccctcggacccccctctcgaacaactcagcctgtaccatgtaaaaagaccaatcgttatcgtccgtattcgtgttctaccggcccgtgtcttg

SEQ ID NO: 2192 - DNA, 2405 bp, Emericella nidulans
ctggctaattttggaggattggcgtcgcggcttgcccaaccacagcgcacctcccgcaggcatgtggctcgatctggctttgacatagttatttacagagaagcccagaaatggccgtttcaacccacggagaaatctggcaaagcacggttgacagaatatttcggaatgagaccgtcgtatctgagaattcccctcggcattctcatggcgcctcaatcttaccttggtatttaacagattaacagattaaagccagcatcctatcgcctcgactagagaaaaaaagcactcttggatatccaaaattgatcccaccatgaagacggccggaacacgtgagctcttttaccgcgagcaaacaataggtatgcctatacccttctgcgttatcaatcaagtagtaacttggaatcccagcgaatcttcgcattgtatttggtaaagacgttgatgtcgtgacctgcaaacaaggctatgagagcagatttgtcgccttagcatatgtggttggggccgagggagagcgaattcaagtcatgcagtcgtcggctttggacgtcacatatgcactacgggacttgcttgctctatcgtcacggcgtgttcaggcttattttgctgaccacaaccatcaagtggccaaaaatgagttagcaacctgcagcattgtcttgccccgaaaaccagagtcattattagagctcaatcaacccacgcccctgaagtatgacgtgctgcccgaggatgaggcggctctagaggaagcaggtggggactaccttgaagctggtaatgtaattaagatcggcaactaatatgtcctcagaagcaaacccggggggtcatgaagcagagacaagttcgtcgactccacaatacctagaatcatgtaatgtggaacaaaagggctattcaatccttctgattattgagcatcctttccatccgccttttgggggattgagatatattggagcccctagccgtcaagtgattctgcaagctatctccaagatcatgtccgagaacgggttgtcgaacaccgtgtatcatatgaagactttgtgcgtcaaatcggataccggatcatacgatatccttggctatgagtatgaccacatcgaagacttacttgaccatgtcctcaaatcagaaaaatttgcaaagattgagtgtgtttatgggattcctgcagcctaatgcccatgttgcaatggttcttaccaatgcataccgcaaccacgctatctgccccttcaaaccttgtcgtcgaatatatctgcaacgatctgacagcattccttccttatcgttccagttcgaactgtttcccacatcgtctgttttatcttgtcatcgccaaaatttattaaaatgccgcgcaatttgagctttcgttttgacttatacgcgttgatttcccctcagctcacatcaaaaagtccagcatgaggccatggcgatctctaaggtgattccacatagccttatgcgaatcaaagcttcgatggttattcaaatacttggattcacaatcaaaacagtaccagatgtgtccatggctatccgcagctcccaggcgtccaggacggtggatgaagctagcatgatggcggcgtaagtgctcgatcgcttcatccatgccacaaaagtcttcttcatggtctgtacacgtatattccatgatattggacgattaaaagaccacaccagaagaaacctggtatctgtgagaaggcagagtattgtagagcagcttaaattctagatcataggctcttatattttgataatagcacggcgacagatgatattgggatgcgtcataatgacacgctggtaatatccagggtctttcgacagaaatgtggacacgaaattgataagcaagaatcttttgaggcctcatctccaagatttcactttcctcctcccctacagagagccaagttgccccagatctgaagcctggagaaactgaatcttggcgaatcatcggcccactccaaaatatatatccccagaggccatacacaagctcctgccaatagagcacgtggttaccaagctagatagcaaagtatattatgagacctatatgtctcgacttaaatctctacctactcctgtgttagctgaatgccgtctagtaaggtgaagctccggcaggtgatgatgtccggagtatcagcgaagtttcaattgcttggtaaccatggtttgtttcgtagactactttagcaggaccagtcgcgcaacctggaggatcaatatgagtgggatgaccagtgcggtgacgggttaagccacgatcacgctgatagcgcaagagtgggtgactatggggcacaacaaggatgaccatgatggccgctaaatccaccttcgtccccaaactgaga

SEQ ID NO: 2193 - DNA, 1832 bp, Emericella nidulans
atgcgtcggcctaggggttttgtttctttgatatgttgtatttcccaactttctgtcttattataatagctggtctgtcacacagttcgattatgtaataatttagatcaatgattcgattcatgacatgttctataagctattaccattgtacccatgacaatatgttctgtagaatttagaaatgtaaaaacgtaagcacccatcatatcatcaatcattgcagcgcccagagctagtatatctatatccaacaacccgtctatgacttcttgaataactgaggaaagcatgtccgcagctcctccaagcttcgaatctggaactgcgaagccggagtctcagggacaggaagtcccggctctacaaggtgcgccacctgccacccgcgagccgcggcagccttgcaattcaggccggagtcatcttcgcatccgtcagcatctagtccaccccaaccctccacagtgagaagaaagacataccaacaaaataacactgactcttatccgtagcgccggcgtccttctccgccttatcatacatcaactgggacggcttacaaataagcggcggattcgcgtagtcgcagtatgtgatgccctcgaacagatcgtctacctgaagcagcttcacaacccgcttgccgtggttcacgtatgcgtttgtcagaagccaaagctttactttgtcccggtcgatatcttctaggagctggcgcagcttcgggtccggcttgaggatgttgtctagtgggagggcgtcatcgacaaggcggttgaattcgagcgggtcaatcttgtggtggcgcgtaaggccctctatggcgagaccgtactctttgtagtatttcatatgaagcatgtgggcgtcttcagagttgagggagagatggtgcacgaagaatctatctgcgcgagaaggtgttagagggttgactccagacttctgtacgacttgaagagttgcacgtacgaataagcttttgcatctcatcgtgaatgttgttttctgcgccaaatctcgggttagcaggcaatccaacgcatcgttaccaggcgcggggtcggaaaggggagttcgaacttcttgagtaaagctggattgagcacttgtcagcagcggacgagttaattctggaatctgtgtacgcacacaattgtctatatcaaagaagaagactggacgagtgtccgtcattgtgctgaaactgttgactctatttgacgcaagtactgatctccggttgcgagagggaatgcgggttgagagtgagcaatatgcggggggtagtttgtatgcgcggaatacgggaatggagttggcgaagcggagaggcgcagtaaaactcatcttctactgccttatgagtcacagtccgcttaccaatgtctatatgagcggcctttaccaattttgtatacaaccctttggtaaactcgctacagtgtcggaatccttgaaatgcagctcatggaagcggcaaaaagggtttagcgtcatttgcggccaagaatctgggcaggtgatcggttttccagtcgccaagcgacccgaagctacactgcgccgactacaactctcgagttttatccagctcagttcggttcagcttaacttcagcctactcgcgtctcagtgactggttgatccctaaagacacctggcaagggccaaagggacaggagaattctgaagtctgaactcgaagagggctagcaagagtgctaattgactgtctggatttgtgcaggtgcagggatacagtattcattttttaccagctcctagaacatggcagcaacccagcttccggcgaggagcgctggaca

SEQ ID NO: 2194 - DNA, 3541 bp, Emericella nidulans
ctttctattcccaggctgaacatgctttggcgcgactgtctcttatatctctctacagataaccttcacagtgggtattatacccatctgaaagccagttttatctatgttatagatatcctccttagtgatcctatacttcttaatagtactggaaaactggcagaaccactcctggaatagctcaggattatcatatcttacttactgatagttatatttttatatatatttagagcttagctctgcatgtcagttaacataacaatttacccagttttcaccaactgtaggattctttgatagagataattatgctgcaagtagaagccacgctaggtagtgaacagttgatatttgtggaggaagaccatgctgacccatatcaataatccatttcttcaatgttgattcctcaagatctgttaattttctgcaattggcaattacgtctttccgagaagctgttccatgagccgggtcatcaaagtccttggtagtatatcaaatgcctttgcagcagcggtttttgacggaaaaaggcctgagctacaagcatcgatagctagcttcatacgcccttcttttgaaagctcagccatgttgttgtgtttgaatgatgaactggtaaaggggtggccgcgttgtttggcggtgaccgcgcagctcggtggtggattacgttacggctgacggctgaatcagcgttggttctcccgcgaatggccagttattagcgggagtctagtgtagacggcgtactaggaataagtagcgccgacactgccgtatctggctccagcgcgccaaaggacgtacaatagcatgagtccgctggcttcttttcgaaagtttaatatactatcatctcaaagtactatggtcgcattttatggtcgcattaggattcacactccgaagctcgagacagctcatgtaggttaagcctcgtattgcagggccattactgagggttcgttgtctagggagcgcacatgtttggagagatgtgccactcaaaaaccggccctgagaacatgctaggagcgaaggttttagacgctaagactattatagctgctttaagctatctcgtgagaatgatcataggaaaggtagagagaaatgttgcgccgagaattcccgctaaccgcgcgtttccgacataaattatgtatgaagaggtctctaatacctaaccaggcggtccatagtctttttatgctagtggtcagcgtacgcgttgactgctcaatgagtcccccggctcgttgaacttgccaatgggccgtgccatcttagccattaggcaaccctactggtaactagttcagcgtatttggcgcccagagagaatccgatcagccaggttctattacccatttctgcaccgacgaagacatgtcttataactacgagcagcagcatccagactggggtgtttcttggttgctacagggcactagtcaaactgaacggcagaccgaactgcatccctgaggcgggaataaatgtactggaaagttgtgcgaagagaacgttcaccagtaatcttatcagacaggtccttgactcttcaccgtcgcgagcagggatgctaaactggtgggaaatatcgatgctgttccgccctaggccgttagggcatgggccgctccggcccacgatagctcgtgatgaagaaatagacctgatggataggccacacagcagctctgttgatactgctcgtcgtcgctctccttactcaactatttccagtcctttgttactaggcccgttctttccgctatctttgaacatcttaaatgccaatcccttcggtgatccaccctcatacatcaagatggccgacttggccgacttggccgacttgagtgttgtcagatcatgtcagcatcgccggtaaagctgatgtaggaatccgtgtgaaaactgatatcacagtgtggatgaagtatcaatagctttctaatcttgcctaagggtaacaccaaccagaacccaaattagacatacgctactccttcaacgcatcatgtccccaattctttaaactgcgatagctcttactccccgtatcctgctttgccttctcctcctgcgcaaggtgtctcttgcagtacgagaccacgcgacgcatatgatcgatgtcctcgtctgaatacccatcagggtctttcgacgggttatgctcgaggatggagacgattttacggccgctacgtaccgataaacgaacattactcaacgtcacagggatagattgggggcgaattgggaaggcaaggatgggtagataggtacctctcatgcccaatcgtctcgcccgaacctgactcgttcttccatcctgacgactgcgagtgttcctctttcagccagtcgcgaagctcgtcagcagtcatgttgaccaagccgttgaattcgctgcagtactgttagtctgggctgcgtggcttagggcttggcagatcagccaggctagaagcaggtaagtacggactcaataacggtactgctgtctttgaccattgtgtgaggtgtgaactggaaatatcttcgtgaggagagagctgggaagagtcgcagtctgatcatgtaagaaataccgtacgaaattgtagcttcgcaggtgaaatgacggcgttgcgatggtcttatggtagggagcacggttgacgtcatgaccagcgattcttaagatgatcgatcgcggagacgtcaatcccgagtcagaaacagaaaatatgagtaaatgagctagtgggaagtgcggtcattaaaagtgatagataactacctactgggttggttcttccatgcatatccagacccatatagtgggaattcgggaaccaacgcctgggcaccttaatgaccccgctgctttcgacctgccgccagctaagaacctatagaaatggctgtgaaagagagttcccgtattataccggacaaatcctaggaccctgaattgtatcagatttgagtcgtgtagggcccgtcgttccagaaacctacagttctagattagtttcatgcaatcagccaaaccgcagttcagctctcgccaatttgtggattctgagcaaatctcctgtgcatgtgctgtctgtcatttgcaggcagtcaaggcttcctgcaaatctcacgaatctggaagcgactcaccagcagagagcttatagcttggctaatcttttcaggctgttaggaacagcttgcctatcgacactattggtatacactggcgactgctagtctagcatgcctattgctaggctttttagtggtggctattgccttgaggatatagtctaacagctaacttatatgccctggacgctggttattccggatgtacatggtctatatattcctattctcgatcatactattcccggatctatccgtttggtggaatctggaatgagccaatggatcacgagtcaggtgacgggaatgatgggcatttatattatctgagtgggtgagaggtacatataacctaaccctatactcacaagagcctagagag

SEQ ID NO: 2195 - DNA, 2121 bp, Emericella nidulans
cattcaatgtcgagcatgtgcacctcatcaatgaataagacaccaggaataatctctgccttaccctcctccttccactctgcaactttaacattgatctgatctctaacttcactcctaatctccccagtgtcaccagagaagagcgccaagaagccctgcgaacgcgagttgatgacatcaatctcatgcaagctcactgtgtgtacaatctccttccggacctgaagctctccctcggggcattggacgaatttgacgtcggcgcccatagcatcgtaatcgcgagatcgggcataggagcgccccagcttggttatcttgccagacgacttatcgatcgagatgatgtctccagccataaccctttcttttgtcatcgaatcgatcatcttcgttcccatgtcgtaaattgtctccatgtcggtggtttttatggtgagcttcccttgtttgttgccctggaacgagtcagtacagtcttaacgcctttccctcaagtgacttaccccagtaacgctccgatcaatttgaatctctaccacttcaccctcaataatctcgctctcttccttgattcgcacaccgatggattttcggaaagcttgtgtcagggccttcgtttttgacatttccatggagaaaatttcggaggcagccaacatggtgaacggaacatcgggcccaagcgactgtgccatacccatcgcaatagccgttttacctgtgctgggcgggcctgcaattaggacagcccgtccagcaattttgccttctttgaccatctggaggataactgcagctgcctttcgagccttctcctggccaacaagaccctgagaagccggtctcggttgcaacgagtcaacatctacgccgagcccccgaatgtgtgagtgagcagcgatgaggttcagaccccggagttccttggactccgcgacggtagaaattggctatctcaggaatgagcaatgaagaatgataagacacactatagagacaaactcaccgcagccatgattaaacgtcgcaagtaaaaacagccactatcagttaagtgtctcagggaattggatttcgtatctgatcgcaagtccttgattgtttccgcaccgcaatagctgcacaagctgataggctcaccgcctggcagaacccgctcgccagacgcgtcaagccgtatcaacaatcaatgaattagagtcggcgtgaaacctttttttgatacatcacctcacttccatttaatttcgcttcgtttaagtgcttcagccactttctaatctatcaacccaattttctctcaaatcgccgtgattcttctcgagaatttttcatgagaagttccttggtcatctcagagatgcaattcccacatgaagtgggaagtgagttcagcagaaacccgcattgagagagatcacgtactgactcttgctcttactcctagattaaaaggctattctcctacggtctgatatgaacctcgattcctccgtttcgcgatcacgcgacccgcgccgtcggcctcccataaacactaacctgagtcaaaatgaagtggcccagcaacgacctccttcaggcccctggaatcactcatctccagaagcacagcatgatgtatctgacgaccggtttatccgcagcatttccaacttcatcgagacggccgtcaaaacacgaacaaaagtagccgaaagggaacatctatcgaaaaggacagcagaaaccaaggacttgctgaataaggcgagctcccacgcagggtttccctcgactgtagagttctaccagcacaccaaggatggcgaagacaaagctctacatagtctcaacagtgagatcaagggtcatgaaaccgagcttcaggaattggagagcgttctcagagaccaatgggcggcctctgcaaattccagaacctccacgtccgatgacagggtacgacaactggagcaatccctgaaactagccaatgataaaatttctggtttgcgtggcgatattgcaggatcccatcgatcgtaacaagtcattggatgccgaactgaaaaatcgccagacttgataggcgctcaggaaaagtcatttggagggggtttcaccataagcctt

SEQ ID NO: 2196 - DNA, 2185 bp, Emericella nidulans
ctttcctcctctctacctctcacctcgattcacttgacactcgtgtgcgcctcattctctgcctcctcttatcccggcgcacccaatctctctctcttttttacctttttcgctctctttcacttctcttacttcaagcattcctcccttttcattggtcgattcattattgacttcattcttcgtcaagttgttcgagcgccagcgtcgctctacagattagatcgctatctcgctgcgtccagaacccgtttaccctcacccatcgcttcccgatatagtactgtctgtcggtttactagaaccatgagctcttcagatgatgataccccactcgtcaaaatgaacggtagatcctctggtaagtcgcggcttgttcttgtcaaatctgatgcgcttgcctcttttcccggctttccttgatattttactcggttttttacttcgtcgattcaatcttaattaatatatcttccggataaaggtggtcaatcggacgtgaaggtgaacggcgcagcggacaccaacggtcacgtcgatcccggtgtctctatcagatttgggccggtgcagaaagatgaggacgttgaaatgaatgatgcgaacggcgccagtgcgagcaagaggaaggcgcgatcaagtcgccaatcaggcgcaatcatacgcggagcccgaaagcagtgaggaggacgaacctctggtacggccacccaccacccagatcactacggcattcttgccatcgttgtttgcttcaacggctgactcccccggcagagcaagcgtcgacgcactttggtgaaacacgaggatccggagactgacgacgatgtaccacttgcacttaatgggcggaagcttcccaaggcttgggagggagcaatcggcgaagaatccgactctgatgttccaattgaaaggaaattagctgccgaaaaaaagaaaatttaagtcaagggagaaaaggacgcggatccatctgcacaggccaccaagtcagcggcttttggaaaaaagcaagcgaatggagtgaagaaagaacctgcctttgctaagcaaaccctgaagcaagtaaaggccgagccaaagtcagcgcagtcaaccccagcaaagaagaacgcgaaggctacggcattgaagaaggaggaaagcgaagaagctgaagagccagaggaagaagaatacaggtggtgggaggatccaaccaagggcgatggaacaatcaaatggaccactcttgagcacaacggcgtagttttcccgcccccgtatgaaccgcttcccaaacacgtcaaaatgaaatatgacggcattcctgtcgaccttcaccctgaagcagaagaagtggccggcttttttggcagtatgttaaactcgactcagcatactgaaaaccccacgtttcagaagaacttctttgcagattttaaggaaatcctcaaaaagactggtggcgcgaaagatcagaagggtaacaaggtcgatatcaaggagttctcgaaatgcgatttccagccaatcttccaatactacgatgcacaacgtcaggagaaaaaggcgctgccacccgctgagaagaaacgtctgaaggccgagaaggatgcacaggaggctccctacatgtactgcatgtgggatggtcgcaaacaaaaagtcggcaacttccgagtcgagcctccttcccttttccgcggtcgtggtgagcaccctaagacaggtcgcgtaaaggctcgagttcagcccgagcagatcaccataaacatcggcaaagaggcgcgcgttccccctccacccgaaggccacaagtggaaagaggtgaagcatgaccaggaaggcacctggctagccatgtggcaggagaacatcaatggcaattacaaatacgtcatgcttgcggctaattccgacgttaagggtcagagtgactacaagaaatttgagaaagcccgcgaactcaagaaacatattgctcggattcgcaaggattatcagaagaatctaaagcacgagttgatggtagagcgacaaaaggccaccgccgtttaccttattgaccagtttgctcttagtgctggcaatgagaagggcgaagatgaggctgaaacggtcggctgctgctctttgaaatatgagaatgtcacgctcaaacctccgaacaaagtgatattcgattttctcggtaagg

SEQ ID NO: 2197 - DNA, 1838 bp, Emericella nidulans
aatttgcgtgctctatgatcccactgacggcgtcgacgtcgccatcccacctcgctacccagacctgtacagcccgaccttccgcgttgacagcgtcatgatcacggcgggagtcgttgagggggcgaagtgcgttgtctcgggcaaccgcgtgtctgacaacgcgcctgtgactcttgtcacggttgatggccggaagaactacgccaagttccctcagggagttgcgaagccggagagtctgaagatcaactgcgtttaaatgggggttgtactgttaatcagttctgatatttcgacaaattcctggttgtcgttccttcatgggttggccgcccgtcttatccagatggtgttaatttctttatatatcttatatagtctctcctttaattgctgctggtagaagttgtttatatgatggatggaattgcctactatggtcttttcgtaattttcaagtgctcttttgactacgtattataaaaatgaaaagcctaatttcctttgagtcagtctgcctctggagcagtcatgcttgtgccgactgctccgtggtctatggagcatcgacctcgcgtaatgcctaagttggttgtattggtcaaattccaaggcagacgctatacgaatgaaatgctcgtccacttatcaataccttgtcctcattacctaacaactaagatagataagccaggtaagggttattccttatctacttcagcattgaacaataagagcagcaagcccggcaaagggtcttgaccctccggttggagaagaagagaccaatataataatctctcgtattgactccaggctatggacgaatagtaaagtgagcagagttcattctctaatatcaacttccctcaatttctaaaatagagctatatgtaactgggaaaaagcaatccaaagatcgctccttcagctggcgcgagtaaccacttgccgacaagtgctattcaactgcgagaacaagagtagaatacactgattacgattcttaccaggtaatatggttcatttacgcatatatacgcttcatcacagcagttaatccaggcgtccagtggaatgctggtatgggagataaaacattcatagcccacttgcactctagaattttggcaactatatggcatccgatatactaagttatcttattaaagctcttgcacgatcctatctacaatagtgttcgtgtagttccacaacatagtcgagtaatctgtacaaaacgtataccccgtgtagaacgtactagcctggccctgcagcccataaagcttcttatagaatccccctttgacatcttctaccgaaaccatcaatgtctcgggcgagtgcgacgcaaatgctgcaatctccggctcctggccgtccttgatcccgaaggtcccggcagagctcatccgctttaggtcgtcaatgatcagggcccgcgcctcggcctcagtcaggtttgcgtcgccgatgatcttgttcatgaagtagcccgggacgccggagtactcgagcgcccagttgaaaggggttgttggcaggctgccgggttgattggtgggatcggcgttgaggatgttgaagtcattggggacggcagtgttggttaggacggcggcatagtagttcacgtatgtccatttggagaacagggccgactcttgttcggtgaggtctaaaccggcccggtttttcagcaccagtgggaacccgataggggtttttttgggcaattcatttctgcgcgcccgtccggcgttcggatgaccacctgaccccggtttgttccggtggtcgggcggccttggatctaaaaaaagtgttaccct

SEQ ID NO: 2198 - DNA, 2171 bp, Emericella nidulans
caaagtctgggggttcattttactggcatcagtctccgaacgctcatggaaaatctcaaacctagacttacgaagggtgcagacggcagtcagctttccacgcgggagacttttcaagatctttttgggattctatttcctgcaactggtgggatatttgcgtaagtatctgtctcaagtctgctggatatcaggcttatctgggtagtggtgcaagcatgtcaggcgacttgaagaaccccagcagatcaataccgaagggtactctctatggactggctctgacctttatcctctacacacttgtgattttcgcaatggcggcttccttaacaagggactctctatacaataatgccaatatcgtgcagattgtaagcttccaaacgaccttgttcatcacaatctgacatttttaggcaaatctctctggggctattgttctttcgggcgagttcgcaactagtttcttttctgctctgatggggctgattggatctgccaagctgctccaggctattgccaaagacagcttgcttcctgggctgaatctgttcagcaagggcacgaggaagaaagacgagccggtccgcgcaattattgtaactttcatcgctgctcaactgactatgctgtttgacatcaaccagatcgcgtcgttcgtcacaatggcgtacctcatgacattcttagtgatgaaccttgcctgttttctgctaaaaatcggatctgcccccaactttcgtccttccttccactacttcaattggcagacggctgcaaccggtaccttggtctgcggagctagcatgttctttgtggacggggtctacgccactgcgtgttttgctgttttgatcacactattcttgctgatccactatacttctcctccgaagccatggggcgatgtcagtcagagcctgatctaccatcaagtgcgtaagtatttgcttcgtttgaagcaagagcacgtcaaattttggaggccccagattctcctctttgtgaacgacctcgaacacgaatttaaaacttgcgctttctgtaactcactgaagaagggttcgttgtttgtgcctggccatgttattgttaccgacgatttctcgttcgccgtgccggaagcgcgccgacaacagaccacttggacaaagctagtcgagagcttgaaggtcaaagctttcgttaacattgcagtatctccttcagttgaatggggagttcgcaatattgtactgaattctgggctaggtggaatgcgacctaatatcgtcattatagaccagtttcgggagggtcggtctcttggcgagtcaatataccaccataaccaccattcacatttattatcgccagatgcttccagatctgagtcgtcgaagaaaccggcagactgccggacctacgttagggtgttggaagatctattgttccagctacgtataaatgttgccgtagccaagggatttgaggagctcaagctgcctgggcaacgtggatcggagtccaaaaaatatatcgatctttggcccatccagatgtctgctgaaataaacgccaacagtgaaacgaaacgaaacattttgactacgaacttcgacacatacacactgatccttcagctaggttgcattctgaatactgttccttcgtggaaaaaggcatataagctgagggtagctgttttcgtcgagtatgaaattgacgttgaggatgagagaaagagggttgaaaccctccttgagaagttacggattgaagcggaaattctggtcttctggctcgcatgcggtgatttgaaaacataccgcatcatagtcaatggagacccccttccagaatgtcaggacgtccacgagacggtccacaaagtactgaagaatgaaaattggtgggaggatgttcagcgaggccgcaggagctcagacgagtcgttaggtttgagtttgatgaacaggtctaggagctcgtcccgttttgatgtctcgagtcaggagcatcgccaggcacgccatccgctggcgggcggggtgcggaagttgatacagtcttccaagcgcaggcgatctatttccagcttcagaggcatggggggtgttaatttaggcatgcaaacacaccgattgctagatgcctcgtcgatgatgacagtagtccgagcgacactt

SEQ ID NO: 2199 - DNA, 2455 bp, Emericella nidulans
gttcaaacagggtcgcagcatcagggcgcgcaaggccaccgttctcctgaatcttggcgttcagaacagaaagaacctcatcgggagtaaccttggccacggaaccggcagcaatatccttgtccgccatggccttttccataacatccatggcgcgagtggccagctcacgaacctcgggaagagaagcacggtccttgactgcctgaacaccgggcttgagcttgggcaagaaagtacgagcctcggcggggtcgtggacgagcttggtcaaattctccacaacaacaacagtctgacgcagagtttcctgaggagtggttggcgcattgagagagcgctctagtagaggagtaagtagagccagcacgggagaagtgacaatggcgacgaaagtcgtctgcgatagggcatggatagccttctgcagggtctgctcggagggctgctccatggttttgatgagcagggggatgcggggctccacatcgtcgttggacaggagggtggtgagggcgttcatggccttgcaggcgcacttgacaacatcgtttttgagatcgtgcataccagactcgaccaacgggatgaggtccttcagagtcttgcccatagcctcacggaggacatccttctcgagctcctgttccttggtccctgagcccatctgcgcatcaagggccatcttttcaatgagacagtaagcaccaacgaaaccctgccatttgccggtcccgcggctcagatagctggagatggcagggagtagcgcattgaccttggcctcgggtttgagggcggcatacaaggcatcgatggcgtactgggcggcatcccgcacgacggcacccttgtcggccagcgcatcgagggccaagtggaaaacaccaccgtcttggagaaggaagacaacttcactaaggggatgagccggagggaaacgctcaaccagcgcgccgaggattagcatcgcgctttcgcgtctggcgccattcttcttgtcgagggcagccttcttgatttcagggaggataaaatcatattgggaaaacgagaacgggccgacgctctggatcagaaggttggccagcgcatatgaggcatcaagcgactgctgagaagtctcggcgttgaagatcgtctgaagaagggaagaaatctcctggggagcgggaggaacggccgagggagttttggcgacaacggtaggcatggctggggtggactcaaggtgcggcattctcttgaaattctctatcttcgtcttgttagcctccaactgacgcaccgctcaaggctcatcgactgaactcacggggataataaatgcagtcaacttttgcgggtataaaacaagagaaaaaaagcagaaattatgaaagggacaacgagaaagaaacccaagaaaccacaagagaacgcgaaggcccccaaaatacagggagagaggagatggtgagatttgatggaggggaaactggaaattttccaggcgataaagaatccatgtgcgcctcaggcagcggcggcttaagttaatggccaatgagagtggcaaaacagaaaactctgagtgtccaatcaggctcgcagccctggaccggtgggttcgactgtgactgtgtcccttatcacgtgattttagttaaggcctaggttatcaggctattataaggcaataattaggcatattaccccatcgaacctttccgctttggggttaccccgcacgagacctacacccctttctgctcaagggcttctctcccgctctccgtggttgatatatctgtccctacgtgtaattctatggataattcgatgatatgattaactcaagtgcaagagatacagcagcccaagtggtatagggtcgccgtactgttattgagctgtcataccccataattaccccgtacggagttgccgaacccctcatgtgataaccgagcgacaacaccaccggtttattgcaattacacggaggaagggaaatagaaagtacttcaatgtagactatgagaggcttagtaacggtgtctgcaagaaaccgtcgatcactccgttcatcggatgcattgtaactggtgcagctcatgtgccggggacagcctcggcctgtgcattcttgactccgcggccaaccggaccgcctcttcagctccgatcctactgtcctcttaaacattctcacctcatttccgtcttatttctctcttcttctctccttcgcacagagcctaatcacttcctcattgattcacattcttcagttctcatacttctccaaccgaatcagattcttctcgagatggctcttccgctccgcaccgctcgtcatgcctcccggctagcccaggtatgttgctttgtttagacgactctttttctttttcatcttttcttttccattgctcaaataaaattcaatgagctaaagttaatgcttgataga

SEQ ID NO: 2200 - DNA, 1706 bp, Emericella nidulans
gccctcgattttcaagaactcatcgaactcaagaacccgccgtttacagcatgaccagcctttgctgccttcatgaaaaacgggctggccggggtggtagacgcatcgctcctcatcccgcgacacgtcgggtttataggtgccgccacatcccctcctccggcaggtagcattctcagggatcgcaagctcgggatcatcagattcaggctcttcaggaacaggcgtaggcgcattcgagggaggagggatagcaggcgagtgtgcgacaggccggggaaccccgctatctctgacaggaaccggagcagccacaggaggctgtgactcggctggcgtatccttcttttgggccggcgcaggagtatcgtctacggcggagtgttttcctgtcgtgcagggggggatttccataaattcctcaaaggtgaggacgcggggcttgcagcagttccagcctacattaaaaaggtaagattagcgatggctgcggaggcactaactcagagggtacttgcgagtaacatatccccaacatcaaattagaaggaccgatagaggaggtctacttacctttctgtccttcgtggaatactggcgggcctggatgatacacacagggctcctcggggtcggtgaacaccttcccacagcctttgtgtacgcacttggtggccattgtggttcgcggatattactatctcaccgaactgagacagaaagacgattgggaggattttaagaggacaatgagggcgccgtagaagtgaaaggtgggggagtcttctcgaaggagctgatctcgtcagagcccaaaggggtttagtctggggaagctcgaaggttccattcggcttcctctctccgaccttctcagctcaacgccagttacaacgacttcaatcaaccgaacaatcgaactattgtcctttatacaatgtttcctacagcacgcctactccaagcccgcgtcacgctcttcacccgtgccggctgcggactctgcgacaccgcaaaacacaccgtgacccagctgcataagcgccggcccttcgactactctgaggttgacattatggctccaggcaataaggaatggaaagatgtgtacgaactcgatgtcccagtcttacacgtgcagtctggcaccggggcactctccgacccgaagaaattgttccatcggtggaccgagcaggaggttgagacgcttgtcgacaacgccgagaaaacaccatgagagtcaactcgtggattattatgctacatgtgctacagcagttcttacggcggccgacgttatgataatccaaacgacccgccttccgcatcgctgttcgccgggtgcaatatgaagtatattcagaattggatttatcgtgtccgatcataatgcaaataaaacccgccaacatgcgatggcttatacttgaacggttggatagcaactggatctttcaatccgttcattccacccgaatcccttgtgaactgtgagcaggttaaaagggtcgacccaatttttgatcgaagaaaccggtaaagtacttctggcccaaaatgaacaaagtggtgggctccaagggtcggcctattttgtatgaccttcgtgggagtaaaccccacaggataaaaaaaagtgtcctctgcaaatttggatacttgctcgaagtggcctatattcttgaaaaaataccaattctccc

SEQ ID NO: 2201 - DNA, 2236 bp, Emericella nidulans
ccatatgaatgccgcgcagagagtgatatcgagccgagcactggccgcgacggcttttttaccgcgacgccaggcaaatacctcagctggacaagcgcatacatcctcgtagtctcacgggtcatcggcagcggcatcttcgcgaccccgggctcgatcgtaaagtcatcaggcagtatcgggctctcgcttttgctctggggcgccggaaccgtccttgcggcatgtggaatggtcatatcgatggagtacgggtgcatgctgcctcgttcaggcggcgataaggtatacctcgagtatacctaccctaaacctagatacctggcgtctacgctcgttgctgtgcaggccgttctcttggggtttacggcaagcaactgcatcatctttgcaaagtacacggtgtttgcgttcggcggcgcacccacagagctcactcataagctctttgcgacgggtctgctgaccctcatcactattgtccacggccggttccgtcagacgggcatctggatccagaacgtgctgggatggctgaagatcttcctgatctcatcgatttccctgacggggatctgggtcatcctcctccggccaagtggaattgagagcggtgccggcgctgcatctgcggcaatggatcagggcttgatgaactgggataccctctgggagggctcaaactggagctggaatctcctttcgacctcgcttttcaaggtcctctactcgtatgccggcctgaataatgtcaataatgtgcttggcgaagtgcgcgatcctatccgcacactcaagacggtttgtccggccgcactcttaacatcggcggcgctgtatttgctagccaacctctcgtacttccttgttgtcccgcttaacgagattaagcagagtggagagcttgttgcggccttgcttttcgatcgtctgttcggtccgcgtgtaggaggaacgctgttcccttttgctatcgccgtctctgcggcaggtaatgtcatggttgtcacatttgcgctggtacgtcttatctcactttgattttctttttttcacctccaactacagtcctaaagaaagggagaacaggcccgagtcaaccaagagatcgctcggcagggcttcctcccttggggcgacctcctctcctcatcgaaaccattcggcacccccctctggggcttgatagtgcactacatcccatcaatcctggtcataaccctcccaccgcaaggcgacgtctacaacttcatcctagatgtcgagggctacccgggtacgattttcggtctcgccatcacagtcggcatgctgattctgcggtatcgcgagccgtacctgacccgtccattcaaagcgtggttacccgctgtttggctacggatcgttgtgtgcttggccctcctggtttcaccgtttattccccctccagggcacaagggtgatgtggagtttttctatgcgacgtatgccgttgtcgggaccggagtgtatgtccattcatcttttgcattctcattcttcctcgtaggttccgaagtgatgctgactgatcatgcaggcttgcctttggagtgatttactggtacgtgtggacagtcttgcttcccagatggggcgggtataaactcgaggaggaggagaaggtgctggacgacggaacagctgttacaagattggtaaaggtttgagcatctgtagacattcctactacatttcataggcgtaaactactttactacgggtcattattattttcattaatatgtccatacggagatcgcttccaaagcatgatcttgcagcaaagtagtccagcattaataatcagctgcttagtagctgacagctaggttgtgttagcctattcctgcctattcaaatgccttggaaatctaacgtcattgattagaaatcagacaaaacccaactgcatcctgtacatgcaacggtatacagcttgattcttgatcactcagcacagaatggaagctatccaatcgtgccgctttcaacttatcagcatactgcaagcatctgtcacactgatgattgcgtgctggcctgacatattggcattgcgcattgtctgaccccccatgtggagacatataatagtaaccggcactgagcacactaaacttcaggctcagatctcaagactgcacttgtccataccggttcaatacttagacctattcagatacttcaggcattacactgtcaaactgctaga

SEQ ID NO: 2202 - DNA, 4950 bp, Emericella nidulans
ctgtaacgctttagactctaaagtccccgctgtcgtttcgctgctgtacttctggtcgctggtgcttcgagacacgtggaataaccggtttggcgagacactgatactgatcgacgaaacgaggtcatcgagggtaccaatggggctacggaagggaagatgctgcagatcaacagcttggtacgcaccgttcttagtacggtagaagctccggtatttgcggctgcagtccttgccattcttgttctcggcgaacggaatttcttcagtcaccccgtgaattttggaacggagccgatagccagtatagggcagtgggcgccgattgtaggtacgggctttgcgatattcgggtcgctgtacctcttcctcaccgacgacggcgagaaaccgtcttcagcctgcaagtgcacttgccataacgcccaaggaccaagttcacgcggcacagacccagcagcgtccacaaacagcagcgagttagcccattgtgagataacggtcgtagctagccctgaacccgcacatacccatcctacccaagaggaggcccgcgactttggctaccggcgcagcatcggacgagctctcaagcgcctggcagacacgatcagcattgccgctcacgaccgtctcaccgactatgacttcaaacaaggcccggcccttgactttcccgagataccagcggaggagcagcggaacagtgagctaccgcagatccgtgatcagtataacctgaagcgagactccactgccagccgcaccctctcaagggttggctcaactgtcagcacagcttcctggagggatggcgagcgaagttcaacgacgtctcacggcatctctccgcgctcgtccagacagtctacgcggtcgcgatccccttcgcccttgccctctccgtctcgaagagacgatgaatcctgcacctttccgggctcgcacgatggctctccttcctcaagcgatcctcctatcctcaacacccgtaggcgtcagaacaccctagaggtcccaccccaccatggtccggtgagacgcagttcgtcaatatcgtcagcctcaagctccaacttcacaatggctggaaatctacaatcgcctaccattcgggtctcagcagacgacgacggttctcctgtcttccctagacctggttctccagagccaaaccaagaggtcccgcctcacgcgttccgtcacggagggcggttcacttcggtaatagatatttgaatagagagtgcatatcttggactgcataacttctaaaattcgccgagagctatattgacttccagtgatccctattttcttaaggacatggctttacggctagtatccaatcgccaacttatgacaaaacgtctacccagaacctagagctaaacgctgatccggcagaggccaacaattgtacactagaattagtcgcctgtcggcgctttcgcaagatcattggccgatttgtcgggattcagctatccccgcatattctccagagtactccaggttttagtacttgtgggtcgacgatctatctccccatactttggagaagatacaaaggccagttcccaatccttcgccaattgctccttatccgcgatgtagctctgtggctttcactggtggcctgatttcgtgtattagccgagctgctttctgagtattaaccgcggatatacgtattgatttacagtatcatgcagaatatataaccgcagcaccggctccaccaccagctgtccgttgtggaatggagctcacacttctttgggcagatctcgtcattcacccttttctgcaggcagtatgacatctcaacgtgtcgttccttctgaacgtgaggtcgctgagcttcggagggtagagggtcagacagccgatctcatccgccaggcgcaagagagcgatgaagccgatcgcaagttgaccatccgtcaggccgtgaagaaatacaaaaaagcagtcttctgggccttatttctgtctactagtttggtcatggaggggtatgacctggtgatagtatgaggccttggcgatcaatccttgacggatactgactggcatcagatcacttcattctacggccaaacccagttcaaggagcgtttcggcgtctacgacccagcttcagaccagaagctgattccagctgcatggcagtccggtatatcgaactcggctctggtcggccaactagctggtcttgttgtcaacagcatctgccaggaccggttcggctgccgtcgaacaatgatggtcttcatggtgtggatggctgtcgccatattcgttcctgtctttgcgccatctcttccagtgctcgcttttggagaggcattttgcggtataccctggggcgtatttcaggtaaatatccgcgaaggacatgagcttttcttgtctgactttgcttatagacgctgtcaaccacatatgcttccgaagtagtgccaacagttctcagaccatatgtcaccgcgtatgtctgtatgtgctggggcgccggcatccttctctcctctggcgttgttagggctgtagcaggactccagggcgaattgggctggcggctcccattcatgttgcaatgggtctggccccttccacttttcatcggcgcatactttgctccagaatccccttggaactcggtgcgtcgggataagatcgacgaggcaaggacaaacttgatgcggctataccaggatatgccggagcgagagcatcaagtggaacaaaccttggcctatatcaaatacacgacagagatggagaaagccgagactgccaacgctagctttctcgaatgcttcaaggggaccaacctgcggcgaactgagattgtgaggttcctcactaccgttgtttctctggcccaactgactggtctcagaattgtgttgtttgggcagcccaaattctctgcggaaacgcgatccttggatactcagtcgtgtttctccaggccgcgggcttcagcgaactgcaagcattcaacatcaacatttcgttatcggcctgttacattgtcggcggcatcatttgttggttcctcttcccccacgtcgggagggcgacaatctacatgagcgggctgaccttcatgttcttctgcctggtcaccatcggaggactagcttggggtccagggaaagacgcccagcttgccatcggtatcctccttgtcatttccacgttatgcaacatgattgccattgggccgacatgctaccccattgtcgcagagacaccgtccggaaggctgagatacaagacaatcaccattggtcggtttgtttataacctaaccagcatattcaccaactctgtcacgcctcgcatgctctcctccacatgtaagttgcctcgatcgtccttgtgcgcaattctgacttgggaacagcctggaattggggagccaaggccgccttcttctacgcagggaccaacctgctttgcaacatctggtgctggtttcggcttcctgagacgaaagatcggacgtttggtgaaatcgatctgctttttacccatcgtgttccggcgaggaagttcaagtctactcatgtcaaccgtacgtacttctcaaacttattctgcttcgtattcattaactgattgacagaattcgcccatggcggcgactatgtgtcgaagcaagaggtcgaacacaaggagaacgtggaataggcagagaagactttcgcagtattaccatgaaacttggaactttaatgaatacttgctctgtataatggccgtttgggataggagtgttgtgatatgagtgtcagatagcaatgcatttctttacctaaacaaatatctatcttctcgccacacattccggagctagataacaggcattgtgaccaacagtactgctatgcctaagaagcatggccgagagttctgtttggagaataaatgcccgttcctatacagttgagcgactgaacgtgtagatggtctcggctgtaggctaaccccacgttttggaaacttatactgacggagaaagcgaccaatcagcgtgcaagagccccgacgccccggttggagtcagcgcggggaactcaagttgtagacgcagtaatagtcataggatggccatgcaaactgcctaagaggcgagatcgatgtggaggacttctcatccactttggacggctaattactccacggcatcagctcggtctgattgcagctggagtcataccgcagatggagcgtcgtatttaccgaatggaaagtgatatgttggtcttccggacgccagacaaagctttaaagtcccatcacttctcacattccgttaagcgcaattcacagtctcagtaggtgaccttgtttgtttaccatggctttccagcaagtgcctgtccgtaatgtcaacattacgtccgccttctggtcgcaaatgcggcaatgctccaaagaaaagaccattccagccattatcaaagcgcaaaagtccttgcagcattggtactgcctgacgtggaaagagggtcacgagatccagcctcatgtgagtgagcgcattcgcacaaaatagagccagtactgataatcctgcagcctttctgggatagtgacatatataaaatcgtcgaagcggcatgctactttcttatgaaagacaaggacgacgagctgatggctactgttgaggaggcggccgacatgatacgagcagcacagcacccggacggctatatcaactcttattatacagtgcttggaatcgacaagcgatggaccaacttacgcgatatgcatgagctttactgtctcggccatctaacagaggcttgcgtagcctatgagaccctcacaaacagtggacggttgttggaaccggtactgaaggcccttcgacacgttgattctgtttttggagccgagccgggaaagtagagaggaattgagaga

SEQ ID NO: 2203 - DNA, 2879 bp, Emericella nidulans
ccgatgatcgcacaacgtggatcgtcgctacaacggcgtagtttgttggtctccggtacacagcctcttcagagatgaattgctcgtcaacagtgcagggtaggtcggtatcgcagtcttggtcgttgatcagtactggtttgcccatttccaaggccatgatcctgacagaaaattagtccacaacaaaaatacgacagttcttaactccacaaacctatcccaagtatacatcccccaccaaacgcgcttgcgcatttccccctcaagtacaggccaaggacctgactccagatgtaatcctatttcctgagcaactttaacggcggatccgttccacacccagctagctgacgtcgaattgacttcgtaaagaaatatgctagctaacaaggcggcccgcgcctgatccaatgtgaagttatcctgccaaacatcgatcaccccgcaagatgttctcacgtactctttgcccttctcttcacggttcgggtctgaagtatgtaaggaaccaagggcgaatacactgaacaaaacagctgcccactcgcgaggaactcctatgagtgacccgcgacggtacacctcctcgtattctttcataaacgttggccagtgaatcacagggaaggtggtatgaatatgggcatgatactgagcgagaaggtggtgggcaacgtcttgcggcggaagggggggagggtctgctgtcaacagggatatggagtccgactggcgatatggcgtggggactttccagattccccttccatagcgccgtagattagccctagcattggagagatcttgtgaaacaggagcctttggccgacgcggcggtctgtaacctaagtcaggtaaatttatttggagctgtcctggcccgtccccgtccagatccgtcaggttatccgacctcatcccggaccgcagttgctggagctgttgtctagtcgaccagagttgtttttctagatcttgaacctgcctacgatcctgtcagaatgacaactctttatcgatcgagaatgcaaggtacgaacttgatagaggacatgcgtctgttggtttctttagtgaattggcatcgaaccttgcggtttgtacattccgtacaactagcagactcggaggcatcgcactagaagaagagcgtagtcagagcatagaacgaagacgggaaatagtaaagcctcctgtaccttgaccttgcgctcccggcaggcatcgcagctagggtccttccttcgttgacggtacgccctcttctgctgtaatggctgctgatgttgcgctagcccgcctccgtgccggaaaattccacctgcgctcaccccggagccattagcagatgcatcctggaaagttgcggcgcccgcttccgatggagagacgctagaatcatatggcgagtatttcgccgtagatgttggtgcagggggcggctgtaggatgtgggacatcggcaacccgccgctgggccttgctgattgagtggaaagaaaagcactcggctgcgggcctggctgaaatggcatcgaggaagtaacggactgcaccggaggcagctcatagggagcgccattggtattctgattagtccacgagcgtgagtaatgtggctccatatcggtgtctcatagaagcctcataggaaacaacacgcagagcaagcgctgaaatttgtccagatccagaaggacctgtgattgctcctcaagtaaggggttaaatgattttcgtgacggaaagcagatgtatgtgcaggagcggggattcacacgaggaacaagatgacgggcttggggtcaaggcagggaaccgaggaaaaggcacgacaagaatagagcaaatcggaatcaaccgtcgagaccgcaagagagctagagagcagcaagggcctccccgatattcattaatgtgggatcaagcgccagtcgcattaacaataacaaaaggtgggactgaggcttatccgtcaacgacgccgttggacagctgggggcatgaagcaagcacaaattccggagccagtatccgcagtaaagagggtctcagataaactaatggcggcagggtcggttcgtgaagagaaaggatctaagcgacctttgattggtagaggagttgcgagattgaggaataacgggagaggtggaaaaggaggggcacgaggaaagctaaagaaggaaagggactggaaggaaagacagaatcacgaagagaggaagagtgagagagcaaaagagtgagagaaatgaacgtgggagtaacagtgacagcgtgggattggaggagaggaagaaggatgatggtggtggatggcggatggttataggaagcgatccgatggcagaaggaataataagaatcgggactacatccaggcttcactggcggagatgcaggcgacttcgaaacgacagcccgactgcaagcaaaaccttctcaatgcttaatttggagaagggaaggactgttcactgtgatgatactgggattgtagaatactcgtgacagaagttctgaccattcatccatccatccttccgtccagattttgttccgcccaatggccccaatcccatattattcgcatctactaggctctagctgctctagctcactctcagttagacagtaatccacagcccctcagcttcagtcaatcagcggctctcgtcagggtccatccaagcccaggaatcaactccgacagttccaactcggcaggccccgatggccagcgaaagcacgctaaatgctgaaacgccggttcgccgccatgccagatcgagattagaccatgtccaaatcatgtgggtggaaggggagggggcctgcagtctgcagaattccagtcagcatttcgatgtggc

SEQ ID NO: 2204 - DNA, 2306 bp, Emericella nidulans
tgccaaccgtactgcaccagtggacaccgaacaaccctagtaactggtagaccagcagagtttccggactttctggactcttttgactctgactcgcagtcaaattaaaaggcaaagcctggtttatccgatctcgctttggcttcttaaggctgagattgtaggagaattagggaatagaaacgcaagcgataagctcaatatcaaccgagcagttctcgactatggaagacagtctgaaagctcatataccgcaaagagtctcccgaatcaatattggacaatctctgcagcaaattccatctgggttcactcaaccttgattgacacctaatgacgggttggtctagttacagcttttgattggctcgccgaccatattacatcacgtgatatcaggacacaaagaacgtgagatcgcattcagtatgttggaagggtgttgtgagtctatatctaccaaccactgagttcatggataaatgcccaataggtatgccatttgaaagatatttatcaagcttagccgcaggtcccggtctgaattccatacctgttgtatcttttacagcgtgatcacgaagtagatatatccatccgctgctgcctgaggcgggaacgagagtcgggaagagacgtttttccatacagctcgcacgcccgctgctttagcgaaactccgatctctgtttgcttgttgtgattttaccatatgaagatcgatcccacttctcagaccacgccctagcaacaccccacaaaaagaatccattcgaagggaaaaaatttcattccctttgtcattaataaaattgacaattttagcatgcaataataagctgtcattggtccactactcatcaccttcatcgtcttcgtctcctaattcagcgtcgagatccagtacttcatacctaatcgcgccggcgtacaacacacaaatcgcccttcggccctgccgtccattcacatcaatcctaattggtcgagctttggctgcgaactgatgtttgactagctggagggttgagatatcaacgtccgtcctttccttcacggcatcgacgtggtgaacgttgtgataattgattgtaaattggtaagcagagcctggtgggtatacatgtcgtggtggttggaatgggagttgcaggacgtaagaggttccaactgcaggtatgttagagtgagaaagattcgggattagttgatgtagacgccacataccgttatttgaccataggaccatcatattgttgccttcggcaaaatgtacctggcgaataatgccctcatgaagattgattactcccactcgagcctctcgggtggaactgacgccgttttccatgttgaggaccactcggtaaacgtgtagtagatgctttgacgtcgctaatcttgaagcaacatatatcacactcgattgctctccgcttccgacatcctcgtagcgcatcgtcgaatcgaaaaccgttttatcacattcatgatgtagcgtaagcggtgaccgatgcagtataccgcgtttctgggtcactgcaatctggctgaagaccttgtcgaactgcagcccaagacgttttgtgaggttattgagcttggggagttcaaccagttccgcatcagcagatgctttgctttgctggttcaacagtttcttgaatttgtcatagaacgatctggtatctccgtctgtagggacccaattgtcctctgaagggggagggggtcttgcgaagcccatcatgggtaactgctggatgtagtttcgtagcgagctcttggtcaaggcgcctctgatgtactttagagtcagtggatattccactagatcagttttctccatcaattcttcgagagtttgtgacatgggttctgcactaagcatctcaatttggtgacgcagccaacgcgaaaatgcatggaactgggtcaactcttcgttcgcggtgatgaggatgtgatgggctagaagatgaagacagtcgagcgtctcgacgatagcattgaggtccgaggtctctagcccaaggacctcgctcagcttctggaacttcgaaaggccgattagccggctaagtagaacctcgcatcgctccaaagctggaaggagacacttcgtgtgtcaatcgcctgacattctcgtagccactcgcaacggcttttttccatcttttgtgaccctgcatcccgttagccttctacgcgagagtccaaggaagaggcgttaactactcgttcccccacgatgaccgtaaaaattcctcaagggttaaaacagcaccagtgacatcaaatatagc

SEQ ID NO: 2205 - DNA, 1326 bp, Emericella nidulans
tatcgcgcaataaccctactaaggatcaagctcgtatcattgatatcttaaagagtgaaaagtccagtacagacaggtaaagactctcaacaacgttaatccaacgaacaggagcaagtgccattatccatcatatcatacagtcggtctagacttgatcaccattatttcttttgttgcagcactttcacctcgcggcgtaatcgggtatcagcaaatgcggggctcgaatcctcccagttcccgccaaacaccctcccaatacaccgtccactcgacgagccgggtggatggagcaatctgaaataacaaaccaaaacagaataagaatactcgagaaaaggaattagatagttgtagctcctcaggttcccttaaccttgcgcttgagccaaccaaagaagccgctctttcgcttgtcggccttggaggtctccgattgagcagcagcggtttgctccgtggtggttttgccctcttcggactgcgcggcgccatccgattgcgctttatcagcagattgtgactcggcagccttggcctgttgcgatttctgggtcgcagcacgcgccgcagctgcgctctcgctgagtcccgaaggcttctcaggttgagtctggttggaagcagccggcttatcagcagcgctagaggtggccccagtggcttcgctgacaacgggtgccgcatgggccttttccggtggtgtgacggcagccgggggcttagtcacctcaggggtctccagcttggacttggaaggttcctcaaccttctgcttgtcatccccagtcggcgcagcggttgcagctgcagcggccgctgtgggcttggacactgcaggctcctgttgggctgagggaactgtcttggattcttcctgagcagtagtaccaacagtagcagcagggcctgttgtggcatcagcggtagtcttgccgactacagacggctccttctgggccgatggcgtctccttgggcccttctaacgtggcgggtgcctccgaggtgccggcgcctacagccgcagctgcagctgtgggctgagtgaccgcaggctcatccgtcttggggagagccttcgcttcctccttggcgttctcagtggtagagtcaacagcagtagttgtagcagtggtggtcagaggcttttcctcagccggtgcgttctcactcttggcaggttcaggagccttcgcgtctgaaggaattgtctctttctgagcagtaggaacttcggaggtagcaatagcctccacagctttaggctcctccgaggtctcaaccgcaggagtagcctccttgttgttaacgacgttgctgc

SEQ ID NO: 2206 - DNA, 2331 bp, Emericella nidulans
gccatgtgttaaagcgtttccgtttctgctctaaccggaaggcagtaccacaaccaaaccagcataacacctctatactaaacaccacatataacatcatgcctcgcggagtcgaatacgctcaggacaaccaagtgtccgacaacaccttcgaagccggtgacacgaaggttcacggcacaaaccccgacaacgaccacatgaaccgcgtcgaccgcacagcgcccatgcctgaggtgaccggctcctcggaaccgtacagtggacagccccattacagtaacctgcatggcagcggcaagggtggacacgagcctaagacactgggcgagaacaagggggtcggtgcccatgggtgtttaaacggttatgaataggattatgaggatttggactagttgggccaggcgcctaacttccaaacacatataatttttttctcgcaccttcctgtcggccgccattgagtggagggctgatattggagtttatgcattatataaatatatgattgaaacgaagttaagaacttctgcatccgaggaaacctgtttcaatccgatttgtaggatatattgacacgaaatagtaaaaaatatataatctatggacgcatggaaggacaataattaatatatacagtcgctgaaaggcgcacacatggtgatgattataggtacaatatcagtgctggccctgtcccttggcctcattttgagactggggtgagccttgccttgaggatctttcaggggactcttgagctggcgcttctgtcgtcttcttgtcgaccagttccaacaaacgttcgcccaaatctccgaacccgtctatcttgctaagtttggcttgaaagtactccgcgtcgcggtgcagcctacacaaatcagtataactttcgacaaatgtgctggaacggtgtatacctctgctttccaacttccgtcttgatttgagcctcgtcaaacgcccgggtccactggtctcgataactcttgaagaccgggtccatgatcattatgactgtcatttccggcagatgtttgctcagtactcggtgtaacgtgcccgtctccttcgtaagggtctccatgtacggactaacacccgcgggccgggagctggaatcccagtcgatttgccgcatcgcgttgacatgtatggacgatcgagatcccatgatatccacaagcttttcatggatgccggactgatgttcctggtacaaccgcttcaccttgtcgaaatcagccatcaaggaagcaggcggtgaatgtcgacggacaaattccctaatgtaggggaccagcgcgatgataaaactcaatgcctgcgaagacaacgcaagatgtttcgttgtgatgttcttgagaccagcgctcctggtagcccccgcacctaggattagctgcgatgaccgcgagttgaataattttagtgattctagaagaccagacgagatgtctggtatcatgttgggtatgtttgccatcaagaactgatactcttcgatgcttctcatcatcgccagtgctgagtctgagagaatatacttttgctcatcgatcacggcagaccgtgtcttctccttctccttggagccattgactgcaggagaatgtggtggcttctgctccttggcaacccaaatcttagagacgtcaatccaggtgtcaacgtcttttgtgctcgcacttaaaatacggtcaagaacctctgactcggattctccaaagtcttttgcgtcccaccgatcagcgtccattacctgtacgatccgatgccgttgctcgttaccgaaccggttgatgaagtcgcggatctggtttccaacaacggtcttaaaggcagttccaccccgaccagaaatagcctcgcattcgtctgcaaagaggcggttcaggataaagtacttgacaaaatcttccttgcagagattggccgtctgctcggatcggaccttcagcactttggtcgcctgagactgcgcgatgtcgaccgcctgaccgagcagactggacatgtccaagacttgtaggatctcatcttgagctgcatgcggtatatcccgcgggccggcatttccgacaggcgacttaggactttgaagacttcccagtccactggctatgtcaaggaggacttttgacttggacacttaacccgtcgtaaagattcgctaacaccagtgtacacttgcgcagcatgttgtatgcatcttcggcatccatagcccggagggtacgggcaagaatggacgacttctcctgcgagctaagctgatgagatctgtgagtagaaaccgacaccatgggactcgtatcgcgcatg

SEQ ID NO: 2207 - DNA, 2665 bp, Emericella nidulans
gaacaatacgaaggactttgcctttatgagccgacatgctcattcgactcattttactgaattgactggtcgtttcatcatcccggcgggcgggagcgggtgtgggagcctccgaacgcggagtcggcttgttaaagtcatcttcctcttcctcggacatgttaacctcgtcatccgaatgttcaatagtggacgataagcttgctttctgagcgtcccaaattcgccgaatagacgtttcataagacttttgttggcgtgcaacgttatagctgtggccgcccagctccttcaaacgttgcgcgtccaatttgtcttcaacactctcaccaattgctttgaaccctcctttcattgatgtcttgatgaaactgaaaccttctccacgtcctgtagggtctccctcgccgtgcagtttcagcatagcttttccttgcgacgccagtaagaagtttcgactggccttccacggcgccatttgttgctcaaaactttccgactcctcatcgttatcgtcgtcgcctccagtctcagcatcattgccatatccggtatcatgcagatgttgttgaccgacttgcatcgcctcaagaagacagacgtcttccggttgcacccatgatcgtatgacatcctgctctggtacgggttcaagaggcacccaatatttggtgtctttatcatgttgaaggaaatccttgaccttctggcgattctgcatgtcactcgtgccaggaatgtgagcagtgacgtcgcttatggacagccgaagtcagggctcttcttcagtaggcggtaaaccagcatcttcatccggttctttgcaaccgtcgtaaccttccgagagtgcggacccgggatatcgacagaaggaaactgttgcccagccacaaatatgttatcaatgtttcgaatgtagtagtcactaccacctgaacctgtactattgcgaatgacaaggaaatcagtggattttggttggtgggagaacaaaggcgcgcgatacatggcgttagagatggcgggtgtcacttccccaggatcaacgtggccgaagatggaaaacgggctcttgtcctgaggcagaagaactgcggtttccccaatctcggccttaggccgggtagggtcttccgcgttcttcttcctataataattgatgatacggttggccataccgaaatttgagagggtgagtggtgactcctccgaatattcaaccaatagaacatgggagttgtctgccatcgaaagcgatttggtcgagtcgtagagctggcgaatatccttgcccttctggtgcttgcgtttaatataagcaggattcttgaaccaacagctctgtccaggtctaaatgataatgctggacggtggaaagatcttgcttcggccttagctagctccgtcttgtagtaaggccactgcaaacgtaatgcgggcatactgtgctctagagtgacattacccagagtgctgcgaaccttgttctgatggttttgtttaagcatgtcgtaggcctggtcgtttgaaatgttatagcgcgctgtgagacgccgagtaacgttggcatccatctcatctctgctgcggacgcctgatgctctgggtttcgatgcagcagtatcaggacctcgctcatcaagcagcatgtatgggtcgttcaagtccaaagtgaccttctgcgcaaccttggagcttgcttgctccggatcgtcgaggagaggcaaatcaatatgggataatgaaactatttccatgggatctcggccgagtttgcgcttcttggctggccttgttgtctcaaaaagccagtcatcctcggcgctctctacaattgcaggttcgtcgatatccatagtggggatgtcatcccgaacatcccagtccgcgcagaccacgcgaagatcatccgcggtgatgcctccaggaagtggttcgtcagattcgtaatcaagatcaaactcgtctcgagcctcttcttcctcttcttcctgcgatgtctcggcaactgggacaatgccatggtgctcggcttccaacgagcgcttgaacgtttgaccgccagacctgaaaactttctcctgatcctgtgctaattcgatattcacttttcctggcagaaccggctttggcggcttcagtggcgttttgcctacgaaataggccttcttgtgtggaatcaattcaagaaaacgaggcagggtattgcgctcgaacatgggaaataaagattggagcagttcttcgacattctcaggcggcgccggaggattgtctggaccaacgttggacatggcaaacaaagcttgctgtaacttccaggcacgtagagaagcaggatccatatcatcagcaacaggacttaacggttcatcatcctgcagtaattcctgatcctcgtccatctgaatcgcctgtggtcgctgaactgccgtcgggcgttcgttcctcctcaaagaataaatcccgggtctcgtcggctaagtcagggcgcggtgatgaaggtgcctccccaaacaagtcatccagctcgtcgggcgcacgtgctcatcttttccaggcgcttcaaataagtcatcccgccacctccgaaaagggcatcatccgatgtttccggagcttcaaggccattttccgccactgctcgtgcgttgtgttgggtga

SEQ ID NO: 2208 - DNA, 2545 bp, Emericella nidulans
cgcactacggatcctctcttactcccccacattcggagaagactctgcgagacccaccagaaggatacagtcggcctgactaatgcacgtctgcgtccacggggagttcacgttggtatcagcgatatatagaaccatcccatacttttcctccaaatcggccaaatactgcgacagctttagcttccccattctgctaaaagcgtgtcggcccaggtggttcaagatagctgcttgattcagcgaagttacaccatcggtaacgccaatttgctgaagagcactcagcagccgattgccaaactcgacaactgggacgccggtcgttatgggaaggataccgacagtgcggagattgagggttgacgttgcggttttgacactaccggtattgccaggttcgccttgttcagtcatggggttttcaaccaaatctcgcattcgttgggcaatgagcttggagacctgaattgttatcccagtgtgttcttgcgcaagactgttgaagagcgatcgaggaaattttgccagctcggtatctcgtattgcgtgcaacgtagccggccgtgtcgattctgtcatcacttccaactcgcccacgctctctccttgtccatgctcgccaaccacggtcattttaccccccttgccctcgtgaactgatcgaaggcggccgtttagagtaatataaatagcatcactttcgtcaccctggtggtaaataacttggccagcatttacctggacccactccagagcgaaatcgatgtggaggaggaggcgcggaagaaggcctgtaagtctctttgccaacgttaacagggcaattgggtaccgctcagctaatctctctagagaggcccgcggaaggaacccaacgtaaacatccgtctttgcaacaacatcggtataagaacggtaggatgccatggcacccacatagccttgcattccaccaggcttgatcatgtaaagagacttccgagaaggtttcttgcgcttagattcgttgatgggcgctgcagcagtggcgccgcgtgatgtagccgtttgggttcttttcagcgtcggaaataattcttcatcaggctgggcatgaccaggcctggatgccccaacaagatcgtctcccttttcgttaacctgaactccaacgtccagaaagccgtctataacgtaatagagccccgggtggcgttcacctgttctaccagaaccgctccttttggaaagtaaacgatctctatatcattaagtaggtcttcccggagatagacaattggtgatgtgccaccagcgctcgtgacagacattgacatcattgactcggtatcgccgtcgccagacccttcgtaggcatcaatgaatccaaatgcattgttgctgaagacggctttctggcgacgggaatcatatgagaccagctttggggatagttcgccggagtgactccctttgcggagcgcattatgtgagctgggggttaaccctatgcctttcatgatacaatctaatattgattcacggaataaagcatcttcgtcgactgagtctttccgttgaagggaagagcgacgcagaggggagcgttctttctcagtcagcggagaatgaagtctaggggtagtagcgaactgatcatgtctaggcccgaaacgagaaagttgaatggtggaaagcaagtcacctgggctaactccagccgtgtcgtaaccatgaaaaggcctttctgggtttataagtgagtttggtcgctttggtagtggcatctttgctttgagagcagcctcttttctcacaaaactcatcgaccggcgtcttcggccggcgtaggggttatgtagtgcaattcccctggtcacttcctcagagcctaaacggtctttctctttcagaaatttgtctttcaatcggtctaaagctgctccacggatatcattcggcaagtcataagttgtaaactttgtcatctgtttctcaatgccgaggacctcattggtgagaccgaggtaggagtgagccgttgcaaatgtcactctttgaaggcgtgtaaggatcacctggactatatgggcggtagctctggggtagagccgcgtcaagcgtcgaaaggcacttgctggtatgatcgcgatggttgtgtccaccattgcccgcgcaacaatgtccggatgaactgattttctgcggtttccacgcacccgttctgaagctgtcgactggccgttggggtggtatgaagaggcacggctctcccctagatgcagaggtggcaccggcggcaggggctcagcctcaccattaatggcggaactatcaacttcagaatctctgggtagtaccatgggcgatccattcaacatttcacctggactatccaaaaaaggtgcgggggttgtccgagcgggacttggctgaacgctggacatgcttgagctagagccctcacttgcccgtaatcgaatatcctccgtaaacagggataggattgaaaacaaggatgacatggaagcgccgttcttcacttccgtgagcagctgataac

SEQ ID NO: 2209 - DNA, 2055 bp, Emericella nidulans
atttcgccagaacaaagggtttatgactctttgtgagaataattttaataagaccattgacggtcccttgtgaatgtcaagttgttcttgtcttctttgtctccctgcagtatcctcactcgcagaactttgtgacggtgcattaggacatggccagcgagcttagtctgtttgacaaatgagatgactgggaaacctatagaaaagagcaactaaaggcatactacactgccagcccacagcacataacgacaataactcaaccacaatccatgattcggacattgaatgaaacatatatacaaggcatctctagccacggtagcgcgttttatgtgcagtaatcctagtctcctactcaagcttcttgctaagcacaacaccataaaaaatagtagcgccaagggtcaccaggttgaccaagctggacagtccatgtagacgaccaaacttcttgtttagagcaatcatctccttggagtgaggtggggggtcgtagctcttcttgccgtcgcgggtttcttcgccgagcatgtcagtgatcctaacgacctagccagagcattttttgtttatttgtgagacatgtacataccctgatgctttctctcccgcatcgtatcgacagtaagcttgcgcaagacaccaaagtttaccagaccagtgatgaatgccgccgcgagcgggaggaggacactgaattggttctctcgttccaggagccccgaaataccaagcggctggccgccgcgggaggcagtaagtgcgactacgacagggagcgcggtctggagagcgaagtaggtagggaatatcttggcttggagagctgaaaactgagggcgcggaagggcgcggaaggcaataatgccggagacaaagctctataattgttcgttagagaccattgatatgtatgcgaaagagattggcatgtacctggtagagctggacaccgagaagggagccgtagctgagtcgcagaagtcaataccgggctcctcaatgttaggttgtcgagaacagaccttaaaatgtggaaagggcgggggtcgagcattttgactgctattattctagatagtggaattgtgctccaaggtgacggagtgctgatggggcgatagtttaaaagctggaagtctaggcgatgcagatgcatggtgaattgcgggaccatccgaggttccgcggaatgatatatccacgcgtgggctgacagatgagcattatttccacgtaaagctactcatgatagctatacaaacgcacaattactatgtacacgcacctcatgatgtcatgtgccaacgtgttgaggctgttcccaatcgggaaatatcgcgcgtctgcctaggcttcgcgcgatccatagcctgctgcctttggctgactctttatcaatcaattcgccgcggaccccttgtattatcttaatgtttgcgtctcacacatatcatggcggataaggaagcaacagtctatatcgtggacgtgggaaagtccatgggcgagcggcgaaatggccgagacttaacggaccttgaatgggctatgaagtatgtctgggactgcatcacgaataccgtaagtagctcacgctatggttataactttttctgaccgctataggtggctactgggcgcaaaacggcaatgttgggcgtgattggcctcaagactgacggtaagatatacctcccgtagaagaggttcttatactaaaacggttgacaggtactgacaacgaactgggagacgaatcccacttctctcatatctcggttttatcggagattaagcagtatgtagctttctaggtggatatgcttgaatcaagctgaccacccgtccaggtttcttatgtctgatattagggaactgggtgagcgaatcaaaccaagtagcgtcgacaaaggtgacggtaaggaatcctatggcctaatttcaacctatactgattatccagcgatatctgctctcattttggcaattcaaatgataatcacccattgtaaaaagcttaagtggaagcggaagattgtccttatcact

SEQ ID NO: 2210 - DNA, 2803 bp, Emericella nidulans
ctcaatacataaagacattaagggagtttgccagaaagggccgggaataccgcaagcagcaagatgagattgataaggaaaagggcgtggttgttttagatggtttaaagctttaattcctctgcgcatgaggtctgctctttttaccatgctgtactatagacaaattctaggcgtacatatgttgtaccctgtattataatccatattagacgtgctatggtctgacatgcctggctaacattctaatattattatgtttcgttctccggcgcaattgtccctgtgcttgagctagtcctcttctctaccttgtacagttatgttagccaatgatactaaaattgatcaaatctgcctatgatccgattcatgttgacaatcgacactatatatacaagtctgctgcctaatatatgtacacccagcctgcagataccaaaatgctagtaagtagtaggtaacaactaatatgtcaaacaagatcccaaccagacagtcaaatacacgaataaccccgccccgtcaaaaaaaataaaatgccattaatatgcaaacggaacctttgatgtgtgcgtgtggttatcccaacgctgttatctatatcattatcgattaatcgtgctgagacatatgaaggaccaacgttatgaactgctggacagcttcaagatgatctgtgtatggtcatagaaggccagccagatcgcgcattcaggaacgaacgcaacatgtataacatacagacaaatatctttgtctgggttttcagatgattcattgttagtctcaagggtagattgaagacagaaggatgaggtcggaagcgtcaaggcaagggagcgcagaacaacgctgtgcacagaataaacgagatcagtgagggtatcgagcgcaaggggcagaattccaagcatctgcttatgttaatagcggacgaaggaatccaagcgagtggtggcgtaaacaaagctttaattggtataacgaggagtagttccgagtggtgagtagcagcaatgatatttgggtcaatcaattggctcgttggtcaattgcaagaaccacattcagagcgaggtgtctcaggacttgtgaatgagttaacggagctctccaaggtcaaaacgcggtggtgaccaatctaaagttggtggtctgtctccaacgcatactgtgcctttcatggcctccattttctttcgctctctcgaagatagcaagcctctcagcgtagaggaggctgccccataagtgctccttgcgcttgcgcctgttccagtgcttgtggagacagtgcttgaactccgggtactgcggacactgctggttttgctcacagcggatggcatcgtaggaaccggaagtgcagaacgagaattcgaagctccgtagtctggaaagggctgtgaagcgatctctggatttgatgataggtacggcgatttctggagttcatcgtccaggccattttctacatcaaggctttggaatatttccaggtgcggacttgagtctgcgacactgatttgcggggcagactgtggcggcatttgagatctttgttcctgtgtgtcatttgtagatagcgccacatcgagcttgagctgttctagcatagtcccaagacttgcagcggttgcaggtcgtccatcgctctcggcgtcgtcgccgacgaagtcggtgccgtccttgctgagaccattagccagattgaaattcctaaatagatatcgacgcagacgagagacttctgcgtcccattttgcactcaaagactgcatgatagcctcgacctgatcatccatgggtggtttggagctctcaacagccgaaagcgagcttgcagtagcacggatatgaccataggaacgtgagtgcttggccagtttactgttgactgacatatgcttggcgttgatcgcagcatgtaatgaccggcgtagagaacttgtcgaaggctgagagtgcgtcaagtcccgtttgacattggcgatttcccggcgaaccttgtcaagtgaccgggctctatcgcaatccatacaagacaagcttaacaaagatcgattattctgaagaccattcacaagtactgtgaacgattgcagattgatatcattgttttcacaatagacctcaagtagactggtattgctttccaggacagaagccagagtattagcgccttgtagcccaagtttttggtgttcgatcctcaagactttcagggagctgtttttcttcagaccagttagagctagattgaggccaattccgaaccgcgctacatccagatgcgcattatccccgctgatatccaggtcctccaaagtatcattctcttcgaacatcaattggagcgacttggatgtctccggtccagcgtcgtaaggaagagatgctttcgagatatcaaggtattttagagtgcggttcttgcgcaacgcttcaaccaggtcttgaaactgttgctccttcttgaaatcgatcatcctcatcgataaatgagttggcgttttatcttgagcaattgcatcacaaaggtacgagcagccaagatccagccggttgtcattcacatggaggtggaggtcgcggctgtgctgcaaagccgccagtgagtgcaagaaaatagctacatcctgcccggagaggccgcactgatcgagtcggataacccgcagacattcggaccgatcgcttgcgaggtaggtggcaatagcatcaactgtctccctattggctggtgtttggttcatagagagctcttcgagccgccagttgaacaggacttgagccggaa

SEQ ID NO: 2211 - DNA, 1414 bp, Emericella nidulans
acggccgccagtgtgccgtatagcagccgcggtgcgcgaggccgtggggacgcagcgggtggtgcataccggcgattcgctgccgctccctctaccgccgcatccgatcacctatgctccagcgcctccagccctaatttccttctgtgaaccggtctcgcaaggcctcctgctgcccaccaccaagatcgtactcattcaggcacgcccacacggcaatcgcgcccagcgaagcttgcggccagcgtccggcttcctcaaacaagtggccgaggacgaggcagacgacacttccaacgagcagttctactcggctgctgaggataaaccggttgatgacagcaccgagatggagagcacatccaacgcggaagaatccgaaactgaaggatccggcgggaacacgagcgatacgtcagacgactcgctggatgacatgatttcgcttagtgcacccgagctaccgcagccggccacaggtgtcatgtctgggatgacttctgctacgcctcgcgctcgacgcatggatgggatccatactcctgggtcgatggtgtcgaacctcacttcctccactctccgtcctggccggcagggcggcgggaaggtgttcaaagcagagggcttgctgcgtagggtcccgaacgaactcctctacccgaagccaagggacgatgacgatgtggaggccgtagtctttgtggacatcagcacattagccaagatcggctgcttttccggggactgggttcgcattgaggcgtccgaagagccgcaagcaaacattttctcctctattaatctcggaagctttaatgaacaatacggagagggcgattggcgcgcagtcaagatttacggtctgcctgggcttccctctgccaagcctcgctattcgatcaagcaatctggtgataggcgtttaagcttttcccaacggcctggtgtgcgcatgacaccgtcagtctttgtaccaccattactgctcaataatatggataatccaagatacctccgtatatctccaatgagtctcggtggcatcggggttcccaagtccggtgttttgcatcagatgaaaacggcagctcgcagcccccctgtggcgaaggaggtgaccttgctaaaggtcagcacgccggtttcaatggatcgtgcgttgcaaccagccctcttttcggccctaaaacagtatttcgagtcgaagcggcgactcctaaaaagtggcgatctacttggaatcagcatcgatgaaaccctcggtagggctgtttttgcggggactggtgccgatggtcaggacgatgacattacaaccaaactagggcctgggcttgacactaaccgagctgggccgaagaaaatcggcgttgcttggttccgtgtcggtcaagtcattcctagcttgcccgag

SEQ ID NO: 2212 - DNA, 3904 bp, Emericella nidulans
gagtacctcagagactgggcgggttgatgcgttggctttcttaagaaagctgcccagcttgcgcatcttgttgagagtggtctttttccagccggcatcctgggcaattacgtcgttgatctcctcgcgcaacggctcaaagtactcgggatgttggcagagatcgtagaagcagtgcgccgccgccatggttgttgtgtggatggaagccaggcttaggaggagctggcggtgcgccagcttgtcgggctgcccgtcgttctcgtttgcgccgtccatcatccactggaggagatcgttgggctttacatagtccgggttccgcttggcctcttctgcgcggcgctggcgcaccatgggactgatgatgcgcttcgcggtccgcaggttcctgtggattgcccagtagctggggaggaggtgtcccacaatcgggtgcatccacttggggaagcgccgcaacagcatgacggtcgcaaagacgttctcggtgtagtgaatagaggtctggagccattcctcattgcagcatgcggcggacgccgaagaacacgcgtgcggagatgcgcgccacgatgcgaagaacgatgtggaacacattgacgctctgccagtcgtctaggttcgcggggatctcctggtccatggcgaagaggagctccgaactcgatgacctcgatgaaggagccgagattaggggtcagcttggtctgcagcatgcgcgtatgcaggtcgctctccaggaggatcagcgtggtcgagtactttcccaggagattcttgatatgcgcgcggatggcgctgatcttctcgtcaggcagggatcgcagttcctcgacatacttgttggggataaccaggatgtctgagtcgttgcgggcgaccttgaacatggcgttcttgtactgtcaagcgcattagacagagtcctgggggaacggtagcattgcgtaccttggcgtatccttcattgacctgcgccagagcgccctgggagaaacgtagtcctaccaaccatttcggctcataccagaatcggaagcccacgaaaggggccttgaaggatttggaatatgcgaccagggtttggagcaggtagaccacgctaagaacgccgaggatctccagatagagctgcgagcgatcaatggatgatggtgaatcggaagggatgagggtcccagagtgccaggtatagttgtccatatctgcagaacttagcgtttctccaagtttgttttagctgtatcaacaatgcacatagtttagtcgacatgttgacgggaatactgggctaaatatgcccaaactcgacgaccctatacaagaattcctactatacactcctacctgtaatcaatcctacgactccctccgacggatggtgtcggcgggtcggcaagggatcatcccttgaatccttcaagataatcctcaatccacaggcagtaaccattcatagtagtgtcactgactagaccaaaagaaaacgagatgtcaaccggcaaacgctcgacttaccaataaagatgcaggaccttctgtcctgtaactattaacccattattatataactctgtttttttttgcaaagggacgatcacaccgcttagacaatccacagctatccatagaaactgagctacctacagataatgaggattttttttgaagctatcgaaaagctatatattgtttatatagatcgtagttaggagatcaagactctcaatacagtcattcgttgcaatgttagtcacatgaccagactcgacaggcggggcatattgctttcttgaccgcctgcccttggggtctgaatagcttagtcagtatttagtaagctatataggcggccaaggcggccatgtcggccatccaataattacgaggacttcgtctctatccttatcgacgctagtaataactccaccgccccacgggagtcgcctgggataggtggccccgccgacatcagcctctctaccgtacactgtccgcctcttcccttcgtctattcttctcctgttagattacattgacgacccaccacaatggccacatatcggtacgatcatcatgatggaatccagactcaggagctaatccagtacatagcgaagcttggggtctcttccaagacgagaataccgtcagtatatctacaggaacaggccttgggaggaagacgatcagccccgatcagagcgcggcatcgagcacaacgataccgaaaacagaactcatcttagagctccagcggcttcgacaagaattgcgagaactacagtcggccaggtgagtattcccatatacccagttcaagcgcttttagcatggcgctgattccactcttccaaccattccagccaaaattcccaacccaccgaccaaccagaacaaccaggcaatggtctcccctctcgagaaacagcatccgaaaagtctgaaacattccggtgctgggaatcctgttgcaatggccgattattttccaatcgaagtaacctgacgcgacaccagcgggagcgaaggggggaatcggcgaagctgcggtgttccttctgtgatgcggttttcttacgcagctccgcgcggaatgcgcacgaggcggcccggcgatgtcgtcggtgaatggtaacgggaaattgcatagatcaatatccgaatagagaaacaaatcgtctagagcatcagctagcattggtcatgcacgagctgtcccctcttgcgttactccgttgacgtcagagcgtcaatagatgaacaagttctatatctgggactcatcatggccatataatgagctagcatttctgcgtgcatatgcatttatcattggttctgccgagtaaaagtctagacatgatttatcaatagatagcaacacaccgacactcaatgctctgacgagctgggtactgatcttgatcaggcaaacagaacgcaccatgtgccgtgccgatgatcgcctttccattgcggaagccagatgaggagaaaaccaacgcttcggtgggctcctggtccccgatataccaccagctatgctttccatcaccgctcagcccatccgtcgggccctccccagccgccattcgaccatcatacttaatgacaaagttggacgaatgcagcccgttgtaatacttccggctgattagaagcaggtcctcgggcggcatctcggccgcatcagccaccatcagggggtcacgctgcacccgcgtcaacgggcgccaaacgttgatcacctggaaactgccgttgcggacatcgtccgcgagatcgggaaacataaactgcacgatgctgagcgcgccctggggggtctggtcaatgtgtacgcgatacgcgggcccctcgacgccctggtagcggtctttgatctgctcgccgaactcgttgccggtgcgggtgcgcactgcatggtggaaggcaagcacccgcttggccccggtgctgcagtattcatgcagattagactagcgcgtcatggaggcgaacgagcacacgcacatatcttggaccagtttctcaatctctcggtagtagacctctttgatctgggtctcgtcggtggcatccgtaagcgtggagtggatcgtcgcgtactggaagccgttgcgatccagcgaatactcctccttgtaagggcgcagatcgcggattcgcattttgtgggaaatcatgtccttttggcccagcatgacggccatgtcgttggtggcaggcggagacccatcgctgttgggcacgtagtaattcaccactgcgttgacgccggggggagacgttgcatcaaccatggttcagacagtgtagacaggtaccgactgttctgctggtcgcagccatcttgtccagcatggtgatccctttagtagggttaattgcgcgcgat

SEQ ID NO: 2213 - DNA, 2347 bp, Emericella nidulans
agagataaaagagggtaagaagggagcaaagatacaattataaaaaggttgtttaaatggagaaaaaaccgggtgtgaaaaggagctttttaaaaggggtaaacaaccaaggctcgtttgaatcaaataggggccgctaaccgtaagggggttggttgccccccccctgtgaggaaaagtttgtaaaaaaagccaaaaggctttttcagaaaaatttaggtcgggagctgaatttctgtgcccagtctgttatgctggctttgtttaagctcaatttccacagttgtggaaactggggtagtggaaaacctccggtctctagataatatgcagtgaaagtgcaggaaagtctatcttttcagggcaaaactcgtttcaaagaactggagatctggcgcagcacgggctaggcaaatattgtgaaggtgagccgcttgtctcctgctgggcgaagtggtgtgagtgtttgtgctgagaaagactactgtgcagattccaacatcaatgtcatagtcctcgccttcctgatgactatcaatggacccggcggtgcaccggaaatcgacttctcaatatcatctcaagggtgcacgacgttcaacgggacgaacttgaaaaactgtcctgagatcgggtatagctttatccccaatcccatttgatacaaggcggctaacctccccagcgaggacataacgaaatgtcaagccgccggcaagacaatcctcctctccatcggcggcgcaacctatagtgagggcgggttcgactctgcaaccgcggccaacgcaggggcggaccttctctgggcgacgttcggcccagaccagaatgatacgaaaattcatcggcccttcggaagtgccgtcatcgacgggttcgattttgactttgaagctgcagtcacaaacactggggtgttcgcaacgagactgcgcgccctcgcggacgcggacacttcgaagaaatactatctaaccgcggcaccgcaatgtccctaccctgatgctgcaggcaaagacattctgaacacaaacagttctgccgcgattgacgcggtttttgtacaattctataacaactactgcggcgtaaacgcctacactcccgctcgaaacacgcctgctggcgcccgatccaaagccggatacaagcttagggctcgagaagatcggtacggccgtccgcatcgcaactcaggctcgggtaaccaagctgcggcgagtaactttaacttcgacgtgtgggacaattgggctcttacgcagagcaagaacaaaaacgtgcgcgtgttcctgggcgtgccggctaatacgggcgcagcaagcacggggtacctgcccattgcgagtctggagccggtaattagctacagtaaggggtttgagagtttcggaggggtcatgatgtgggatgtttcgcaggcgtatggaaatccggggtttctagacggggttgctaaagcgctaggaaagggcctgaccgcgcatgctcctgtgcaggaatctccgcagcagcaacagcagcccgcaattgatgaagcgcaaccaccttcggcacagcaggcccaggatgccaatgagtcagtggatacaagtcccctacagcagcaacagcagaacgcaggtggcgaagggcaaactccaacacagctgggccaggatgtcaacgagtcattggaaacaagtcctccgctgcagcaacagcaggaagcaggtgacgaagggcaagctccagcacagcaaagtcaagttgcctatgagtcagtggatgcaagtcccccgctgcaaagtcccccgctgcagcaacagcagaacgcagatgacgaggggcaaacttcagcacagcaaagtcagggtggagatgcgcctgtaactacgagtcccccgctgcaacaagaaggagcaataccggccgctctgcaggagacgacagaggcgggagagcagcagctgaaccaagatcaggcggacgatcaggatcggcccttgaaccttcttccttcgattttcgacccggacgacgatctggactggattcagatctgatctacacatcattcttctttttcttctcctttttttttttctcccttctcatgtctacttttctgaatctagtcatactataatgatgaatggtatatcccttttgtggatatacaatgcaaagagcctgagagatgtttaccctggttctacggtagctttcattgaccggatttgcgggaatgcccttagctgagagtcaggaactcagctcccaggttccttctttccctcctgatcttcccatttggtataaggccctgcaatccgcatgaactattgggccgatcacacatgat

SEQ ID NO: 2214 - DNA, 2397 bp, Emericella nidulans
cccccccccccccttggaatttgcaattcctgtgctctcaagatcggtaacacaaaccttgtggatcagagcgaattccatgcccatggagtccgcaatcgcagttgcccgcttggcgccaccagcgtctgggctcacaacaacggcttctttgtagttggcgatgttgcgcataatatagttcttgagaaggggtcggccgtagaggttatcaacaggaatatcaaagaagccttggtattggggatcatgcaggtccatcgtgataacgtgatccgcgccagcacaagtgagcaagtcagccacgagagtacctgcttgagccacccactgtttatatccaggacgcggttcaaatttattaattttgtcttggctgtcatctaagaggccgttcggaagcgtggacttgctgctgtccgacttcaaagattccatagtgtcactgcgagaaagcccgttgggtaggcgtttcttgacagggctaccagaagactcctccagctgagcctttgccagactcttttgtaggttatcaatactgactccatttatcgggtttccgacctcgagcttcccgggatggggggttgtaggggtgctctcgaaggtatacccgttggaagcgccctttccttcaagcgatgatttgactagaggagctcccgatttgttgtaaggaatatcactctggcgagagtatggaaagagcgggagaacagcggtgactcttcgagcagacgcagttttgcatgccgaaatagtgataagcaactccaaaagatggtcgttcacctttccaccaccagactgaagaatgtagacatcctttccacgtacggattctttgatttcaacccttgtctcaccgacagaaaactttgacagcaacacgtcggctggaggaatcccgagtatatcgcaaatcgtctgagtcagttgaggatgggaagtgcccccaatgacgacgatatttcgaaccatagttgccagaatgtcggtatgagaagaatgtcctagaaagtacgcaagtggccctgggggtagccgattcggaggcggagaaaacctgggaaaagccgcagaagcgggtgttctggaggggcggtatcgatcgggaacgttagctcggtagatgcgaggcgagcaaaatgtggaacggaaagtcctagagtaaggagagccagaaactagatcatggcggggagtcttgaacacgcttcaagggcaaggacgaaagagacatggaatgagatgtagtggatcaagatgtcgtgtgagcccgtaatggaagaaaagaaaaaaagcctttcttagtggaccttgcagaccgggttttctgccgttgacgcctcaggtttcagaccgccccgatcaggataagcggtatcatggcccctcgtcttcaaaggaccccgcaggaatgacgaaagtttgagcaatcgtcgtccacggattaggaaagcacaccacaacgtaaaggaacagaggacaacaccaaacaaaacatcaacgtccagcatgcggttagccatcatctctcagactcaacagtagctgttttgcctgttacgaaagggctaagaagctgcggattacaccaaggacagtctcaattgaccaataagtacttgaacgtgaaaaaagactcgaaaagagacaaatgaaacaggaatagaagagaaatccatggtattgttcaagaaacaggtccaagtccgggtccaggtccggtttccagtgtttggttaacaaccaaaaaaaagtttttgcattatggaggattcttccaatccattggtatagtatcaggccagctccagtaatcctgtaattcaaggtcagtaaggaagcagcttcgcggaagcccagagcaacgtcccggtagacagacataccagggatgagttcaggtgaaaggctcacagtaaagttatgctctgtttatctggatctccaatatattgagaaccccacattgttccaaaacagccgatccttcagcactgtcgaagttggtgatttcaacgattgaggacaacgtgatgcacattattgttagggatttcccatcatacacgatcctacagaacgtcagtatagaacaccggattcacacaaaggtttgcatttttaccccgtgaagatttttataggcgacctgaattcgcgataagttcccaatagtggccactcctatccttgtagacaaggcgaacagcaagaaacaaatcttcctgcgttctagcagataaaaattcctctccagcatttttgatcagatcagtgactcagccttgaagacaagtgccctcaccatggcacaggtgtacgtgaacctgctagcggtctgcgagtcttgggttctaatatgtgatacagccgagctgaagccgt

SEQ ID NO: 2215 - DNA, 1884 bp, Emericella nidulans
aagtagaagaaggtagtctgcaaatgttgacattttacgattcgtttagcctgcaatctgaattgatgcagctcatggtgtcaccttctccaggaatttcggccttcccggacgctgatggaaacctcctatcctggactgctactattaccggcccttcagaaacaccatacgagggtctgactttcaagctctccttctcgttccccaacaactacccatactcgccacctaccgtgctcttcaagaccccaatctaccacccgaatgtcgacttctccggccgcatttgcctggatatccttcgagacaagtggagtgccgtgtataatgtacagaacgttctgcttagcttgcagagtctccttggagagcccaacaagtaaggctacatcctgaatttattttttgttgttatactaacggtcaattagcgcgagccctctgaatgcccaggctgctgaactctgggacaccaaccaggaggagtataagcgccacgtactggccaggcactgcgacattgaagacattgaatagagtacctctctctagaattcctactgggcgtttggcggaactggttgttattcttttggaagcattgcattgaaccggggtctgggttgcacttttggactcatttttcgtggtgggaatctgttcactcgcgcgggacttggatatgctttctcgtaggagaaggacagcatcactgaacttggggatccgttgttggcaaatctggagaaacggagttttcggaagcaggacgtttccctgcacagcactgttcttgccgtcattcggttgtccttctgcattatatttcttcttattctgagtctataatactcagcaggtatttttatatgtacaccaatcagaggtgttgtgccgtctcattcctatcgagaccagtatgccatcacgtgaccctagtctagacttgcagatcgcggggaagtaataaaacggcgttgacgctcctgccaacatgaggatcatgcggcgtgtcttgcgtcctgcagtaagctaggtacgaagttgtgctgccctcaatggtggctctcgaatactctgcctcatggacaagcttcctgttgaaatcctcacgaaaatcatcgactgtaagagctgtcgtccccgcctgctgaactttttaccccacacagactcaattcctaacgcatttgggcctttttagacctcactccacttgagcaggtacggcttcaatctgtctcaaagcgattcttcgccttagcccgcgacaacaacttatggcggctccattgctacgagaacacatgggctgctctattagccgctcggcccagtgtcgaaggctccgatagcctcgccacggattccactgcatctctcagctccctaggacaaccatcgcttcgctccctaatccagcctcaagctctgccgaacaacaacgatccggatacccaaggccggacgccgaccttcggcgaaagagcaagggctgcagccgcttgggacccgtccgcagagggagaagatgtcgattggtactcggaatatattgctcgtaatggaccaatatcactcagctggctccagcagccgttcacaaggacacagagtggtggaaaatcttacatcgaggtgaaagggatgggacttttgcaggactggagcttggctaggcaaaataaagtgatatcacctttgagtgacggcagtgtttgtgtttgggatctcaaccactctcatgcgatcggttctcgggtcacaaagggcagcatacttgggacgagcgcaccaggtattttgacggttgacatgtctcaaaaaaaagagaacccgcggcgaaatcagcactagagttcatcaactgggcgaatgtgt

SEQ ID NO: 2216 - DNA, 5677 bp, Emericella nidulans
cctcgaccgcgaaagtctgctaaaccggtccgtccgcacacggttctacttgggcgagccgacgccgctcctcgagaccgatgatgcaggcggcatcaagcataagctcctcgaagcgccgcaggttgataagctgttctttatcagtccaccaccctccccgccgcacggctgggtgatgcgccaggaggaccccccaaacaaggaggtccatgctagtgatcttgcgcaggcgctggcaaaattgaaaacgcagacggagggttctacctacgctacatctaccgtaccggcttctcagcagcagacggatccggatacaccgatgtctctttcgtccgacaagaggacggggagctggccgttgttgcagcagcgaagtaggagtagcacgcttatatataacccggaggagcacggcggcagccccaacctccccgctgtcatggtcgaagatacgagcgccgacccggatgatatggacgtggagatgagcccgattgatatgcctgtgaagcaaacgccgccgttcaagactgctcgaccgcctgttgagttgatggtttgattacttacgaccgggttcttgcttcatgtctggtccactgcaattgcattctaagcgtttgacttggagttggctgcttgttgatgtctgtattgttttttattttcgactattgtgattgcatcaggtttctctctttttctcaaacattcattgcgaggcgttcgggtgatagtttatcggcaatctattcatggcgatggcaataatgtgtgcatttacggttctaaaaaccagtactaggcatacgatgcttacttaaatataattctttagtatctgcaagtctcatattttccagtagtcttctatatatcataagtagacttgatagtctgaccatacatggaagtttgattcaatcaaacaacaccactgcactatccttcataactgtaggtcccagtgttgctgccagctccgctacaattcctttgattgactgcggctcgtctattggcattttctcccatccgaccaagtcctattcgtccattgtcagcccacacacatacatacacaggaattaccagacaccatgacgttgttataacgagatgagaaggggtggaaaggcgccaatactcacgctcatatgcacaaatgacccatgaatgagtaacggccagctccccaggtccaacttcttgacttcgtccactgttaagacacccggcatgtgcagcgcgaaaagggagacttcctcatcgttgatttctgcttcggcttcagcattatcagccgcgtttgcttccgtaccggaggttgcggtcgtggcgcgatctcgcgagagggaaacgtagggtcgtgtgttgagctttgcggttagttcgccgtctaaaggatcccaggtgtaggattcggggtctgctatcgttaacttttggctggccttgagtgattttcgttggaggcgcacctagaatgtattggggccggaaattgcccttgtagcgcatcttctggcaggagtgaatgtagtagcctggtaggattgtgttagcgagcgggttctggaactgatgggttggatactaacccatgtagtaatattggtagccttgttcgactgcgaaggctatctctctcatcgcactcagttttccaatttcccactgctcgtaatcagggtcgtagcttcggctgttagttacgttttcttattcgtctccaatgctgtgacgcttacaagatgtaaacagacgtgacgccattgggcatcagatccaacacggcgacagctatgagcttcccatcgaggcggtagcactggtgccaggagcctattctgcgctgtacatctcgcccattaggctcactccgctttagtcccgaacagaggaagcgcttgaagtctttcgtttgccatttggaaacgtcttccttatggaccttcgtttggtatttgcggaaaagatcaaacctaaaagatgtaagtatatagttgagggtcatggtgcgccttacatacttcgcttgggagactgtgtcgccctctaagtttacctcgaatcgatgcgccggctccagtgatctcttcgtctttgggtcagtcggccgcttgacattgctatactcaaccgcatggacagcatcgtgtagatcaaagttgcatttccggtgtttcttttccctggcaaatttgtgaactcagaatccaagtcgcgacaaccggttagaatgcttactcccttgtttttgggcagagatacgcagctctacggatatactcgggcccaagaacgaacttgttccaacgattgatcgcctttcgttgatctcgtcttggtttgtaggccgaagcctcgagcctggactaattagcgatgccggatcaagctggctgcgcaaccagacacgtacctcatggtataatgaggacagcatgaccgctgcaggttctgcttgtaatacagcgttccggacctgcactatggtcagaagactgcatatttactacggggtgctgcctgaccttctccatccccggttgacgagttcctcatagtgaactggacgcaccgagacggagctagcgtagtatgaagcacctacgagcgtttgcgatttagcaagaaacgcacggctgcggggtggggctacggcgactgactgccattatctgatttgcaatatccgcacgagttgcgttggtaacctgagatgacatattggttagaccgatgcaagcgacagcgacgatcagaaaggaatcatcttcttagtcacgacgagtagtcaatgatttgacggaacgcacaggattggctaggggatgtggcgatgggaatgaacgcggaaatcagcagaatgaacggccgggatgatcaggcatcgtccttgcgaggacgatgccagaatggatggaggggcaggctcatacatcaagaggggcaggatgaagctgaggccgatagagagaccagcgaaaggaaaggcacatgaaccaatggccattgcacggggagaggcagactgttgtgactggctactcaccgaggggtcggaacagcgacaactgcctcgctcgttcggcgtcaatcggttccatggtgtggtggttgcgaggctgtgagacggacggagatgcagactcgggattggagagggatggaattattgtcagcgctcaaggcgggaagaaataaaagcggatgacgatgatatccggtatgacgaggatgattaagatgatggatggagagcagacagaagtggacgtcggcggctgagatggcagcagtgcagtgagttcttcaaggttcggcttctcagcttaagcaattgaacttgggaactacggaacgtttcttattaaggcgacgagctcctacctagagatgactgatggtagctcactagatagtcgcgcctgggaatcttctcacatatcctctaaacatgactgatgcttctagaagacacttggctagctcccttgtcattatatgcacgctcgtcgattccgtccaatctgcccgcgctgtcgatattccttcgttgccagtaaagtccacggcagcattgacgtgcagcagtatacggggcagtgactagcctcaaactgacactgcttgcttatccagctgttagtaccgactagtttgactactgtgtccgttaggttatggtaggatgtactccgtaccatactgttcgccctgatacggaaacggtttgtgacgataccatccgtctcagcccgttttaccagcactggaccaatttctaatatcggctgccagtcccttctccagcgtttcgatcgtgggctgtatcatccctgatcttgtgcgcgttgaccctgatggtaatcattgagctctgacgtcttcaggggagatctgttgatccagccgatcgcctataaaagtcctcgacagcgagctaatctattctcgtccagtttgccctcgatacgacgggattcgttctcagggctggttactcaagtaaaaatccacacttctggcacgttggcacattggcacattagcagattaggacatttactgcggacctcgtttggttccacagggagcgagctccgaatgaattccgcacacaaataatgaaacgtggatgccggtaaccccaggacaccgctcgagttttattattggcattgataaccacggcgaattcgcaccagatttgcccattttcttgtccgagcatataccgacagttttcgttttcgatacctcgtacgctggacgggccgcatatcccctcgtaagctgaccaaggctcagcgctttaacgttgggtgcattgtccatcgcctgtagtttcctacgacttgggaggttacagcaaggacccttatgccgtcgatgccaagtcacctgcccgccgtccgtaacgacggtgtccacgcgtttttcatcattgaccgtagacgcaggagcacagctcggagagcgtagcgggcctagctttagcgagtcacgttccatgctgtcaggtatcaaaccttattttctgaagttggcggagaagctgtccggaagtgaggaagctgtattcttctctttttctgaaatggaaggagatcctttccgaagtatattattattgttattattgggccaagcgcgagcgtaccctgcatgccatctccatctgagcattgagcagaaccgattttcggatcggctcccctcggtgtcatcaattatagtcgatcgacgcggggcagagggcaaacccaagagcacacgatattattcaggaagagcgcattccgagtccggacccgaccgtcgcgcttatttcgcgagaggagggggcgcaaattaagagcactgtacacagtacgttggacgtgacccgtggcccatctgccccatacttcaaacaaaccatgcaggtgatgcttggggcatcctgcagatgttacgggaaaacatgtccacgacgaagaggataaatgaaccatggggtcgatcagagcgtcggtattgctcagaccatgctgttgctagttgcagagggcttggactagggaaatcaaggatgcgcataagatcagttagtggtcccagagtcccagagggcttggggacgctccagcggcgattgggtcgcggcgcgacaacgcagcaaaagatctgtaaacgtgcggatccaagatcccagttggctttatccgcctttgcgtactgagtacgaagtagattgtacctaatagaccgagtgaaggactgatgtgttgcggataatggccgtggaagtgaatgccataatgttcattatgctgcgcgcggtactgcgcgaagcacgtgacaccactgggataaaagagcaaaccggccggaaacggcggtatatgatgtggactcatggtttaagcatgaatgaaaaacacgaagctaggatgagggccttttcgttgacagcacaatagatcatgagtggaaaatatagtagaggtcaatgtcaagccggagtactgtgtaacaatgtgacggtaatacgcataacacccacacgcagagacgcccgccccgagagaccttttttacggttgagtctctgctgccggatagcgccgccgcccattatccatcccaagctgtctccgtcctcgcctcccctccgttcctg

SEQ ID NO: 2217 - DNA, 2082 bp, Emericella nidulans
  unsure (1)..(2082): unsure at all n locations
aaaaacgggcgcgaggcttaggaggacgggtggcagctttacgtggtgaaagagccatatccaaggaaaaggacgtggatctaaagcttgttcccgatgtcaaagatatcctgccagcgataaagcgccgcattatgggaaatgttcacgtagttcattccggattatggaaattgaatgaggacatcgccaatatcgagttagcccagcacgcaaagaccttcggcgtcgtattcgcggaccgaattacccacaaaacaacccaccttctttcagctggtaagcgcaccgcgaagtttcaagaagcaatgcaacgcccaaaaatcaaaattgtacggaaagaatggcttgtagatagcctacttcagtggaaacacctggatgaagggccgtatctcgttccaacccaccccaacgagcagcgcagttccaaggaagtagccgaaagctcctggctttcatcctcagacgaagcttcaggcgactcattcactgatactgaagacgcttccgagctcaacgacgagatcctgaagtctgcagggatcaatgatcttggcttcgaccaggacgaggaggcggctgtgcacgaggaactcaaagagttcctaggcagtatttatagagcgaaagcgacagcgaatactcctgaatggaacgaattgaactcccttccacttccaacccagataagaagcgcaagcgcgaagacggagaccgataacgacaatgacgagaacaattcggatacccagggatctggggaggtcgcgggctcccgtctttctcagcgcatcaagcggtcctacgagcgcagcaccgggctgaaagaagtcgccagcgctacttcaggcgaaaatggctcaaatactgacactggtaccgcgactggcaccgataccgacactgcggaagccgatgacgtccctgacgtcgcattccctgagacagaagaagagggtgctgcatctcgaaacccagattcaagttaccctcaagatcctgccgaagaggaagatgaactcgagcgcgagatgctggcggctttcgaggaaggagggtatgactccaacgccgaaaaggccattggcgaggataaaggctgaccgccggcttgggtgtttggcactggtgctactgtttgtacattttgtgacgctttacagccagatcgacatatggttgtgttcagagttgattgggcgatcgtttaagaatcgcatagcgaggcgttggttgatggcttcgacttccgattcgaggcactttttcttctagcttttgtttattatatcttatcaaattgtgatacatatagctggaacttggcgagtgagtggctactcatctctgtactgctgactaggtgggctctgtacttgaacgaggtgagatcggaaataggtatggatttgatatattgagttaaatttggttttgttctctgattgaattttacgtaagggaaaatgataccttgaatcacctgttgattatccggaccgacctgaatgctcaggctccgaagctaactatgtagaaataacgctttaagagtacgccagatatgcatcgtcaaacatgaaagtaagatagcaagcagaaacgatcgagtagaatggtcaggaggtatcctatatcctcatacatgattcacatcacatcataagtccaccgaatattgcggcagtggttgaaatcgaaaagcagtccaatgtgctctctgctgggagaggtaggaggagccgagtcatggttagctcaaatcaagctcgaaatagttcgtccatcatggatggtggacatcgcgatgcaccttccaggccataacaatcatccacaaaaagaacaccgtattgatcagctcgaacgcgaacgccgctcgccagcagttgccagtattcacagtcagccttgtttagtgactccaatccatcaacagggacatcacatacaaatattgctttgcgcaatccaagccattgtgtcccggccatcccctccaactctattatcatatacaaagataagacaattatggttgatgtatgcgacaacgccgtacatctggnacttggtctt

SEQ ID NO: 2218 - DNA, 3074 bp, Emericella nidulans
cgactgcccagcaaaagccagcaagccgattccaaactcaatcctagcaccacaaggttccgatggatcgaactccagcctgtcatatcacgatcacgtcttcgttgatgtcttctttgccacgcccataaccttgctatcctgaatttgtggacaggggcatacatatgacggcaaagccagtgctcagtcctcttccgaggtcgccatcgttaattccctccaacaatgccgcgatgtttgccccctggtcagattcgatgcacggcagccgcgcggaggataaatgagacgaaatgacgacgggaagacccctgtctgtttagcctcaatagggtgatgataatgacagaggtggtggttgtggtggttgtggtggttgtggtggaggggtagcataaacgtgcttgcaggctgcaaaagaactggcgacccgcaatcacatgctggctgccagcagcaccaacaccagctctgcgcatacgataataagatgcgcaccctgatctcgtaagatatcaatcactgttgtcaatggcagcagctattagctatttatcacccgaaaaccctcttttttgactttattcgatctgtcctcacctgtggttcatctcttgcctaccttctaccggatccgtcctcccaccaccagactcactcttaggtagcttctttccttccccctcccattacctgaggttctgtctctactcaccagttccgttcagggagcgccatttctcgacccctcctcaaacgcctctacaatccttatatcgcacggctgctggctttgctgagaaacttatgcctcattttgaaaacggcgcaatgggtgaaaatgcggtcaacggcgagcgggctcagtcccaattcttggaggtaattttcgtcggcaaccaagtcctattgacatgctgtgcaacatacacttacacgctggctgcgtagcacttgacctcctacccggttgtctcagactcaatctccttctacaaaggcaacaaatacggcgccaagtcattggagtttgctgaccaaggctacggctttgccaaaccctacctctcatacctgtcgaagccatacggatacgttgcgccatacgtcactcgtgcagattctcttggtgataagggcttgcagaaggtcgacgcaaccttccctatcatcaaggaagacactaagacgctcaaaaacacaatctacgataccgcttactttccactacgactatttggggatgctaagagccatgtcttcagtacctatggcgacgaatataagaagtgcggcggtgatggagtcgttgcgagcggcaaggctattatcaccaccagcctcgtcctctctcaggaatcgctggcatttatcagctccttgctgcagaaaaagaaggcccaggtcaaggacttagtaaacgagcaggcgcaggagtaaaacatataccattcgtcttgtttgtgtttgctaataattgggtcgggagttgtgttttagactttagtgtctagcgttcatcattctctgttattttttatcgggcttgacgcattcattgtcttatcccgttttcttttgttgcagggtgcggttggatatgcattacagctcactccattcttataccttctctgtccgcactcggtttgagagtcagtgtatgtcacctttcttcggtgcttattaagtagcaactccctagttcgagtgaagattctcctctcgcaatcgaaaagctacactccttctttttgaaaaaaaaaatgtcaaaagcttgaccctaaactatagcctatagggctgacatgtgataatcgtaagtgcatgtgatttcttgattgggataaattgacccactcttatcgtcgcgtcaaacgcgtccacaccccacgccagatatatgtctcatagctttatgaaaacactgtactgataactacgcggtcagaatgcctctcattcgcaagcggccagcggtgcgttatccctattcactacttcggcatgactgattgtgcgaccaggttgctgaaccacaatccagcgacggagagtccgcttcctcagaatcgactactcagttaaggaaccaccagcagcgccgcatccgcgcgtccccagtcgagagcgaagatggcagcggtgacgactcgccttctcatgcccccagcagcacagacgtaatggtaaagaaactagtgcggctggcactttcaagcgaatactcacgccagccgattcgaagagtcgatatcagcaataaagtacttggggaacagggatcgaggcaattcaagactgtctttgagggagcgcaaaaggctttagcagaaacgttcggaatgcagttagctgagttgccgcaaaaggagaaggttactattcaacagcggaggggtgagcatatccgtttccagaacttgctgggcatgctactatagaatactgacacgctgcaatagccgcccagaaagttgaaaggccattgtctagtaataagtcttggatccttacgagtatactgccatcaaagtatcggaaacaggatattctatgcccaacacgcggaccagcagagagctcttacacgggactgtatacgtttataattgccgtaatactactaaacggaggcacactccaagagcagaaacttgatcggtacctctcccgtatgaacgccgaacaattcacacctgtcgaacgcacagatcatttactccaacggctctgcaaagaaggctacttagtcaagaaccgggagatggacggtggagatgaaatcattgagtatatggttgggccgcggggaaaggttgaagtcggtgcgagaggcgtagctgggcccctgagggaagtcaacggtccccaggctatgattgaagatgacgatatcactcccgccgagagggagaggttagaggaattcgagattcggttggcaaatagtcttgggtttaggtaacccaatagccggccagtgcatggtgagcacaccggggatgatgaaagagtcggtgagagcagcccgacccaaccgcggcggcggagagccgctgctaggaaga

SEQ ID NO: 2219 - DNA, 866 bp, Emericella nidulans
cctacctgcgtcgactggctcagcaatactaactcgcagacccaatggaccgcctacaaaggggatatcaaagacaaggtcattgtcatggccagactcgaagaagaatcagtggattgggtccatgaggaactcccagagtatgtgcctaactttccctctcgctataaccaacctttatactaacacactcgcagctggcaacgagcaatatacacagttaatccttcaaagactactcaagccgatgacaagcgtttcaagacaccagtcaacaaaggccacgagtctatggcctaccttacctacctaatagactactacgaccacctcccgtccacaatcgccttcattcattcccaccgctctggcttcctgacagcctggcacgttgatgcaccattacacgacaacgtcgccgctcttcggtctttacggctcgactttgtccagcgcaacggctacgtcaacctccgctgcaatctcaacccaggctgcggcgaaacacatgggaaacaccgtaatccacacgtcacggaagctgtctggatagagatctttgagggaactagcactccacctgtaaattcaagcgaagcgatcggccgccccagcacacccagcggatggggaagcaattctatacatgtgcaaacggaatcgagatcccttccaataccaacccaggtcgccgcagcatgttgcgcgcagttcgccgtctcacgggatcaagtccttcagcgtcctcgcgaagactatatcaagattcgacagtgggtgattgacaccgttagaagcgacgcctcgagcggtcgagtgatggagtactatggcatgttattttcggtaaacagtcggtatagtac

SEQ ID NO: 2220 - DNA, 2065 bp, Emericella nidulans
catccttgcgctgatgagcatctcgaccctctatccaataatcacacgaccgaggcacgttactgttgcaatcaattgtgacccgccaatatcgccgatgaagtcgaaccgggggcccaagctgtgctgttcgtcagtcgacaatcaacattatttccgtcattgattattattaaggatcttcccacgcggctcgtttggcgcggtgcgggatcgcttgctccagctccacggaagtcggaactgggatgctgatggctaagcctgaaaattggatgctgaccgtcactgatgagcccatatataaaccaataacaagtcctccgcgtcaatcatgatgccatgatattcgcgggtgaaacctggaagtggacagagctgaggggatccccagggattgacatgttgctacacgtgacgtggggtctcgcaagcgcgccaataaatagttaggaatagcaccgctctggtgtgtttcagattcagccaggcccacttttgcgtcgccagtttgaactagcgcgcgcaactcttgtttcaagatttcatcggcgttgctcgtggcctcacaccgcagcgttcgtccacttttgcccccacgattcggggattcggcgacaacaatagctgagcctagagcccgcagcttccagcagcagcctatactcatgtttggaatagaccgccggcacagcctgcgagtgtgcgtttcatctcgcatgctcggcaagcagtgataggaaaatgtcgcaataataatgcctccactgtctcgtagaaacaatctgtggatcattagaaaatccagcagttccatatgacttaggccctcctcgactctttgtcttctttcttatcatactgctgctgtttctcttcattctcagctgaaagctgaacagctgcattgtctctactctctctccagcgcacgctgccgatcgagatagaccccagggtcttggaactgaacagagccgcgcacaagcatctggcaacaggaaccgttcctgtaacagagcgggtcagacgcttcagaggctgggttcgagctcgattacgattattatgactgccgcctgccaacaacactgaacaaacggaatcgacttcatgaaaattggactgaagaagcagtcggctctgtcatttccttctcgaaggcttcctgaacattcggggatcggactgtttgatcctgcacggctgagagagtttggtgctggtattgcgatcgctggtcctcgtggtattggcagacgaaatcctgcggatctcgtattactgccctggtattgatccaacaatcgtgttcctgctgtctccgataccgaaatccaaggccttctcattccagagaagtagaaagaactgttgcccaggtatgtcatcttcaagcttgtttttttttttttggtgttgtctctctgcaatcttggttacggtacatgcacatgtccttctcgtccccgttacacgtcagggagatgcgccagaacgggcccattggacttttctgcaacagcgtctggtaatattctctgaatccagacgcccagtctcgagaatacaggtcctcctggcccgcaatctggtggcatttccgatccagcttctgtatagttcccagttcccagttcctacttcttgccacttcttcccactgctcatgcttcctcccactcccaacccatgatcatgagaaggccaatggactccagtctccaactgcttgtccccgtcccaaacatgacgacgggcccatgctagcggtgttgggaagagctggcctctgatttgcgtgcatttagcgcccatctgcattccagcctctccctcgcactgacctgggcggctaaatatagctctcgctgtgtcctattggcctctcgcattaggatgaaccagagctggctgcttgtccccaccgcgttcgctgcgggcattggctgccctttaaggaacgcgggcgagcagctctgcccatcctttcccttcccgtttgctgcgacacttgactctggaggttcattgcctctgtatcggtattacgagtcaggtttcg

SEQ ID NO: 2221 - DNA, 2025 bp, Emericella nidulans
aaaaaatacaaattaaaaacaaaataattgcaaaggggggctcctaaaatcggaccaaagaggacaattatccgaaggagaattgaacaaaaggctagacaagaataattctttgagccagccacgatggaaaaagacttccggggggaacgctccaaatggattaaacgactccttgaatgggaaggccagatctttcccaattacggagcatacggggatcacgaccaatcaaccttggcggcttgcactggagcgccacttccaaaaggtccttgttttctgcaaactgaaacggtctatccgcgctggtcgtggtggcctactgcatggtaagcttaatatgtcgctgatccaggcgatgaacttcattcactctcaacggttctgtattgatatggagaatggcttaaggccgatgttgctggcattcgaggggcttttaaaggcaaagcgggacgtcgaaaaggcgaacaaggctgctggggcgaattttcttttgaccacgccggctatgacactctctaagaagcgaagcttcgcagaccacgaggaggacgatacgatggaggatgacagcatggacctggagaggaagcctacggcgccgtttcaggatcgctgggcataatagcattgtaagctaagtatcttctcgcttgggaggtgctgtcaaccctgggcgatattctacgacctttcagttctttgtatttattaagttttactaccaccagatgatgaataagtttctcggataggtaaccggaattgttagctaaacttctctatcaagatctgagtaagtggcagtagcattgagagtgtcagtggtgttctagtagtaccaagacaagcagccaggccgtcgtccagatagtcatttttaaattcgatacatactgtataacactacggttaagttcctactattatgattgctctttgtcagtggacaagaactcctgttctgtacgccattcctttttgcttgcagcctttagcccaaatcgttcacttaaccctcaatcaggacatcaacacttccagatacctatctctacctcacaacccacacgcccattcatcatcatcacgatcatcaacatcacaaacacattcatttgccatcgtcgtccctaaattctttttttctcctttcattatcttacctaattttcctttagcctcctgcaagcaagcaggaagcgcaaccgagcgagcctcagcacaatgcacatgaaccttcgaaagaatatccgccttccgcagcacttcaacccagaccatttttatggccccatgtcgcaacgatctttgcgcggagacgacaaaaagaggccagcgtacactgactataatccgaacttaccccctgccgcattcccgacgttagagaggccgaggggagcaagatacggtcaggatatacatcagagggacaacgacgaagacagactgaacaaagccagtcgaagaaacagtaggaggagttttgatgacttatgtgcatcagtaaatcctaatggcaaaagggaaccatcgccgactgctcatgtgacggaaataccgctggaccagcttgacaattacgtggcgagcaatggagagctcaaccctatctgggtgagcaatatggctcggatggctgctgctggaaaggatgctgatgtcgatatggacatggaagatactgacttggaagggacggtgactggggagtgtcgggtaagtcagactctcgttgccctcactggcctcaagcttggggaatttggcagaacttttgagacttcactgtgtcgaaagtcgtgtctcaggcctcacagcagtcccacgataagcggcgcagtttctatgcagtggtattctgaacttgtctctttgctaacactattgttccactattgtcagtctatctcgccagggccacaaaacccgacctgggctgacctctcaccacgaatgcgagccgagatttttcaaaatcttgttagaacgccgacagctaccccgccgtgtgtc

SEQ ID NO: 2222 - DNA, 3267 bp, Emericella nidulans
tccaagtcgctcgggtagcattttccttctcatcgagcttcttcacgtcctcttcttcctcgccatcgtctcgcctccttgaccaaactcgttgactcgagtatagtctaccttatacttgtagctttgatagagccagatgaagaaaattacatcatcacgcagggttgcaagtctgtggagccaaggcatctttacagtaaacgcgaagagatcatcgataaacgtgttgaggaacttgtaagtcatagcctttccaggcatatgagcgacagactagagtatgcttgttagcagaaggtcaagtgacgattgcgacggtacgaaccttgagtcggtagttaatgtacaagctgggaaccatcatcagaaaaccgtaggcataaacactgccgacgagggtctcgatgatataagagtaccatgacttgtgcgtgttgtacatcaagctgtaagcagcgtacgctccgaggagaggcacagcaatgatatacaggtagcggaacgcaatctcatcatactcctgggtcttcttctccgtttctgtgagtttatgcttgtcttcaaacacaaccacataaggaaggaaagagaagaaggatccaactggaggtgggcgcagacggacattaaccgtcttcgtcaccttccaagcttccaatacaataccgaagccttgactggcgagaatcatccaggaagtgttctcactgttgtccatgagatagaggaaaatgactgtttgcatgaacacattggcgaggatggtgcggactgacgtcccgacattgtctttcttcttgcgccaatgagactgcagtaaggagcacaatcagcttcagtaactaaaacccttgggaagacgaggacgacttacaatgtcatttttgaatgctagagtttcaaaaatcatgtgcagaattgtgactacaccagttgtacccaacaaccagatgttggtatccaggagcacttctttgatcatctcaaactcgctaccatcgccaccaccaggggtagatcctccgaatgcggcttgcttggcagtttgtttggcgttctcgtcgaggctcgccatcattgcgaatttccagttctggaggttttggagtgtaaaccgtagagggatagtttcaaccgtcgagttgagctccaccatatggcttctcaactgccagaaagtgttcaggaagacaataggatagtaccaaccattctgacccgaagcatctctcgcgccagtcgcctctagctgtgtgtggcgacgaatggcaggatggatttgacggtatttcatgttcccagaatcaggaatcacggatagtgtgaagttcgggtggtaatatgatgcaattgaaacatcgggggtcccatcgtcttcctcctcatctgtttcatcggcacccgcgagtaggttcttgagcttcttagcctttctcttagggaggtactgattgagaggtcgtaagaagtgcacagctgtatctgtgctgtagccctttgccgcaggatcaagctcgtgcccactcaatgccacgaaaaagtgagcccagagggtcccgttatgctggacctctttgggaacctgaatggtggtctccacctctctaacatcgctgtagtttcctagaccgaatttcttctcttccagtacaagagaactcgagggaagagatgagatcgaaggaagcacaatcgacggagaaacgtaaacgctgatatccaaggcactgtccgagggccagatcggagcaatagtatcgggaacagagctgtagttctcgacttcggcttgcggaggtcgctccccaaaactagtcacagcaccgggttttccaccggccgtagcattctgcttgtttccaaagaattgaccgatgaagaattgggtcacaaagaaaatagtgacaccctggattagtgatctgacaatggactggagataaaacgtcagaacaatgagtttgacaagtagacgggaccgtacgcacgccttgctctccctcttctctctgttgccgctgctcaggcattttgaaacctggttctttgcaatagacggcggggctggaaaggaaaggaaaagaaaaaggccacggatggcgcgaagatagatgatggaatcgcctccaagccttgactaagggcggactagccccggccaacgcggtccagaagtccggcagttctaggctagatctgaatgccatccgcattcattcgaatacaaataccctcccacgcaatagagctctcgctgctcgattattgggcgtgtcctcttgcgcgatggatatgctggccccgtgaatgccatcctcgccctcatgacagagaacaatccctcccctgactactcccgcccgcagttccctccccataatgagtcgcgcgtatgggtgatcaccgcgggagattcgcctattggtatttcggttgcgcgtcagatccttgcgcatggggacagtgctctcgtcggtatcacatcctcggatctcgaccgcgatgcgtgccgtcgggatatgttcgaggacttccaggcggaagttgaagctcaccgcgacgagggatgggctgagcgattcaaggctgttcaattagacataaggtgcgcattcgatctaatatggcacctctgtgaaagagcccactaggctgagactcgcggcgcaggattattggagagtgtcaggcagtggttgccgaagcggttgcgacattcggcaggatagacattttgctttgctgcaccagtcaaggtaggactcagtgtcaagcttctactctgtttagtatagagccctgaccatctatagcactcgttggaacggtagaggagcttgctgccctccaacaaaccctgaactttgtccgcaatcaagttgaggtcattactttgggcccgtcaatattttcaggcatcgttactcacattgaggtttaaggtcgggcatgctgaatgtcttcgaaaacatatggttccataaccagcttttactttgtcctaaatccccacctcctatgccccctggttgaagccttgcgggagggcccaagggtttgcataggcttatattaaattttttgacgcgtactccttttccagccttatagacgtctacaaaaacctttagagatggaccttaaaccaacacgggcggttgctctccactaacatttttgattcccccccccccacaggggattaggctctaaaaaaaaaacgtattatgttccatcttccccttcccccttcccctttgattc

SEQ ID NO: 2223 - DNA, 1458 bp, Emericella nidulans
ttccatgtccagtattgtgagaagttgatcgagcgctttgcagagccgcctcgccactcttttctggcaagctgcctaaccagccagatatatacttccggctgatgatagcaaccaggaaatccctgccaataatactcacttcttgccatctcgaacgaaatgcccgaatcgcggacgcggccgtgaataagtgagaccgaagagagccaacgacgcaactcctaaccccattgttctggtttcaatgatcgtagttcatattatgccttcaggtcatgaaagcttcctgtcaaggtttttcgctcagttcgcctatgcacttgggatttcttcacctcgtattcgtttcataacgatataagctcggtttttctgaacgaaggagctgtagaccttatgatcagggattgtattcctaagataaagttattctcgatcatcttgacccaagagttgtctagctcatctcttaggcagtatatgaatacaccagccgcagcgccgtagaacttcgtcgcggtcttcaaagcgagaagtgtcaggaagcagttgcaaatgcgctgtcaattgttattttcctgtgctttcataattattcgccaccccattttcaggcaggacttgagttaatatctaattccacggtgcctaatcattttgggagtatattgtaagccccagccgggctgaaatgatattaggttgcacaatttcctcaagttgaaatattatcctgcttagtaattatgaatatggtttgtgctgctacaggcaaaaagccagcttagggttcggctagacccgaacaggataagcgaagcgcccacaaccaaccgagcgccgcccatctgaactggattgtgtgcgagtgaaatttcgactctcaacgacgacgacaaccgacgacccatccctctcacctcgcccttcaactcccgtacaccttcacttcgaggtcacaagtcgccaaaatgggtggtgtcaccgttcgcgatgtggacgtaagttgtcactttacctgtccttctgcacctgcacctttacctggcaacggattggcatctggcatcaagagagggaaaggaagcagtcgatcgaaacgagaacacggacgatgggaacatggaaatgttggaggggacatttttgatgcaacaaacgcgtggaatcttggtggccgattttacggtgacgggcttcaattgtcgatacgattgaccggtgactacgatgcgaatgcgaacagatactgaatatcgatatggattaaaatacgcacagaatcaatcgttgccagggggaaggtttacaaagcagagggctaatttttttggcggtcgaatgtgtgctgatttcgttacaggcgcaaaagttcattgtggcttacgccgctttcttgaagcgtcagggaaagctcccatccctggttcgtcatctacctacgccatctgagta

SEQ ID NO: 2224 - DNA, 2671 bp, Emericella nidulans
atcccactccgagtttcctcactatttcacgggaagtggttgagatccaattactgcaatctggcttcaacgaagtatacgcaaaaatacgcaaaatacatacgcggacttacgttgtcattggattctgccggtggatacaaagcaatgtaaaggcggtatcgagagcatgtacgccttatcgctcacatgaccaacgcgaagtccaatccgattcggtcagtccgtgggcacctcattcgtagtactagtacgcgttcagctgtatgtcttgcagggtccagatctttcgattggaactctgagctggccagaaatgtctgccggtttttctgactttgacgctggtcatagggatctagtgactgtgacgaagttcaactactatggcaaccgcatagttaccgcttcgtcggaccatcgcatgaaggtctgggaccagaaagatggcgaatggcagttaactgacacttggcgcgcccatgatgcagagatacgtgatgtaaggttccccccttccttggtaaattgtacgtatttaacgatccgttaccgcaggcaacctggaatgggcctttcactggccagcatattgggagtgtgggggaggacatgaagctgaaaatatggcaggaagatgtcactcagccgccgaactctggccgccgtttcagatcaatcttccgcttgatggcgccacaacggcatccatatgtctcgcttgatttccgcaacattgaccttgaatcatggctggccgtcataacgcgcgacggcttcctgagagtcatggaacctgtcagcccagactcactcgctgactggcagactgtcgacgaattcagggtctgcgccgcgccccagcgcggggaagagacgagcttcaaagtgcagtttcatcacgaccctatagatatcacccactccattttaccctcctgggaccggaaaagcctgtctcttgtagttgcggctatggacagtgtgaagatcttccggactgatgccaaccgtcgcttctaccacgctgtagaattaaaagggcatggagggttggttagggatatatcctgggcaaatggctcagttcgcggctatgatctcatcgccagcggatgcaaggacggctttgttcgaattttcgaggtgtatacctccctatcgtccaacaatgcgcgagataccgatcgcaaccacccccaatcgtccgcacaatctcagtcgtcccgcaccacagcgcagtcagggataggctcagctctggccaatcgtgcgcctctgtccatggccagccggcccgcaacgggtgattcgccgttcaagcattcttacaaggaagtagcttgcatcgatagcaagcatctcgatgtatggcaggtcgggttctcctacgccggttagttccttcgattcactctattatttattggtttcgctaatgaccatgcaggtgattgcctcatttcttctggagatgacggggtggtcagattttggaaaaaagctctatccggggaatggctcgaatatgcagagacggagatgactgatagtgagacaaaatgaggacatgtcaactcttcctcatgttcatgccgcagcatcgcgaactctggtcttggagctactggaggttaattctggtaattggcgacacagttgtctacatttgccttttttgagggcacggtgttctttccccttcaccttatttctcgttgcttttttaagacagtgatacccatcatcaggctttatttcttgtacttgaatcctcctccttgcttttgtcgtggaatcgtgcccaaagtttgacagatgcccttcaaggtgtaaatcccgctccttccctttgacgaacgtcgacatcatcaaactgtgctcttacccaattgacaaacaaccgaggcgcccgaaaggcaggcaccacgcagcgcggatcatggggcgaaggcactctaatcctgaacccttcctctgcttctagtgttgacttcctacctacttgtcacctcccctcatgtgtctatgactttacccctgcctattattcgtcgctattcttatcgaaaactatgacggtgggcccaactttgggaaccggcctcttcgtcggaaccggccaggcgctcgcggccggcggccctgcctcgctcattatcacctatgtattcatatccgcaatgacatactgtgtgacgactgccgttgctgaaatttcaactcactcaattactcggaatggcgcgatgctcgctcataattaccattatacctcgaatcatgtggggttcgcgatagcctatcttagatggattggtctcagcttgcttgttccttttgaagtcaccgtgggatggtccaccttgggctatgggaaccgagcgcgagcctcgcattgcgctgggcggcttgatgtccgtcatattcttcttcaatatgctgccgaacagttctcagaaggcgcaaacgttcttacggggaataaatcctgccacatcggcttgcacatctcttttacctgtatccggccagcaccggcccgtgggaggtttgagattggctaccccgtcattgtgagtctatttcgggaccggggcttctgcttttgtctgatcctgagacgattttggttttgcgggtaccggcaggtgcaaacatgatgggccga

SEQ ID NO: 2225 - DNA, 3743 bp, Emericella nidulans
tcttgggcgggaattctatgccctcccgctcgaagaaaagctcaagtatcattccgcgagtaacctggaaaaaggcgagtataacagctatcgtccggccggacatcgcatgtaagcacacacttccgtaggaaagactgagagttgctcacatgacaggctcggcaactgcgtcaaagacaacaaaggtctacaacatccccaagttcgacggtcatcatgctcgcaagcatccacccattctcgaggcccgcattaaggaattgaaccttcagccgcaaatgccatacggaagtcgtcgagaaactcctccggctctttgccattctgcttgaattgcccgacgacgaccagctggtgagagaccatcagtatgatgttgaaggggaagaccacctccgctatatgcactacgccgcgcgtggtgcagaggagaacaagcgtgctgcggagatttactccagaccatacagatttgggatccgtgacgttgctcttcaggcagcctgttgcggcgccgcaaatccttaacaatgacgggcagtgaaaatggttaagccgcaagatggaaccataaccatcaacacctgcgatgcgcttacagcgttgacgggcggtttgatcaagtcgagcattcatcgggtgcgtacgccgcctgctgaccaggcgggtatcgatcggctgggtgtgttgtactttgcacgcccaaacaaccatgttgtactcgatccgatatccaacagccctgtgctgcagagacttggactgacatcccgtgttcacggagcttggcaaggatttgacgatgaaggagtgggttaaagtgcgtcggacgcagcaacagaggcggagacaggaggcgaagatttcggaggatggcaagtacacgtacaagccgaaggacttagaaatcattccgggattgttggccaaggtctataactaggcttcatccctgaatgtagtaaatctgaaatagctgggtgtacactagctcaccagaaagctgattggattatgatggcaccaccaaaatatccagaaatatattctcaaatccgccactatgaagaaaaattgacgctatatcctcccgtcttcgggtcctgaacgaatttgaagttgtctgtcgacagcccaaacggcttaagaataccatttcccagctacggtggttagcaagtcaaaatatccagacagtaataggacagtcacttacttcttttaactttcccatcatctcccccatctcaacctccttcgctttacttatccttgccggaagctcccgcaacgccttttggacgaccttcctatcacttggtggaagattctccatcccagcaagaagcttgtaatcctcctccgcaccctgcaaattcgcccacccacccaactcactcttggccctcgcccgccgcatcagagccttcgcccgaatgcgcgcgacatcccgtttccgctcgtcgttttccttgatcctctgtagtgccgcttgctcgttgacctcgtcatcaacggggatttccaccacggaatccgcctccttcgccgcaccttccttaccatcctcgggctgcgaaggcgggacaacccgatccaggccctcaatacaagcatttgcgctgtcgacagcagccttccaatctcctaacttcaagtagcaagcggacatattacttcgtacaacagcgatctcgtagtctaagtagctggggcaggaggccagggcccggtcgtaggtggatatggcttgggagtagaaggcgccgaagtaaaggttgtttgcttcggcctttaggctgtgcgattcggcgagaagacgctgacagactaatgtgttagtttatatgatgtagacaatgaattggagtagggggatagcgtactgtttcttcttccggtgggaaccgagcatcgtgaaagacttcgtcttcgttttctgtgtcgcttccggcatggttggttaggtctctaccatttgatgccgaagatgtgtctggcggcatggttgttattgttctttgcaccttttgacggacgaagttaaagggtgcggagagtgattgcggggagttaactgtcgccgtcagatgagaaatggcgtggcgcctgataactgaggcagtaaggtaccttatcgataagctatctattccgaccagtatcccaccattgaggggaaagcctttcgttggagtcaactcagctccacccctccttagatctgccacttgtttttggactcgagactttcaagaaattctaaacaatgcctggcgttaatcctgagtaagtgatctatacctcaaacttaacagtccccactaacaatgccagcctccccccagtacgggcgtgtctctttgacatggacggccttctcatcgactccgaagacctctacaccgacatcaccaatcaggtgctgcactcgttcggcaaaccttcgcttccgtggtccatcaaggctcaattgcagggtcgtcctcagccagaagtacgctgtaaccttctcaccaacctacaacaccttatctgccccgctccctcagaagctcaagaaacagggtctaatttgactgaattctcaggctgccagaatcttctccgattgggcgcaactccctatcagtcacgaggaatatgtttcacggatctcagcgctacaagcagaactcttcccgacgaccaagccgctgcccggcgtagagacattgctcaagaatctcgtgtctacgcagaagggccctaacccggtgcacattgccctggcaacatccagccacacacggaactaccacctcaagacgagccatttgcaggatctcttctccctcttccctgagtcccagcgtgtgctaggcgatgacccccgcatcggcaagggtagaggaaagccactaccggacatctacctccttgccctagaaacaattaacgccgggcttcgagagaagggtgagaaggagatcacgccggaggagtgtcttgttttcgaggatgcggtgcctggtgttgaagctggccggcgcgcgggtatgagggttgtttgggtcccacatccgggattgttggaggcgtataagggacgtgaggaagaggtgcttgctggactgacaggggagcataaagaagaggaaaagagtgaggctgagaacgaagcgaccgagttggccgaagagaggttgaaggctaacagtgctggaacgcctggaaaaccggaagatggacactcgggattgttggctacactggagaacttcccatatgaacgctaccatatttacgatgcagacgcttgcacgctcaaatttctacaacctaagttcatcactcaaggcatctaccccaatgagttttacttaaacctgccattgcatatttccccagagaccattcaccatcctttgcacacataatgcactttcctacctcgctaacatcattatcgacgtaaattttttaacccttcatcaaaccacacccccttatctcttatgccgtttccaagcctaatttcttttaaccggggttttctttacacaggttaaacctccaattgcttgttgttcaatgcgaacccttactatttaaaaaattctacccttctacttcctctcgttggtctcagaaattagcgaaacctctttcaccttttatttatttttatattcggtcgctctgtctttttccttccacaccactcctatcttacaccatatctttacctcttactttat

SEQ ID NO: 2226 - DNA, 2419 bp, Emericella nidulans
cgctcctgagtaatgacgtttcccaccgaggtcaaggagtgctggtggcgagaagatgcttcacgatggttcatgaagctacgcaacgtggaaacggatgagatctcctaccatgaatgccagatactcttcggcgcgacgggagtcttagttgaacctcgcgcctgcgatatcccgggcgcgtcaacattcaagggctctctcttccacaccgcgagatggaaccacgatgttagtctggacggaaagaaggtcgtagtcattggtaatggatgtatgtcctcgatcacaccatctctttaaaaaatttgctgacaaaccaggtactgctgcccaggttgtaccagctatcatggatcgcagcggctcagtgacgcaaatcatccgcagcaagcactgggtggttgaaacggtcaatgtgcaatacacccctactatgttatgggcctttcggaacatccctggcctccaggcactccatcgtttcgctatataccaaggcgctgaggctgactggcagctcttccctatgacgaagtcggctgctaaataccgccagacgcgacgcaaagagattgaggcctatatgcgaagggccgcgccggccaaataccatgaccttctcatcccagactttgaagtcggctgcaaggtatacctcttcttcctctaatgtgactgtctactgtgaacctgctaatgttatcagcgtcggatcttcgattgcggttacctcgactccttgcacaatgataagtatctcctcacggacgccaagatcctcgaaatcaccccggaaggtatacaaacctcgaacggactcattgaggcagacgtgatcgtccttgcgaccggattcaatacgaacactttcctcccgggtatgcaagttcatggtcgagatggcataaccgttgacgaacactggagccgccagggcggtccaggggcatacaatacctgcgcgatgaacggcttcccgaacttcttcgtcctactgggaccaaatacagtaacgggccatacgtcggctgttatggctgctgagaagtatgcactaaacgtccacctgatatggtatttgttaactcggggctatagctcggtaaattacgcacttcgcgtcctaaaaccggtcttagatggcgccgcatcagccgttgaagtcaaagctgatgcggaacatgcttatgtcgagagcgtccagactgcgctacggaatacagtttggaacgctggctgtcactcggtatgttgcctcccagctgtctgataccactaacctcggtgtagtggtacgtcaacgagaaaggctggaacgcgatggcctatccctggacgcagccccatttctggtatagaagtttgtttccggtttggaaggattggaatatcaaggtagttcccagatcgtcgagttgggcttcaaaccagactaacactgctggacagtgggcacagaaaccagccactcaggcttggagacggctgcttctagccgtattactcgtcgtgagccttggtgtatttaatcgtgctgccacttcccgcaacgtttcatggtggacagggatagttactggactacggaagagagttaccgcgtaggtgtattggattgtcctgtagctttattatcaggtaagcatttacctgactagttttatactctagctaacaccttcaggatacgggtgtttagtaccacaaattcatcttattggttgtcttaagattccatagtgtcccaaacatagctctggatatgggcggaacggcgataaggaaaatagcaagccctcggttttattagctgttttgagtcccgagctagatgcaggtatctccgtctaagtgagacgtagggccaacccggacttaagcggcagctcccggatttaacaactccctaaccttcctggactacgattacagcaacatgaacttcacttcctctctcatgctatgcgcagctgagatggtcgtgtggacaacacaatcgtggatcgctcccttggcacgcggccgaacagagggtgccgtcatggcttaactccgctgaatatatctgatatatttatataatggaagctccccacgagtccagatcacgcaaacatacttttctgaaacatactttgctgcgtctattgcccttacaaccatggccctagttgcccctacagtcgttggcaagattgtcggccctagtggcttgggtctcatgggtacgtccactctctgaacatcccatcttcaactaacctgcttgcaggattcactcgcccttgggcgcccgtcgagtattcgttggcgacaagagtcctgaaaaccgccctggatcagggcgcgacattctggaacggagtgagtaaaccgtcctaacccgcaaacctacattacaactactaaccaacca

SEQ ID NO: 2227 - DNA, 1533 bp, Emericella nidulans
actacaggcgcaaagtcggtcaatatagtccaccatacttagaaggatcggcggcgaaagagtagcgtgggttgttagtcgttgcaggtaatcatgtacagatatacgagggggagtgcgtgagtggaaacgagtcagccggccctgattcaggggtattttatcgttgtagcggataagctccatcaacatgctggaaatgaggacaaccagatccctgggatcggcgaactcataacgaaccgggagatacttgacagcagggttcgccgggcgcagtcttttcgattgggatccttcaagactcagactgcccggtccagcgggctcaacaccgcgagtagaatcgctctggctgttacgcttgttggaccccgccgtagtagtcggtgccggcattggggggggctgggtgttctgaggagcagcaaaagccggaggaaccgtgggggcagggccgggaacggaggacgtattagcggtagactggttggatgtctcggggagggcggcgttagaactgggaccagcagcgaaagatgctgctgcggacgcggaagtactaattccgcccccaagggaggtctgcccagcggacatacgaccgcaagcaggatcccctgagggcctgctgggtggagacgaaacggaatgcctcttcagagctgagcggagctcttcaacggccacacgcgaggaacggggagtgaaaggactaccgggcacaacagagcgatcagcggcagagtcatactgctgggcttgataggcgagtgcagccgacgtcgatgacaggcggcgcgtaaacgaggtcgaacatggagagtgaggaggatgaagttgggtggcggcgggtgaggagggagcagggcgaagggcggagggcgaaggcgaagaaactaacatctccgcccagcagattcaccacgtgggcgcacgactgaacgaggttcttcgagactggcggacgctgtgaaacccaagaccggtactattgcgcttagtgtcgtgcacagacacattctgtaaacccctactcgaaaaagtgaaaagagtagaagaaatgataacgatcctgacgatggatctaagaaaagaggatgtggaaagccaaaggacaaagacaaagtgaagtcagtccacgctggagaccactaatggactgaataaaagtatgagtacagtaagatacggtaatggtcttgtccaattcctcattaggccaatgaagcttatttatcaccagataacggagatcggtacagatatattacatgtctgatacgagactgacgcccggtcagggaagcccgtcatattgaggacgatgcgctatattcgacgaattaacgtccggcaatgtcgggactcaactccatttgtgtcgcaaccaaggaacccggcacagaattggcaccctaccccaggacgcttccgactggccgagctgtcagctggtatagaacgataagatcaaaatctttcgcgcctgatggtcagaccttcgaccttgaggtgtcagtataacgagtc

SEQ ID NO: 2228 - DNA, 471 bp, Emericella nidulans
gatggggtggacaagagaagacagcgagcaggacggggaggtgtttgaggccgccgctcattgacaagaaaacgggctgtacggagtacctcaacagttaatccgaacggaattggactgagaatgagaaccgcgaacacacagtggtaacttcctgtggctgaacaaacgctgattggcgatttagtgctgtggcggtgtcatcgccaatcagacggtatacttaccgagtaatctgtacgggaccaccaaggagaactacctggacttttgccagggagtcatcttcctagaaatttgtcagacatgagagtacctttgggtacaaggtgactttggctggttagcattctgatattgaatacccttgaaagaggacacggcaggctacgaagacagtggctcaggagtatctccattccagtcaaagggccttcttgattcccatggtggcccaaacatgcggaaaat

SEQ ID NO: 2229 - DNA, 1446 bp, Emericella nidulans
attgctgtgacagcgtccaagcaggcagccagccctcggcacaatcgctgtaagcaaaggctgacagcggcccatcatctttccccgctcgctgtgccgccaccacggtcggctttcctctcatcaccactgaagagcctagcctcccgtcggccggggtcaacaccgtacctgactcgaataatcccagacatctcccggagatccgtagcccaggccgggtagttaccatccctggatctcgctggtatatgctggacagcgaagtcgggttcgtaaggtcggaataagcagtgctaggcacagcgctgatgatctcggaaatgatcgagctgggcatttcggggatgtccgggatgtcctttgtgctggcagagtcggagtcggagtcggagtccgaggaagagctggagccgctgatgccagtcgctacggggatgtcgcttgagtcttgcgattcaatccattcgtcgagcgtggggacatcgcctgagacaccagtaggtactgggaggtcactggggcttttatgttagcagcggctagttcttgaagggaggtaagcgacatacgtagtcgactccagtgcatccatggagtcaacaagccagtcctggcccagggccatcgaagaaagggcaaggaaggtaaggtatttggcgtgcatattgacagatctgacaagaagcgaggtagaaagagcgtaaaaaaaaacaaggagcggaacgtcaaaaatgtacagtgtaaaatgagatggaattgatattgattagaataaaaatgccaaccgttgctgaagttatgttcaaaaagtctgccacccagagcgctacaggcccttcatatagggttcacattgaacatcgcaataagacacttcgtgtctgacagcaaaagaaagtttgaaccaagttctgaacgaccgctttagaggcgctgcagccgtctcgaaacgtccttctctcgtattcagtcttgtccaccttacccaaccgggaggatttgcaaccgcatctcgtattcagatggacgatcgctgttgcaacccttaagtaaatatggcatatggagccatccgaacaggaggagatttttgtattcaagagcgtctgaattgtccccttggcggctcgtatcaacatcggctcgtcggcaaagtgctggtgcctctgcctgctactatggtgcctgtgccttgggtctggcaggcctttcgactcagaactgagtcagaactgaaaatggcacccacagctagtggatacgagcccctgcgtcggcaatgcatttgtgaggctctcctgaaagcatccacagtctgggtggacacactccatcaactccatcagcaatgaatgcgtttcctgctcacacgacactgatacaaaaagaaggaatacgaggcatcggtaaaatgtaagcattctcagccagatgatgagtcca

SEQ ID NO: 2230 - DNA, 2445 bp, Emericella nidulans
acgccgtcgtgtcagcaggcgtctcaaccacaagaggcggttgctttctctgactcttggcagacttggaagaaggcgcgcggtatggttgaatagcatggtccagtgcacttgtattgagcggaaggtctggaatcgcagacggcagcaagctggctggaagtttgacaggacgctgatcgatgcggataggctctgtctgaatgccagttgttcgagtttcggtgactgccctcaagtcggcctggcaggaaacactcttagtttggggaggaaggactacgcttccccgcggagaagaaggttcggatacggggggctgaattgtgatcattggaatctcaatgtttgccggcttgagcttctgcacagggttactttcagcttcaatcttggcaggaatatccgtttgcacagaagctggaaccatagcagcgtggtcgacagctgggagctccaaaggcgcagcgactcttggagtccaaggaggggttggaagactctcaacagtttgagaggaggccgaaaccatgtcgatggtcaaagtcgatgtactgctctcctttgttcgatatagcgaaacatcgttttccacattcgcttcaattgacttatcagccattagaggtagattgggcgatgcagggggggagtattggacaccgctgtcttgatattcagtaggcggagtccggtcaattgaagggctcttgagcactggagatgcctcagctttcacggcaaagctgtccagtttctcatcaagcgaaacgccaaggatttttcgtgccttgctactcatggtatgagacatttgcgaatgaaccgagatggggcgctcttcaggaagcgcctcgggggattgaggtatatcatcatcattatcatcatcaaggtcgaactcatcttcttcgtcaaatgctagctcgtctgcaaggtttgtctgtgaacctagcataccggcagcgctcataaccgaataacgtccctcaccaagtccatgatgttcatcactcccagcactactcaaactcgtgatgctggtccggcggcgtccttggctgctcgagtacatgctaacggagtcactgtccttgccggtggacgcctctttccctgcgtcttgtgcatcgtttatcgaaggctcgcgggagttggcagcctgggcggctgcaacttcgttcaagacagctttgagacgaccctcgaccacatggactttccgctccagattcctccgttcgccatcccaggcctccttttcccgagtccacagcttcgtagttctttccaattcttcatcgcggcttctagccttcttctgcgcctgttcaagtttcctgcggaattcagctaccccctcgagtgcgttgtccctctcttttgctagctcagtaagggccgaagagctaccaccttccagaagttgcagttgctgcttcagtgaccgagactctttcgagtgcttggccagccgctgagccaactcttcattctctatccgggactcgtcgaggctgttctccaagtggtcaatggcctttgtcttgctctcgacgtctcgtcggagggcgagaatttcagagacaagagaggcgtgcaaggtcggcgtgaatctccggggatccagcggcgatatgacgtcctcatcagcaatggaatcgagatcgctgcgtccttcgggagaggaaacgtgattggggagcgatacaggcgataccactggacctggagacgagtcaccccggacatgcatggaaggtggtcgttttggagttgtagaaggcgttgggaatgcgctcgctaatggcgggctttgatacatcgcttccgtggccatggcgtctgcagttagaccatcacagtgcaacaaggtctctgtcagagctgcaatcgtcggctctcatgcacacgcgcgagtagaccgtcgtgttagaaagcttccattgactatacctatgtagcttatccaggcaatcaagcagtaaacgaaggaggcagtcgagatttcaacggggctggccagcagcagtgattatcatcaaggccttgccgctgtttctattctggaagcatgagctagttagtttcgagttgaaacatgtggaaatcaaaagcgcatgcgagaccatctgggcggacgtagtcaatacgtacataccggactgtacaccgtctctaccaactccagagcccaggaggtttcgataatggcagctggagtccgcgcgttctcctttgtagtggaggtcgtgatcgcagatcgagtcacgaatagacaattcaagagaagacagggtaagacaaccgcataagattaaaatagatgggggagcaggaataggtagtatctgcaacaccctgtgtccctaacgttggctatcgtccaatccctcgcctttcgcaggaagaggggggggaaatgcgatgcacgaagtacggagt

SEQ ID NO: 2231 - DNA, 994 bp, Emericella nidulans
cggaccttttcccagactcgtaaccaggcatgcttcttgtttcttgaatccgcgccaattacacaaacatcatagagcagcgggagtagtgagtaacagagcccaatataccgatcgaccacaagttcacatccgtcccgaagtcgcagtcgcaaaaccggcatccgtcggtggatcagacactccactgtgtcgaggtataggagacaattcatctcaatgtccatctcagacagttgggacagcggtccgggtgggtcataccatggttttgcatgaaagagtatataccggcatatcgtgaatgcgccttggccgtacaccgatgctgccgcagccggtgacaccatttggtcataggtgaggatacttgttcccaacgccaacatcaaacggacctgtgccaaatctgttggagggtctagagcacgaagtttgcggatcgccatcgcgcagcggggacatgttctgtgcttgtgtttgtatttgaaggtgccccgatagaagggcaaattcgccagcgcaagccagaaacccttccaagaggttctccggggagatcaggaatcgagagtgcagagaatgacgcatcttgcttctaaaagaaggtccaatggtaaaatgggagatgaaggctgtagttgagaagaggaattggatcgttgtctcttcctcggagcggagagtgatcgagagacgaggatatggtagcggatggacgagcaatggcaatctacccgagtcatcgctatttggacgagttatgggtgatggtgaggttgaagttgtctgcggcttccgaccaggggggcggatcttgcggagtgtctggcacttgtggccgagtcgttcgcatcgacgacacgtggatgcttcccgattgcgcccgggctggcatttgaccttgattgtgtagcagcgatcgcaggagcgtctcttcatcgtgtgtgagtgttgtttggagtgtggggaagaggaattgcagacagcgtca

SEQ ID NO: 2232 - DNA, 1672 bp, Emericella nidulans
cctggaactgtggcgggcaccatccgcgccagtacattggtgaagcacttgtgaaccagcaccacgtttttctgactcgagggattacgagcggttgcggcctgatctttccgcggattggctttgttagagcaagtgaggggcagggttgtcagacggttagtgtggaacatactgctagaggtagtactctgctttacatggagagacagactgacgattgactagcaagcagcaggcagtgttactatctacgattttggacaaacgactgtaaaaggctgatgctgcgaggtctttagtttggagaagtcactgggccttagcatacacaaagcaatacacgcgagtgaggtgtctaggcggttatatgcgacaaagggaataggtcatggtatagccttaaaacagtaggaccagccttgggaagaaatcgaatcaaacaaaggaaaaggaacgtcggcatctcttcataccctgccagtgctaggaactggctcattaatattccttccacggtcggcttccattaccccagcacataccccgaacttgtattgggcggcacttgtagatgcctcagttgctgctgtagccttcggttcccatctacgagctccgccaaaaagtccacagtgcgcataagcacctcgcgcttcgtcgagcgcgaactgttctccagcccgggcaccatcttgtacaattcatcgtacatcctattctgatgtagacgccgattccgctcagcgatgatgtgcaagagccgtcttcgcttcttgcccgtgatcttctggagtccggctcggctcagttctgccagctcagggagttggtcttcttctttgcttgacggtagtattttcgttgcctctgtcactgcctcgggctccagctctagctccgtctctggctcagactcgggcttgagtgcgggcgtctgcgccgtcgttggcgtggcagcccgcgaatgcggtactgcatggattccatataagggagccggttccggctccatcttgacttctggcgaggagttcggggccggttggtagccgttcggaccgaaagagacgtcagaaccccacatgaggttggactcgggcactgtataacgattcgcagctaagatctttgcatcgtatggttgtttataggtgacgccatcgtcgacgtggattaggacgtcgctgatgacgccgttgacgaagccgtcgtattcgttgtgcacatatggtattgagctgaggaacggtgtctggggaaagtatggcgcgaatgggacggctttgagcctgttagcaatggctgaactggatagatgaaaagccgttgaacaaacctgggccgcatccgacgcttggtatcgcatagtgttgtggtggcggtggtgtatacggtgcgtctctgtagatgggggcttgttggaggggagaataaaatgaagaccggtagtctggctcgaatgcagaagccatggctatgggtaactctcacagcagcggactgtcgaactggaacagcgggaagggctgaaatataaactcgcggcgtacaggtggaggacttttgagatcgatagagcccagaaccacggggtaggctataacaagaggacaatgaacgttgaagctttaagcccgtactttagaacaggcgggcccctgcggtatat

SEQ ID NO: 2233 - DNA, 2506 bp, Emericella nidulans
aacgaccttgtgcccaggaagttcaccaccctctccaggcttagcaccttgggccattttgatctgcagtgcgtcggcgtctgcgaggtagtgggatgtgacaccgaagcggccagaagcaatctgcttgatggcagagcgcatggtatctccgttcgccatgcgcttgctgcgctctgggtcctcaccaccttcaccagtgttagactttccacctagacggttcatggcaacagccagggtagagtgagattccatcgaaatagatccgtacgacatggcaccagtcacgaatcggcgaacaatctctgtccatggttcaacctggtcgataggaatgggcgtccgctggtcaaagtcgaactcaagcataccacgcagagtgcagtttttaatctgctcgtgggcagccttagcgtatgcctcgtaggacttgtcgttcttcgtgcgcacagcatcctggatattggcaatgctgacgggatcgttgatatgatcttcaccaccgtcacgccagtggtactcacccgactcattaagaccagggatatcgacgatggcacgagatgggtaaccacgctcgtggatggcgaacgcatcctgcgcgatcagctcaaaattcataccgcggatacggcttgcagtgccagtgaaacagcggtcaatgacactgtcatcaataccaagagcctcaaaaatctgagcacccttgtaagatgctagagtagagatacccatcttgctcatgactttcaggataccaccgtcgcaggaggccttgtagttctcgatcaccttctcgtcggagagttcttgcggatcaacttttctcggttcatcttgaggatgcactccatggcgaggtaagggttaataccatcggcaccataaccaacgagaacacacatgtggtggacctcacgggcctccgcagtctcgacaatcagtgcagcaagagatctccacttgttacgaaccaagtggtggtgaacaaggccagtggccaaaagtgcggacactgggactctgtccgcagaagtggcacgatcggaaaggataaggatcttgtcgccttgttgaatagcttcagtggcggcatcgcaaatacggtcgagagcttcgatgtacccagggacgcccttcttcttctcgaaagtgatatcgatgagcctgactgtccagtccttgtggactgtgttgatattcttgagggcattgaactcgggaatgctcaggataggagaaggaagaagcaggcggcggcactgcgatgggtccatttccagcagattaccctgaggaccaacgtagcactccagagacatgacgacggcttcacggattggatcaataggggggttggtgacctgagcgaaaagttgacggaagtactcgtacagaaggcggggctgtttggcgatgcaggcaagaggagcatcgttacccatagaaccaagagcctccttggagtcagctcccatggggccgaggaggagagtgacctgctcaaatgagtacccgaaggccttgaggcgagggtcattctgaacagtggtgttgtcgaggtcgtgacggagatccatattctgctcaaccagcttctcggtaatagcaggaagcttaacgagctccttattcagccaactactgaagtcatggcggtgggcaactgtgtatttaagctcagagtcatcaataatacgaccagcgaccgtgtcaaccagaagcatttttccaggctgcagacggcccttctgaacgactcgctcctggtcaatgtcgacagcacctacttcggacgcacagatgatacggtcgtcatcggtcacgtagaagcggcaaggacgcaaaccgttacggtccaggttggcgccacagtaacgtccatctgagaaagtgaagagagccgggccatcccagggctccatctggcaagcagcccactcgtaaaaggcggccttggccgggtccatagctgggttatcctgccacgcctcgggaatcatgatcataacggcttcaggaagagaaaggacgccgttgatcatcagcaattccaggacgttatcaaaggcagcagagtcggaaccgccgtcttcgacgatagggagcagagactcgagctcctcgccgaaaatgtcggacttcagcaaaccctcgcgagcacgcatccaatttttgtttcctcggagagtgttaatctcaccgttgtgagcagcccatcggagaggctgtgcacggtcccaagaggggaatgtgttggtagagaaacgagagtgaacgagagcaaagtgaccttcatagtcaacgttcaccaaatcgtggtagtactggtacacctggataggggcgagctgacccttgtacacaatgttgcggttgctgagagagcacaggtagaaccagttggcaaggcaatgatgtgcgtagccgctttcgcaggacatacaactgaagctcgaatgtctttgtgtcaaattgctctggatcagttatatcaggcttg

SEQ ID NO: 2234 - DNA, 2777 bp, Emericella nidulans
ctgacccggaatagtcagctttcgcgcatgtgagaatgaacatccagtaacatacttcttatccttcaagaacaactgtaagttaacctcgaagaccgttttgagtaagcccatgttagctccttggtatagaccaacttggtgctcccagatgttaacaatcagaacctcactagtcgcgagcgcaaagagagcgctcttgcgctcgaagtcctggtcttcaccccgctcgcgtccatcggtaccctccacatccatcaccaagatgttatcggccatcgacttgccgtctccgtttttattctttgatagccaaatacccttggtggtctgacgtcgttccgtttcggccatgacggagaagtgggtaccgaagaggtggttgagaagggtagacttccctgtcgattgagatccaaagaccgagataagatggtagttgaaacctgcaggggtgacattttcgaaggttagatacttggtcaggttcgtactatagtatgactgttagctcccatcgccatacaaagcgaatgccgtcgacgtcacatcaagccgcattgcgcacaaacatgtttgcatgtcagaaagaacggaaggcatacttgaattctttattctcgtcgattacttggacaccatgctcatatgtcgtcttatcgctgctgtcgctgccaatgggggcaaaatggccattggtcgccatggtgtgagaacgccgtcggagagttatccagattcccaggaacagttcctaaggcaaggtattgtcgttctagaatctaagagagctccaacaagcggaagagtatcgctgggagtgacgagtatgcgaaaacggtcgtgatgttaaggagagacttaggaagcttaacgcagggccgatcggctgtaaggagaccgaaagttcatgtgcaaagaagtaagaaaaggtcactggaagtgtcaatcacaagactggcagccacacagaacgcacctggaggatctcgtggtgcgcccgaagttgattgtaaggccaggttggtcgcttgcaagtggatggtggatcgtgattccccagcctccaaggagtccaggcgcactgtgcaggtggcaggaagtaggagcgttctggagcgtcattgaagcctgattttcaaggccacaatttatcatgccattctagtattagcgtattccctcctcccacctccaaaggtagaggatggagtatggcataaggagacggacagcaaggcccgtatctgccctgtagaatgatagaatagggcaacatgatgtggaaagatatgtggtaacaagactcactgatcatccaattcatattcaaacatggctagaaacaggagaggagagccgaataaaagattctacatattgaataaaatacaagtatatgaatataacactaaacgccggagcgacccctttcccaatgtaatgtactgaatccattcacggcatcctgcactgcaagtcgttattaccgagagatccagccggatacttttcaagaagtacaacgcagtcgtttactcctcaatgacgcgcgtgatcagaccggtagcaacggtacggccaccctcacggatgttgaagcgctgaccagcctcggcggcgacagggcggttaaggttcaaaatcatttcgacgttgtcacccggcatgacacgacggcttaggtcgccatcggggaaggtgagatcacaagcctcgtctaaacattggttagaacgacgatgatgcccgaagatggcattcaaattgttcgagaaagacttaccggcagtgcggatgtaggcctgggggcggtagttggaaccgaatccgctgcggcggccaccctcagcctcggtcaggacatacatggagaccaagaacttcttgtgggccttgatagagccaggagcagcgatgaccataccgcgcttgacatcctcacggcgtgtaccacggagaaggagaccggagttgtcaccggcacgggactcgtcacaggacttcttgaaagtctcgatgtcggtgaccttggtcttctggacttcaccgccaccgtggatctcaatttcgctatccttcttgagaagaccacgctcgacacggccggaggcgacggtaccacgtccaggaatggagaagacttcctcgacggacatcaggaagggcttatccaagtcacgctggggagtagggatccaagtgtcaacagcctccagaagtttgtcaatttgctcagtaccaatttcgggacggcggtcctcgagagcgcacaaggcggagccgaagatgataggggtctcttcaccctcgaagccgtaagtgttaagaagctcacgcatctccagctcaacgagctccaacatctcagggtcatcgacggcatcgaccttgttgacgaaaacaacaatcttctggacaccgacttggcgggcaagcagcaagtgctcacgagtctggggcctgttgcaagggctgtgtcagctgtctgctacttcatctcaactcgtgcatttgggttgacgtacatctgtccatcggaagcggcaacaacaacgatagcaccgtccatgttggcggcaccagtaatcatgtttttaatgtaatcggcgtgaccgggacagtcgacgtgagcgtagtgcctgttgtcggtcgagaactcgatgtgggcggtagagatggtaataccacgcttacgctcctcaggagccttgtcaatagcaccatactcaaggaattgggcaagcccttggaggccggtgctggtatggcacggc

SEQ ID NO: 2235 - DNA, 1549 bp, Emericella nidulans
aatacgcctaacggatctaaacccctaaggcttcattcgaaacaaagtgcgatcctccagcgcatcgatacccagttgcctgcttgatccactgaaaccctgcaacacacctgcccatatgccgcagcttctgctggagctgctgctctttgcgtctagcctgttcttctgcctcacgtatcttgcgtagtatttctagttcggcgcgtctcttcagctcttcgagacgtcttcgttcatgctgtttcttggcctcgccgtcgggctcggaagcttctactggcggatccggtagctcagcgacagcattttcagctgcacgttcttcacgaagaagcttctggtactgcttctctgctgcctcggcggctttcttgtcctgctgcaattggtgccacacatcgtctgcgacgccgtcatctcgagggacaacatccgaacaattttcggagcgcagagcggtgggatcttcctctttcttttcttcgtgaagcgtgggcggatttgaaactgtagtcaacactggtggcgccgttgtacttccaaaagactgcgcttgtaggaggtcggcgactggatttctcagcgcggactgcttcgcttctcggtttgttcgttcagatatcatatggtcaacgtggcggagaataagctcctcggtcacggacacgttcttgttctgcatcttctggatagcgactcggaagattgtctttgcgagcgtctgaatatcacgagcattggcccagttcgcggtacggatgagtgactggaatctattcaacaacttcttttggaacaacgaacttggagagtccagtgcatccagatcgaaactgttgactttgggtaagaagtcggcctttcgcctctggagtaacttggtgagaagctggaggcaatcggccggagcgagtccattgaattcgagttcctctggaaaacgactagtgaggccagggttgatggtcataaggcgattgatatcattgtcgtaccccgccagaataatgataagcttttggaagaacttgggcttagtgatgcagtccaccatttcgtccatagcctcctttgcaaattgcccttctgcgagtcggtacgcttcatcaataagaaggaccttcccaagcgacttttccagcagttcttgcgtcttgggtccagtgtgaccgatatattgccctattagatcggttgccgagctttcgataacctccgcagatgacagcagacccatatcatagtacactttgcccatcttcctggccgtgctcgttttgccagagcctgacctcattagtaactgtatttcgaaggctcctgctgacttacctgggggaccgcggaaaaggaagttgaaagggacgtgctccttagggtccatatccaattctcgcatattcttgactgactggcgatattcttcaagcttactgatgattgactcacacccaacaatgtccccaacagcatcgggatattcgtctccgaacgaacgccacgatcatattcaggatccaaatcttgcggttcaggtgttccagcg

SEQ ID NO: 2236 - DNA, 3004 bp, Emericella nidulans
taactagcaactctcccatccagttctcttcaaaccttgttgacggtctccaatccaacaccgaagtacgtcgtcctacattacaatatctctagaagcctcactctgtgattgaagctcagatgaagtcgctaaccgcccaacagaccgactccgcccgcgccaaatccctcgaactagaaattcagaaccgcgttgctaaagaactcgagcgtctccgcgcgcgcgaacaacaaactcttgccgagattgagaagcgactgtccgaagccaaggacaccggcagcttcgcctccgctcccagcgcaccagccgtaacgcactatcccgccggctcactagacctcgacgcaccccggatccccttcgccggccgcgagtacgctcctccccctcctgctgctgtcgaagtggccgctgtgaataaggagctcaaccgagagtctgtgaactcagaaattgaagagttgcgcgttaagctcgaagggaggaagaagctggcggagttggatgagggtgttgcaaaggctcaaaaagacgtcgttagctgtttgcgcttgaatgatcggcggccgctggattgctggaaggaggtagctgagtttaagaaggaagttgcgcggcttgaggagggatttgtggatcggattgtgggttgaattggtatgatctggcgcattcgatatgatgttgtgtgagagcgctgtgagaccaagagcagcaggcgcgctttcgaaaatagatgtgctgtttatttatacttgtattcctactattcacttggggttatatgcatcttctttacgtctaatctgcacaagcatctctacggcagcgaagctgaggctctccttgatagccagctcaaaatgcacttgcatagctacctaaatctacgggtatcataccagtaatgtacattatcactcttctagctctctctctcagcttttgaggccgatatactcaaacaagctcccaggaagctaaacgtccgacactctcacccgcattcctcacaatacacatattcctctctcgattcgtccccttcgtgcctttcgttgtataccgcactttggacactaaaattgagccaatgcccgtacccttcccctcagcgaggttaaagtttcccgtcgtgatgaatccgatgagatcctcttcaactgggaccggcaagtgttctttgtggattgaggaataatcagaatcaagcaggatggatgctgcaaggcgctgtctggtagatccagtgtcttcctctgacttagctttatttttggggcgcaaagtctgcccagaggtcttaaatgatgagctcttcgacgttgatgttaatgccgatactaacgaaagccacttctggcgaaggtctgggtcattcgaggggagacgataaatacgtgcacgtggtgcaggatggccacgggaatagagggtgagtttgactgttgcgagagcggactcgtccacactgaccgcagggttattgatagcaaaattcgcctcggaatatggcagttgatggattctaaatggtggttcaatagccgtcttgtcctccttgcacacggtcttatctgtttccgagccttcctctttctccgcgttagagttcttctccttctgatctttcgcagactcgttatcacaatgcttaacaagtctttcccagtcacaagcccagccgcgcccaatttcacccttctgaccattgaacaaatcgagagagtcaaattcgactcgacggcccttaggccgtccttcccactccttttttgctgcctcgcgttctcgtagacaccatttccagcctgcatgggtgcctgggaaatcgccagggaaccaaggctctccagtttcgaagaagagttgttgctgttccttaagtccgccaaaccgcggattgccgccgcttgatagtggatagtacatgagggagtaccatatggatggtacgcacttccaagggagaagcacggtccatgtgcctgagaaattgttgttcttttgccgagtactaggtctcactgcttgcacgatcacagggatttgagggtcagaaggctggggacgcgggtactcgcccgggcctgcttctgtccgtcgtcggttaatagctttttggctgggaaggttgcggatagctgctaatcggaaacggcggtcgaatagggcgggggaggtttgggtttcatcggcaggccatgtggacagtaacatggccaattcttgcattctccggtcagagaacgaagctttcatttttttgggagggaagtgaagacggggatctgatatagagaatgaaagaagagcattctgcggcagcgacgaagggttcgtgactcccagaagagcattccatacgccctctggactatccgctggaggctcaccctggcccaatggtcgtaggactgcaagtagcgcttcagttgaaccggggccggtgacgtcgatgctgccaatctcaaagcgaaggtcttcaaccatgaccggcgggcactgcttctttgatatagccagcagctcgttccaaagccgcaagaacgcagatggatggactctgacaaacatcttcgctgtattcttccgcttctgctcgtccttgttggtatcgccatcagcatcgaccatctccgtgtcttcgatgactttacgagcgcatcgaatgagagtaacaggagcaataggccttcgctgaccctcggactcaaaactccacgcgcgaagacttcttacaccagctctccatttctttcctttggcaccccaagcatcgtctcccacgactcctacagttctgagtacagtctccaaggccgcctctgtcccttgaagctgaattgtggaaatatagctcatgtcccatgccaccgcacccctagcaccactcgcccgatgtgtaggtctataactcttctccgtcggcgacagtggcagcgcaaacctccacaacggatcgttcgaggctgtcataagggcacgttaataaatg

SEQ ID NO: 2237 - DNA, 4636 bp, Emericella nidulans
gctccggagttgtcgccgcgagtccctccttcggcgccgccgcagcatccagcctaaactcgcttgcttccggagccggcgtgatggttatctctggcttatcaagcgcaaccattgtaacaggcgggatataccagtcgttatcgcaaacactccaccctgggtcaatatctcttacttcctcaggaatcatcagccaaggcatatagtcgtcccgaatcatggtacaggtattgccgtccggaatcgggcattgctggccaccgcggtactgcggccatgggatcaatgactgagtatagtttccaatttcatgtggcatgaactcagcaaaattgaaaggatacgcggttcctataattgggtatttcgcgttccggtggttgcgcatcgacgtaagagtggaggggtgcagggaaacgatggtgttgctgtggtccacgccgcattggcttcccggatgagcgcggcggttgctccaagcgtagatagacgtgaacgacaggtaaacagtgggtgagatgaaagtctctccgttcacaatggcggtgctgggacccgaggcagggacggtggttccgttctgcagacagagatcaccagctccggtagtgacgggccagtagaagagagttgctgttccaggaagaaagtggcagttggagcaagggttttcttctggatacgtgcgagcgggtgttggacagtcaaatggtgggatcggactgttggtgtcaccgggtgtgggcgtgactacggaatcccgccaggaactggaaatgctcgagtatgtctgccagattgaaacacagtcagtcgtctccagagtgcagtctggagtgaccgacggttcacggtagaaggtctcagtgtaagtgttagttatgtaactactggcgcatggaccagtgccgggatagtacgctgtcactatttccctgggtcccaatgcacgaggcgcgccatcgcagagggtggtaagaggaccagaatgggtattcgaccacgcctcgggtgaaactgaagttcgacaggctccttcgctcgtcatatacgacactaatgaagggcttgtggccgtgggccctaaagaccgcagctcggtagaccgccgcgcatactcaacccaagcggcattgcaggtcacggcggatgcgctaggtccggttgtgggaccatagaagtaatccgtggacgttggccaaaagattgaagtgttgagtgtgatgagccattgatcgctggtgatggctagccaaataagtaagttacatgctctcaatccactccagcgaaaaggacttaccatcttgggcaatagccgtcccgatccagagggcaaggagcaacattgtttgtaagatgagggacggcagttcagagtagcaagcatggctgattataactgtttgcggtctgctagcggctgtgggcacgtcgaattcctgaggcacctcattggttgagccctacagagttgaccttacacagtactcttgcagttgcactgcaccagcttactatggtgggtgttctggagaggctatactgcatgacatcgcgagctcgatgtcttctgagagggcaggtttgactgttccttcggcctagatgcacggttctcccgtctttggctgcatggtgtctggcgtgatgcccgggtccctgaatcgcagctgctaatccttcggtgcagatgcatggtcctcgatgggtctgaatttctgaagacagataagatccactggggacagatcttccgtcgacgctattccagggtaggaggggtcggcagagggccagaccctaagtgccttgctcatattaacgattgcaagcagacgcgacgctactcacttacagtagcaagagtaatacggagttcggaagaatctctccgttggaggtcatcttataagaaattgagcgtgcgtcgagcaatctctgcaaccgcgacagactgcagggtctgattgacccagaagggctcgaatatggttcaacgtgtttctagagtgcgtcatgatggtatggggctctcgcacaaatcaatctcgatcgaatagggtggagcgatcaatttcgatctgagaagagtgggatgaagaatggatggttgggaagcgctgttcgtccgctagtgcgaattgtcgcagaaagtccaattgctgattaggacccacgcgacagcaaggcgcccactcgccgggttgctttcccctaattcgtccagccaggtatagaaggctttgttaatcaaggttccagatcctgaggagctggtggctgcggaataggagtcttgacagaaaaatgtgaagaacaaaaaggagaagttgtattgctcacgggtatagtagcatgaaattaagccgaccttatctaaacatgatatcgctagaaatgcacattattattaaaagcagcaagaacttcaacctccgtctaagtctgcactgtgaaatgagatcatttccgttttaaaagaaacaaagaaaaagaaaaaagaaaagaaaagaaaagagaaaaaccgttcaaggcaaaaccttgggctctgcagcaatcgtccgctctgaggaggcgtccccagaactcttcttttccatcctgctgtagtcgcctggtttggtagacccgttaggaatatggaaccgtttgtcaatccggctaaaggtcaacaagctcaagatcatgatttcaagtgcaaaattgaagacataaaatgatgccttggagtgataccaagccgggttggagatcggccgcgccggactccagagtgtacccgccttgaaaccagcaatcaaaatggacaggcacgttgagatggtgatgataatgatcttagcgagcatactgccctgtccaaatgactcctcttgcttggaccgtggtatcaagaccgcgggaataatatggagcaatgggaggcaagtgaagacgagaaggtaggtgattgcagcaagctgcacatcgcggcagtcggcgcgcgtgcccggattgagggagtaggaagaaaccacgatcgccgtaatgaccatgatcaacgcagcggggatgagatagtaaaacaacttgctgccgatacgtgcgatcggatgccaaccgatatggggttgcttcgcccggaggatgcgctgggcgaggatcagattgataatatagaccagcaagacaccggcattgacaaagacattggccgcaatggcaagtcgaacgttatgttggcggttggcccaaactatgcgcagaacaagagtcgtgatacgtgccatacagaaaccaaacagcatgcccgataggatgaacttgtgtttccgcttgttgtttctctgcagaatcgtcatattcatcactgcaaacccaatatatatggcgaggagtacggcgcagacgattgtatccgggttattgctcgggaggcctcccatgcctgccgttggggaggcgtaagggccgccgcgcttctcgaacgaggaaggcatcttctcgtattatcccgtcttgataggttttggtagacggctccgatgaggtggcaaaagatggtgttgaaaatgtcgctagtcgcgagaatcgcttgcaccgactagcagaggaatatatgtgtcatggaggaaagtgctaaatgcgtgaacgggggcattgaggaacgtccgtctttataaattcgacggcatggaagaaattgaggcctgatggcagcgacattcgcggcttccaacaaggaaaccttctgtcataaggctaattattgcgcacacaagatctggagagtccgatccactggagaacggcagtaacacggctgacctttatttggctgactatacagatcggacaaagacgccgtcggacttatgccagggccgagtccgcggtcgccagttcgtccgtcctccgccgcctctcccctccaattccatctctcttcttgaaactccagccactcattccccttgttacctatcgagatcttatctccatatcttgctgaatctattttagctcccacgctgttgattcctgcattgtgtaacggcgtccgtttcggacgaatgccggattccccacgtggccggaatgcttgcaccgcatagtccagccgcaggtggcattcggaaagggaccaagagctgcaccgaatgtacgtgcttcgcgaccaggtagcagtggctgtctacttattaactgatgtcgaatctaggtaggagaagaaaagtccgctgcgttcgtatccctgaagacgcgccaacatgtcgtcagtgcgcagaacgcaacaccgcttgtctcgctcagacgtccagttcccgtccacgacaagcgaatcgattgccctcccgataccggattgcacagctagagtctcaggttagtcggttgaccaaagccgtcaacagtattgaggtcaagcttggaggcaacccgtcgatccagctcgatcagacggtgacccactcccccggatccgacgagtcggacgcagagtccactgcatccgagattttaattgcggaggagccttcacatctgcgctcgcttttccagaatgactggcatactgaaaacaccaaccgccgtgacgagcagctgcgaggacgtagagtaaaagcgtacgcgcacctccctagagagt

SEQ ID NO: 2238 - DNA, 1469 bp, Emericella nidulans
atcttcgagtcggcgatgggtcttggatcttgggcgatttcattcaagctttgcgtttgtcaagtcctgagaatgtttctgcttgtgcgacggcgagaattgctgagacataccagcacgctgtgctccagctgttatctctttcatgagctctgctgtctgatttgctttcgggttgctggagtggtatataaagtggattgttcactttctgaggtatataatatccaagcaggagcgactactagagaaagactactctcggtcaacttgagcaggctttttgaaagagctactgcgacggggactaggatgtgcgaaatattctagatctgctcctatattaccgcaatgtggacatccgccaaagaaaagtagagagaccaatctggcgattgcagtgaaacaacagtacttgaaaacctccagtcagcagtatcaccggaaatacagcacgccaaccacctcgaaattggctcgttggcctctgggggcacaggagagaccctgagaaactggctggcttgggtctcttgtcctggggtggtatcgggcatccacagtaacctgcatcttgttaacgccagagatgccacccctgccagtcgcagtgacaatgtatgggaactataatagcgtattgaccagagcatttccagtgtcatcatcaacagacagtcttccaccaatacctaggctacacagtccctggacagcctctcgcggagttgagcagcacatttgtcgttccagatgccggctagcgcagatacgtgctggagatgtgctgcgaagtgatcggtatgtggagggattctaaattctgtctactgatagactagaagtaatacgcgcacgggttatgcttgtacctagagtccttcttctcttcgctctttcggctttcacagcggcatccaaacagccttggacccaaaggcatgatgtgtagacgttgaagatggttccctacaaatctggaatcgatagccagcctgctgcgcagggaaccacggtaaatgctgtccaagtgcgtttacagtaggtgtcgttgagcatggcatcaaatttttgtgcgtattaacggtcaaacccggccagtttaagaaaagtcgtgagctatctcatgtaaagtttgcgtagcatggattttcagcctctggaaggcaacagcttggtgagccttagcgactccaaggagaacaatgccccgaatgtccggggaagtggatgaggcttaagagtccgcccggggactatacatcgccccgttctacaggcgtactccatagacttgattatatcgagcgagtattctcgagcgtgtattcttcaaagtctccagcccacaggagagctcgcacgccgggtctccaacactacggaaggtcaagcttggaagcattttgaagccatgaaaggctggcgcattcatatttcggggtgctctcaatatatgatttagttta

SEQ ID NO: 2239 - DNA, 1623 bp, Emericella nidulans
ctatgcttttctttccaatctgaaccgtggccgcgcaggggtagcgcacgcagggctacaactatcttgccacagtttacgtaggaagcagacttgttgggccagttgtagggtgaagcatgtaaaatgttggcataggttgttccgatggcgatgttggtgccgattgtgaggccgtttaagcataaggcccagaatacgttggggaaaaacagcagttcaaacgtttgctgtgcccaacaggacgattagccgctacccatggatggcaattcgaagtgaggttaaaatggcttacccttaagacgtcccaaacaagtccccaatccggcttcccaacccaaagccgcatatcggacttccatgttctggcagcgtaccgctcaaagtcaagaggtggacgctcggtgcatactacctccacgcctactttggcatctccatcttcgtccgaattaccttcctggaacgacgcaattgacctttcatacttggtttccgggaggaagaagaaggccagcactagctgcgctccagccagcgccgcaccaagaccgtaccaccactgcggcgtgattgcgttggcgatctcccccgcaaagaggacccaaacagctgttaggctaacctggatagcctgttggcccatcagagctttactgcgttcgtggaggaagaagatttcctgggtgatcatcggaaccagggcctcactctgccctgctgccaatccgactgcacatcgggaccagaggtgccattcgtagttctcttgggccgcgcagaggattgctccaatcaccagaactattgtcgaggcgagcagcacgattcgccggccaatgccgatggcaagaggcatgccaatgaggttgccgatgcccctggccttatagtcaatatctgccgccaatttcaagctttggaagggtagtgtacataaagagagtagggtaagtcattaagtgcgtgatatcggggtagcccttgccaactgcctcatagcctggaatgtataagcccagaaggccgccgaagccgctgacgagggcgaggccgagtgtcgagactatccattgtcaacacagagatacgtaagagtcggtgtatggactgacaaatccatatcacaaccagaacgatccacttctgccagatagccatgttcagggggtctacgatgtgttttgtcagcacgcctggcctgagggcatgggaaaggagtgtaataccttggggatctgctgtcggcgtcggaatatacaccaccttaccgtccgtgagcttcaccgtccccatgaccttcttcttgccactaccgtcggtcgccgacacccttccgtcctcaatgtcttcgacataggtgatgtctgctttgtctacctccgtcattgtgagagtttcctcttcaggaaaaactgcagttgttgctggggggtataacacgttgtgctgggagctgtattcttagcaggtgctacggaagggtagggtatgccgtatatattgcagtgcctagaatgccaatgagtcccagcctaagccacagctatgctcacgtatgtttcacggagtattcgaattcgagttgggtttagttttaggggtcgggatggcacatgt

SEQ ID NO: 2240 - DNA, 1295 bp, Emericella nidulans
tcgactaccctgccgatgctgctgtatgtctaaccccccttccaagtttagcgtaccgaactgacggattcagggaaatgccgcacttggaggctccggcgggcctaagatggccagcctcgtcgaaacagccctcaagcagtgccctgacactaagattgtcctaggcggatactctcaaggtgctatggtcgttcacaacgccgcctccaagctctcttccggccaggtcgttggcgctgtgaccttcggcgaccccttcaagagccagaagcccgacaacatcgaccagttcaagactttctgcgcaagcggcgaccctgtttgcctgaacggcgctaatgtcatggctcacctttcttacggcaatgacgcccagactgcggcccagttccttgttagcgctgctggactgtaaagtgctagggctgagtgatattggatctccgtattagacctgtctagcaggcgttgttcttgttattgaatttataatgggcggtcatggatggaatcgatgattgtatgtttactagactgtgttatgacctctttggcaatcccttctgcgtgtacatagcacagaattaatctgatgcattgcactgtatccaacaaactttcccttccctttccttcaccccccttcaagtcctcatctacagctcaggccaataatacaccccttcctcaaccgcctgcacgagcgcctcatcgatagagatgtattggtcaaagtctgcatcaagctccttcagcaagattcccacaacgcccgcaaagaccacgcctccctcctcgttgagatgggtgttgtcgccctcgctcaggttatacgtatgcgaatcctcctccccaatctcattgacatactccctagaagcgacattcaaattggcccagagcgtccccgtctccgtcgcggcctcgatcgttaaattccgcacgttctccaaatcatccttgacgagcccatcgtctccgaaattgcgtcttgtcagggacgtcaagaagatcgggatcccaccggcaccgcgtacatctgcatcgaactggacaagattatccttgaatgcagcgagtccactctccgtcttctggtcgttgtgcccgaattggattgtcacatagggcgtgcacgacccgcttgcggtctcaacggcttccaggaccttagcccaaaatccctcattccggaaggagaacgttgttgcgccgggaatcgcccgaagtttggcctgttgagccaccggtctaagaggagacgaaagcttttgccccacctacaattgggg

SEQ ID NO: 2241 - DNA, 2455 bp, Emericella nidulans
agccgccatccccctcggagaagtcgatcaacgtatttcgcaatcatctcgccggtctttggattgtccgtaccgcccgtggcgtctgactttctgcccttgttcatgaagctttcgaaggactcccggagggcatggccgaggccctcgttgcgtcgaaacgattcattccagatgtcgtcgagttgctttttgaagctcagtaggcgtaccaccatgtccgcttcgctctcatcgaaaacaattccagtaccctcttccacgatatatgtgctaaaggcgcctttcaatttggctccaaggtccctccgttcaagaagcgtataaagttgccctagggcaatcttgttccctattcgcaacaaaccgagaacatccttctggctcaataagacgctctcttgatctgttactagggtttgatcgagtgactcagacagtttttgtttggtcgtccgattgaaagagaactgttcgcatcggttcatctcgcgctcgatcaggcgatggctgttctccacatatgacgccagatatcctgtcgcctcctgctgagcccatagagagagaacgtccttggaccccgacgcgagcacaggctcgaagccagagacataaacgtcaaggctgtgaaatagctcaatggcattccgtagcagagaagagtcagcgacgataccgttttcgtcgctgcgatctgccgaaacaagatcacaggctccctgaagtattttttcctgcagtgtgggatcagagtatatgtgctgtcggaattgctgtaggcccatttctcggattacaggatgttctttggagtggaggaggaaggattggtcaaggtagtagaagatccagcgcacggtaatctatacttagttagtaattccaaacaaaaaaagagaagtctaacgtaccaacattgactgccactctttccaggcctcaaccacagacctcagggtctcaatattgtatgccatttgtgccttgtcgaccaatgagccgtgcaattttccggtaacatgttgtcgacatcgctcttggagccgctttgccagaatagtagctcgtccttgacgacaaacattttctgcccctttgtaaagctcctcaagtgaaatctccggtttccctccgctgaagatcgctgacaatgccgcatccaactgaccccatactttatcgaaatacgaatcttgattcaaccggggccctgtgcggagattcttcaccacaagtcttctcgcgcctgtatgcggtgtaaagttgctctggtgcgacgaggtcccggggcgagcttggagagtggaattcgacaaagtcaaaccacctgtgttcggaccattcggtttcggctcagcggttgagaaactatacatatcgccggactcgggctggttcgctgcgatggaggaagaagatggtcgaactcgcttgttcgttggggggaggtgctcgtcgtcttgttcctgtgcttgattctgtgcttggttccggtggaggagctccgagatagtcgcctgctgatgtcgaggttgttgagagagttcaccttggtctggaaacttccttttgccagtagctttgcgcttaccgctcctctgttccgggggggatctcgagttctgctgcatctacccggttctatcccaggataggatgacgaagggaaacactcagagttggaaaaatccgaggacagttcggaccacgaggaccatcgccgctagcttccagttctgagatgtcttgatatatggtggtttgatgctatagggagctggtagttggacgaagaagctgggattgagggacctccgcaacgttcgatcccagtcggagataaagataataccgcgcttgatgacataagctgcattgcggagggtcaacctcggctggtaatacgttacttttctacttaatggacttggagtatagtcatttaagttcatagttatttatggaaaacccccactagaacgtataatatagcctgtcccaatatgcttgataccgtaaatacaccacagtcgttcaacgtcccatgcaccgtctttccatgcaaaacccgccctatgaaaacagcttcggcccaatgtgctgctcgacttcgctctcttcagcctgtcgcaaagttagatcttgaattggaacagtgagcacaatgacctacctctaagaagttggtagccgcaacaagggccgtgtatgacttcgcaatgctggtaagtgcgtcatggtggtcgggagcggcggatccgccgatcttagcaaagcgcttgaatatgcctaccatgctctgcctgttctccgtcaggaaggcccgggtttgctcaatcattaactcgttttgtagaccacgggagaatgttgccgtgacaataaaccgcagtacagaatcgagtagatcgtagtatttccggagggcagcggcgttacaaagtctgttgcg

SEQ ID NO: 2242 - DNA, 2828 bp, Emericella nidulans
tgacaattattttgcccacttgctggatcggcgcttcctgtctgatcccccccctgttcctcaatatccatgggctgtcgctttgagggaaccgctgaatgctaggcttgacgctaacaatttggaatctcgatttccgctttggggcggtaatcttgtggcggcctcattgatgatgctggacgtatgtagatgtagaggtacagtgacgatgtagataagtgggattctagggagcaagggaaccatcacatcactgcgaacctggagcctgcagctccgtgtcaatctgtagcagagagttgtggataaacgcagtgaccatggccaagtgggaagagagcgctcgagtgtcagttgggtcccctttccttgcatatccttggttgagttcagcttttccccatcgtcatcgtcgtgccttcgactacttgaaccgcacctcctgctgtatatttcttcctatattcctccacccatcaacgtcgacaactggcccccttccttcggcttggtttcctccaactgttcaactcttctctccttaccatcatcatctcccctcaccaactccaactatttcagattccgcttgcccctctcgtcgggtggtacaataacgcttgtcaataacgcttgttacagccgcgggccggcttctgctgtgcaataacacattccacatctaccaccttctgcttaccatctacaaccaccactcttcatctctcagccatccggcccaatcccactcgatcgaattgggtgctcggtctcgattcgcttagatccctttttctatgccaccggaccctgaccggaggcggagttctaatagaatggccattccttacgcaaccgggctgccggccgacaaccagcctttgccgtcatttcgcgaggtaagcgggcagtccctgtttgctagattgtggtttgccggttgtcagactagaccagacgaatctagcgggcgagcaggagcagggaagatgtagtaaagatgctgactgctttaaaagctcctcccaccacatcttcacgaagagatcgaatctacttcatattttaactctcaacataactctcggcaaccgcgcgagcgtccagcatcatcacacgaattgggtcttaactcggtcccaagagagcatgcttcatcgcggtcttcgcgtcccagtccggtgctcccaccaatccgcgatctgcagtcgtacccagaccgtgcgacgggcgtatatccagaccccaggggtctcccgccgccgccggaaatcaccgccaggcctgttggtccccacggatacccccatgcagcgccagccgtgcctggtccactggccgacaggaatgccgacgcctaccgcggcgtgccgccaatgcacggtcaggtgcgataccactatccatcgatggcgtatcagagcgacccggaccacgcttccgtaccgtcgctctcgcacgcgcctcagtcgaatttcggcattctaggggattccaccgacgcgaggaacagacgccgccgagggaaccttcctaaacccgtcactgagatcctcaaggcctggtttcatgcgcatctggatcacccttatccgagcgaggaggacaagcagatgctcatgtcccgaacaggtcttacaatcaaccaggtaagttatcttgatcgcctctaggaaaagaactcgactaacgtcctccagatcagcaattggttcattaatgcgagaagacgccaccttccagccctgcgtaatcaaagacgtactggcggaagcgacctggatgaacgacagtcgttgagcgatatggaacaaacgtcgcctgagccatcacctcatcgaagactatgatacacgaggcaacgtcgagttgaccgtataccacggccgaatagaccctagaaagcgccgcgaggtacaattacattacgatttacgtgcgagatcggatagacatgatgtctttttcttatcttttgtttcttgtttcttgttctccattaccccatttcttcattgctcaggtcagaccacttcatcgagtgatgcacgccttgataccctcgctatctcttttggttaagtttacacgcttgcatgacccgactttgaaccgttacgttcagcgatctgcctcacattcttgcctcatttatcgggaagatcatctacctctaataatcatcatgcatctgagggggtttggtgttttgcgttgctttattcctcatgtacagtacaagcatgatcatgaccgttatagaatcaagatattttttgagagatatcttctccagctgtagcggctcggccgagaccacagctcccgctgcttattcacatcatgatgacctgaggtgacccagccagtgcataaccagggttgacgtaccgcagatcaagcaagatgacccggttcctgtcattccgatgaccgaatttgggcagcatgcggagaaagctaccacggttcgcgcgagcaaaaaattgcggtgaaatgaagcaaggtacagtggcaatagcccgtcggtagttactctcggtagtcttcagtaccaagagctgtcacggatgtcaattgttgatccaggatccattgatcgaatctccaaaaaattggtcccagccacttgggtgacagctgaagaccatcgtcatgatcagccgattactaatcatcactcagctcgtgagtccgctcagggtcatccgataacggacgaatgccaaccacagagaactggcagactgagcgctcatgctacgaggttgtccacaaatgagtctggccacaaacagtacataatcctggttttgtccaacccg

SEQ ID NO: 2243 - DNA, 931 bp, Emericella nidulans
caatttcggacatggacgagatcgatatgaatgaacggctatgcaattgtacacgcagattgtcagctgctgcggagaagcccccagtcaaggtgccccctcagcggcagtggactacggaaaggtttatggagtcgagactttgatagacgcgatggcgagatggagtagaacagcctgaaagagttcgtatcgcggtatctccggtacatgtgttcttaccttcatcgaacgtataacttccagcgaatccctggcactggtggcgtattttgaggaagctgactgaacgcctgcgtctgactattgagacgcccctgggctgtcaggcgatgcgggccgaggccgttgtttctcgctgtttcaagacatctggttcacaaaaatatcctccttatgcacaaatgtcgcaaatggtggttcctaccaggacgggcgagattctgtcggtagacgaaatgaagaaaatgggtatggagttggagatagtgggtacgaagatactatgatctcaggatcttcgccagacgaaccctcgatcgaagcgggggctggattggcaggagcgcgggagcgcggaagcttgggacctggacagttccagagccagaaagcaggagctttagcgtatctcactatgcagcctttattggttcagctgaagtcgaggcccgccaatcgctgccgagacggcgcggcggttctggctaaaattgacaaactgcaggacgactgcaggcatttccggcgttcccgacgtgggcccaagctggtgtagcattctgctcgaggtcaatgccattctcgcaacgggaactccgcaaaggatagtgcagtggtctgagagccaaacggtaagtgtcgacgcaagtagtccagcgacgtgtggggttggaagagaggggagagtgcagaagatggcccagcctac

SEQ ID NO: 2244 - DNA, 2358 bp, Emericella nidulans
actcgtcgtaatgtctggatccgggctaagtcgtcgacggtggaaattgatgcgaacggcgcaaaggctgatgggttgggctcgggctgaatatagatcatgttcatgacggcgctgatcgtcccgcctgctataaatgcctggagcataaattttgcatgtccctccgctgcgtcggactgttgaaactcataagccgcggtgagaagacgaggcaagtgcccaagcatgttctaacgccatcctgtaacgcgggctagctatataggtgcgatccagagatcaggctgtggggtctgatcatagtgacctttttggaccagttaggagtatgcttgcctggacacgtctctcttacacacctcaaataaggtggatggggtaggtgtacagagtaaatgccgcgacgatgcctggagatagttaagaccggggagcctgatttgtttggagatacgcaccgaagttattggccccgcctttgagggcacagaagaggtcttgatctcatcatgtgataagcctccggtaatcctcatgcgggcatacatgggtgtcgttgaatacgatcgtctcgatcgactcatcccaccgttccccacagtggccgagccagaggacgtcccattcaagactatacggcgaccggtccgtttccggggccctggtcaggttacgcaccgccgttgagatgttcatcatctgattccgcagagcgatgtcccagtcaacatcgtcttccagaatgagggccgtctcaatctcggattggtagacgtgcttgagcaagtccagatgcgcgacgcaagctttgctggccccgggcgacggatgctgggtgtccatgggtcgccctggatgtttgcaaatgcttccaccagacgatcgtccactggtggctgtggggggatcgtgatctgaaggcccgtgaggtttgctgcggcatcaaggccccgcgtccgccatgagggatgttgtgacaaggcgaagatttgttgaaactatgttgtacggttgttagtcactcaccgaatcaggaaagcgtttcgcttactcctaacgtgttgttcccggcagtatcccgtggcaaaaatgcagaggtggggctgagttcgggaccctgaaaaaggtgcaagaatgcgaacaggacaagggcacccgcgatcagatatatgaggcgtaatcgagtcggcatcgttgcatctttctcttttcagcctggagtcgtgaaacgaagagatcgaatttgttcgtgcttgttggccccatctgctttggggccgcgcccataatcatcacgtgattcatatagaaacagaaagtgtcctgtcgatctaccagtctctgagtggcgcaccgatagcgagtttcagagtgccaaacgccgtattaaagggtgtctagcggcctaaggctctagctcttgaccctacaagttacaaccgttggcactgtgtcgcagatgtccaccacaatttttattgggctttcaaaaaaaaaaaaaaggaattagattagcggtcaaagtaaatcctggataatgccagtaaaaatttctcttattttttcattgggcttcatcgttagactgatgcagtaggatgtatagtaagatatatattactatatatagtacgataaatgtttggatatatagtagcttagttcatacttcatggttaaaccaagggcgtcgggcagtgtattatcgtaagcaacaagattctagctgagtagaatgctagaatggtagtccttgctaaacactttaatgaaaccgggcggcattggctgtttttatgttttaaggtttggttagattcacgctgatgaaggtctggatatgaattgtacctgggcacgcagagaatagcaattcttagcaaaatatgaatcgcgcatctccctgctctggttcggccagcagtcactactgtcttcttctgccttcgcctgtgcctctggaggtcaagactgccgaggagttaccattaacctctgatgttacactttacagtaaaaagttgcatgagcattgatggtaggcaggccttagaccaacagaataagcaagcaacatgcctctagccagagctgatccggtgatgggtagtatggccgcccaactctataatcagcctatgggtttcgtctacgccaagtctggtggaggacgaccgattgagtattagcggctatcagcgtacaatgctcccataatgacatctagcacacttgctttctttctgtcattctttaagcttacagggtggccgagggcctatcgcctagtaggacagcagaaatgtaacaaattttatggatagaagcatgtcgagttgtatatcaacgcaaatc

SEQ ID NO: 2245 - DNA, 1141 bp, Emericella nidulans
  unsure (1)..(1141): unsure at all n locations
accttcatcgacccatttctggacgccttcagggcctccccctcccattgggcgagtagagacattggcgcaacaactagggttgtatagggagccggaacgacaccagacacgggaagtctggtcaaattaccaagactctgtgttggagggaggtttctgtgggaatgaactaaacttaacatctcgatggttttccccaggcccatctcatctgcgagaatacctcctaggcaatgctgttcttgagcagggaagtcaagactgagctctccagagtaaggattgacataaaaatggtttatcccttcaataatcggcaggtccttgtcatcaacgtctttcagtggccaatcgtactcttcccagaggggatgtatcgagacctctctcccggatttcttatccttctccttcgagagcatccaataaagcgcttgtttctggtattttcgcagatccatggcgaacgatgagggaggctgggcttcaggcatgctaaagtcgaaggactgcgcctttttgtacaatgcatcaagctggtcttgctcaagctccgcaggttcctcgtctccggagtcggtattaccagacttcgcaagcttttatggccttccggtctgcccatttcagctgcgcggagcaaaccttcctttctctgcttcttgatttcgccatctgggttgcaggatttggaccactcatctaaaacagtgcactagagccaccggccaagaccccattgcctttttttcccgtcagtacctgtcgaattttgagataccccattctgcccgatccgggcccgcctcttggctcaaaacctctctctcctctaccctctgggcccacctttttgaaccttttaatccacgcccctacctttttcggctactctccacaacgtgagatcttagctctactcccctctctactcatgcgctcttctctactctctttccctcctcaccttccctatctccccctttaaaagccaaaacaccgccttccccctctaaaacacccgccccacctatttgtccttatcctcccccctcttctcctccttcaaaaccccaattcccagacccccctgaaccccaaacccgccctttgtaaattgccccccccnnnccccccc

SEQ ID NO: 2246 - DNA, 2682 bp, Emericella nidulans
ctacatgccaggcctcaaatttaagcgttctgacaggtattagactgtgatcaatggcttttttcgtggttggttaggattttcattgacagacgctcgtcatgacaagtggccactacagattccccaacatttacccaaggctccttttcagggcgtttttattatcaagcagatttcttggtttgcttgatttagaaagaccaaatcactccgtaccgtgatcagtggaaccgttccagggttgtggcgacttgctctcctaatcacaatggacgttcctggactctcaactaccgaggaaaactggccaacatcctacacggtgttgaatcagtataaaataataactttgcggcacttcttgtcgctgcgacattgctcgacattgcacctgaataaaacgcccaagtgctctgaatacagttgcaccatgctctcactccctgcgccctactataaacactgagacaaatatggagattcatgacacattcgctcattgcctttgagtcttgtttgttcttgttcttagccttctccactaatcggagagacgtcccgaaaacatctggtttctaaaagacaaaggaagaccacaacgtgcactttcagcggcaaaactcttgtcagaagcaatcagcgccatccagtccttctgtcaatcattctgtgctttggcctgccaagcatcgcaagccaattcaacaggtcatctaaaatggatcgcacccataacaccaccagccatggtcccgatagttccgaaacgcctctcaagcctacagcatcagcaacgaatctcggtcttgaggaagaaaagacatcagcgcgcttttcgtgtcgctcgtcagcatctagctcgtcaaagggctatcctcatacggttcaggtttcgcagtcgaaggcatcccagtccgataatgttaccgatgtgccgcaaccagggcgaggggcgcgctcttctacgcgatcatcgagccgggcaccgaggagactaagtgggagcacggcagcaagctcaatgagcgaggtcgagccaccccctgcatttctggggaaaattggtgtgtgtgcactggatgtgaaggcccgaagcaaacccagtcagaatatcctcactcggttgcagaccaaaggtgatttcgaaggtatagagtttggcgacaaagtgattctcgacgaagcggtagagaattggcctgtatgcgacttcctaatagcgttcttctcggatggcttcccgctggacaaggctatcgcctatgcaaggctaagaaggccattctgtgtcaatgatctgcctatgcagaaaattctgtgggatcggcggctgtgtctgcgcatcctggaccatatgagtgtccctactccgaagagaatagaagtcaacagagacggcgggccaactttggaatccccagaacttgcgcaacatgtatacaagctcacaggtgtgaaacttgatggccctaccgatggcacagggggaggcacacccaaaacgaagaatgtcactttgtccgatgatggcgattctcttatcgttgacggcaaacacttcaagaagcccttcgtcaaaagcccgtaagcggggaagaccccccatatacacatctactttcctaaagaccagcagtacggaggcggcggtagacggctttttcggaaagtcggaaataagagctctgaatacgaccctgatctccgtaccccccgttcaatcttggaagatggctctagctatatctacgagcagttcctgagagttgacaatgcggaggatgtcaaagcttacacagttggtcctgatttttgtcacgcggagacacggaaatcccctgttgttgacggtcttgtccgtcgcaatacccatggaaaggagctgcgatatattaccaaattgagtaaggaagaagcgtctatagcctcgaagatatctggcggattcgggcaaaggatctgtggctttgacatgcttcgtgtgggcgagaaaagctatgtaattgacgtcaatggctggagctttgtgaaggataataatgattactatgacaggtgtgccagtattctaagggacatattcatcaacgagaggcgcagacgtgaaggtgtcgcggaggctcctgaagcatccttttcagatcaaagtcattaccaatggagacactcggtgtcgcaccgacacgcactaaaaacattgctaaagtcacccggctcatcaaagtctaacggcaatccacaacatcagagggattcggatgttggatctttggagtcatcacaccccagccttacagcgcctagtcacgacggcatggacttcaataatgggcgtgccggcgttatcccaaaggaacagtcagcatcacccggtatatgcactcctcagggtgcgaatcaaccctcacctacgatgcacagtcttgaggcaaatcctccgccgcctgcctctaagcactcatggaagttgaagggtatggttgctgtcataaggcacgccgatcgaacaccgaagcaaaaattcaagtttactttccacagccagccatttattgacttattgaagggccatcaggaagaagttgtgatcaaaggagaatctgcgcttcgcagtgtataagagactgttaacctcgctatggaacaagggcttgaggacgcgggcaagttcaattaatg

SEQ ID NO: 2247 - DNA, 3299 bp, Emericella nidulans
cacgatgaattgtagcacggaccgcttatgcacaggtttaaggaagacgtacgtcgtagttcagccttggtgagggacagtctcaacgcatctgacagagtcgacctccgacacagaagcgagctgtccaattcattgggacagcggttcgatagggaagttcgtttcgacggatattgccgcggaatggatatagttgtaagcctgagtggaagaaacgcagttcgccctacctgccgcggaacccggtacagctggttgttgagtccgtagcaacccgaacagggagacgatcttctcacttccacggtgcttggtgatatggaaaggaaccgtactgaccgtctgatcttctctagatctcgtctggatctcgtctcaattcgagcttatatcgactgactgaagggatacctagctagaaatcgggagtggaagacacacacacctagtacctgagactacgactcacggctcgaagacaaccgtgccttggggcgggcaatctagaacccctagcttgcaagcatacttgtatatagatcgcgcggtatccacaatcccgttgcgtctctgaatatcatgcaaccagcagaacgaagtcgtcccagtcaaggtagtctcatagcattggcttgagcaaactaagcacatgaatggaaagcaagcacgcgtgtgtctcagttcaatacttgctttcgcattatggaaaccagcagcgagcatgtcggtaatccctttctgcctggcggacgaactcgccataatttgatcatggccttagagcagtacatcaataaaggccggcccaatatgtcaagtaataggttgagtcgttaaacatgcagagaaataggcaaatggagtgaatagacagcggcaaggacgttgcccgttcgagtggtatgctcgtcccaagggccagggtgagccagccagcctcggttacagtacgactccttgcattaaagacgagttgtatacgtctcgcagttcccagcaaatcaattcttctgggcactccagtaaaccgagcattccacaaatattgacccaagctactgtaagaccagatgcatactgctcttcaattcgaaacctctgccaccggccgaacatctgcagcacaagttgatagctctgacgttccaaaaacataactcgctatggagtaaagacaccagaggatgcggtaaccattacatgagtaatcccaggcaggataaagccagagacccgtatcccagctcacggtacatacgtactctgtaaatacagccaagcgagctgcagccggccggccaggcgggcccggagccggacatgctcgggtgatctgcagcgaggatccaaggccgggtcattggaagagcaagatatgacaggtcgttgttcggtgcgtttgcttggactggtatagtttaatatatggagctgcggtggagagtccaattaggttaaagctatggttaggtttggaactggaagtcagacctcgtcgcagtgactgacgacactcggtcggagaattatctcggtgctttcataatattctgatcacctgataacgatgatgtcggtaccaagtagccgttgaccatggatgcatactcgaagcgcactcatacgagcaatgtgcggcgagcaacctgcaatccctgcgacctaagaggtccaaggccgctagcttgcctaatttggcacggagctcgagctcaagctgacgtgataagtgacgaaataaaccgggctagctgcacttcagccgcgagtcgcgagcgaagagccaaccaggtgtcatagacgcagtttgggggctgccgcaaacaataaactcgttatggagtctggagcttttgataagacctctaggataactagcatatagccaaccccgccgaggctgctggaggaagtctgtgcacaacacaaaatacgggattggctgcatggtgcatttaaagctgcaagcgcttgactctattagggaacaggatgggcagcctgattggtcggcagtgagacactgaggttggaattaatgcaacggttctgatgtatagactctgcaagtacggaattacacatcgaatttgtcgcggctatgcctgtcatctcaacgggcgcgtcaagttgaatttttcaagagagctgtctggactgcggttgtggaaagtgagaccgtacggcaagaccccagtgcgggggaggtaacgcccgcataatatggtgtgtatgagtagtatgcttgaagttgatggcctaggaagaagctcacagagcaaatgtttgcgcgttcaagggacgtggaatctgccattcatccagtgaggactcgtatcgtggtgatggtgggtttgtgcgtcgtccttcaagcagtgattcagtttcttcatgtattagggtttgattactcgaccgagagggaccctctgtggcttaggtacagagtacttgcttcatgcttggatgcgagcttcttctcacaggtcgatgaggtgtctagacaatgacttgcagtcacggagtcctcatcggccgaaaccacgccgtgaggcaccttgagcacattattgcgactgcagagactagcttataagatcccatgcagggcgacgagtgcagttcacactgcagacgggcgggcgtacggccggtcgtgcggccgatctggccgatgatcaaatcattgggttcgttctgccgcacccagttggctctgatagcattacttgctttttgcagtgggtagagaggtggtaggcgtacagaaatgcggtccgttgttctgatatcactgtaccaccccggttgaacggaggtggaggggaagaggagagtgttggatagttctttttcgtctcaactcagtactctgtacaccagtcagtagttgaggatcttccaagattgtaccgtttcgggtcgggttgttgataggtatgctttaagaccctctatggctcagctctaaagggcctcccacaaatccctctaccgttagttcgtacgaatacgaagagcctcaggtttcaatcagatcggagtgcaatctcaaccaggaaggtaatgccggactcctgggcgggctcaacccgctcgcgcaaaaaaagggttcaactacatgtacagtagacaggccgagtattagcccaggcctcatagccgtggctgaggcgatcccgaggtcgcaagcgccaccggcttcaatctccgacttggactacaatgttcagacgaagttagaacgaaatttgaactttatgttcagctgctgtaaaggagaaaatagccccgta

SEQ ID NO: 2248 - DNA, 1895 bp, Emericella nidulans
agtaaatgtttgtctagacacaagtcagcaccacaacctcaacctcaactgtacattgttgtatgtacgattttgttaagttgcctacacattgattgttcactgttccccaaggagccgaaactgtctaatgacaggcaaatgacagatatgaagtgatgctatcagaggacgatcgctacagggtgagttgtgcaatttgaaactgttcatgagtgctcttcccccatagcatttagtcattgcaatgaacagacaatcactgcaggaacaaagtgctcaaatgtcatatgaaggctttaattagacattgaattgagagttgaggtatgggtgaaaacaacgccgagtgcgacaaagcccaagattgggcttgacctgtgcatatggcgccgcctcataacaaaatgtcaggcaaatagccggggaggaaaactaggttggtcttcggttttaggaataaatacctagaagagtttctgctggatcgaaacgcgatagatcgagctgctacatagtacatagagcagaatttacaaaaggaccatggagttgtacacgagaacaaagcggcagaagaatatcatttacaatatctgttgcattaatgctgcgaaaatgtagtcgaagaagtgaaagcatgccatcaagggtgggtatccgttagaaaagatttagaccggaagaaaagaagaacaatgaggtagtgtcgggcagggtatagagcaaaacacctcaagtgtatgaccgtgggcaatggtaagagaacgtgagcaggtagtgcatgtaaagcggcacgattatataacctagtgttagagagacatcaaaagagagatagaaagggaatgtgttcaatatgtacaagccggtctaatataatagagataggaccggtggcttgagaggacaatcatatcaccactcgatggctagtcgtccgtctgccagaaactcatggcatcgatctaatgaagggagacaaggtgattcattacgctttgagctcggcaggggatggttcgacgggtccggtgggagtggtgctgcgcttggatgcgccgtccatcggctcagtggtcccgttaataacgtcgcgggtgagttcgacgtagtcatactatgcaaaagtcagtaggaagcgttgacagattccacgggggacgtacagcaaattcgccaatttcggcgtcatcgataccaaggacttcatcttcttcagggacgcgcaggctaaggccggggatcatgttgatgataaagagaatgatgcagctgccgaagaaggagtaggccatgccggtgacggaatcggcaagttggtagccggggtggatgtaattgtggttgatccagccgccgtcgatctcggtagagccgtccaggtgggcaatgtagtcactacatagtgggttagttagattagcaaagagtcaggtggaagggcttacgctgcgaagagaccggtcaggaggttaccgacaagaccaccgataccgtgcacagcgaagatatcgagagcatcatcaactcggatgagatacttgactttagtcgcgaagttgcaagcagcagcaccgacaacgccgaagataaacgcagcccagggagtcacgaagccagaaccgggggtaatggcaacaaggccggaaatcacaccggaacagaagccaacggttgaccactttctttctagacggtagtcgagcaagcaccaggtgacaccacctacagaagcagccaagtttgtcactacagcagccatcacagcacgcagattagcgctcaaggcggagccggcgttgaaaccgaaccagccaacccaaagaaagaaaggtgacaatcacaacatgagtaacgttgtgagggcgatagttgaggtcatgagttccaga

SEQ ID NO: 2249 - DNA, 472 bp, Emericella nidulans
ctttaacgactccttagtctagtgccagaagggggaaaaaaaaccgctacacttgcattgtttctcgcgttgatatagttaagtcaaaggttgacaaaaagctaactaaaaagaaagtcaacagaaaacggccccgtaccgaagagtcccccgatgataacactgagcctgtcacaccacaagcaaacaaacgccggaatcttggaccgcctggtagtacccctttcgcccgacgggcacgcgtcttactccccttcgccgcctcccccatacagtatcgttctctgagaggaagcgacgccgtgacgagaaagccaaggccgcatccacagtacaatttttcgtcttcctcaatacgtcgctcagactgaagctgatcgtcgcgcatctgaaaccaccgcactaacacctctctccaacgagcccttacaggccgattttaatttctcatctgaaccagctcagacggacg

SEQ ID NO: 2250 - DNA, 1006 bp, Emericella nidulans
  unsure (1)..(1006): unsure at all n locations
cttgcttggcctgccagagtccatagtctgacctagtgctcgataaagtccctgacgaattgtctcagagctcgaccgcggcaacatggccaacgctatcaccgacaactttatagaaacgtcggcataaaccaagaccaattcaacgtcggtcagcagatgctttctcttggaatcgtgctgacggaaattccaagcaacatgatcctgtaccgcgtcggccccggcaactggctcacactccaacttttcctcttttgcatcgtaagtacgtttcaagctttccagcgcgggtacggagcgttcattgcaacgcgtttcctcctgggtatcaccgaaacaggttccattcctgggggcttatggacactctcaacgtggtatgcacgcgacgagacgacanagcgtatcatgatcttcttttctgggaaccagattggccaggcgagtgcaaagctgctcgcgtatgtcatcttgcacatgcggggtgttggaggtcaaagtggttggttctggctgtttgcattgatgggttccttcaccgtgtttagcggttttagattttggttctttttgctggactcgttcatgaacccacacagcacgttcctgccgaaaatgttcaggttcacggagcgggagttgcatattttgcagacgagggtcttgcttgatgatcccatgaagggaaagaagaagagaaagatagggcttggggcttttaagagagcggttagttcgccttccatgccttttaataactgatgctaaacttatatatatatatatatctcgcgcggatagttcacggactggcgtatctgggtccatttcctgattacactgtcgaacaatggccccaacgtgctttcgacacttatgctccctcaattatcaccagtttcggcttcggtaggctggtcagcaatgctatggcagctgtcggtctatttctacaggtcccagtgtcgttcgcattcagctggttctctgatcactagtgagt

SEQ ID NO: 2251 - DNA, 853 bp, Emericella nidulans
gatggtacctgtatagctaactgggccgtgacaacaaccaaccctcctaagaaagagccttgactaagccgtcacgagtactaatcctacccgctggcgtgccctgacccacgatgcgattaccccagacccgcagacccactactaacctctattttgctagtgtctttcacggcttcgtatcagccttatagtaaatgactatagctggactcaaatgacgagatatttgacctaacagagcctgtgagacgtgatcaagcttgtatgagtttgtttccaggcaagcatactgcaacttggactaaggtcacacatatctggccatagcccatagcctgatctgtcaggagagttacctacatatttaactagcccgtgacaagggcgcttaccagtctaatctgaccgtaatatctagaagaatgctaggaccagctgtttctctgagtaatagacttgctttgcttataaatcaggtggttttgactgttggagatagcttcaaacctaaaaatggaaccatctcagcggctagagggtgacggatcggtcgaggagggcgggccgtccgggagatacgggaacctttgccggacccggcatctttgagagccgggagtgccaagaacgtatcagcggaagagccaaagaatgagctcctggggccattccagcagttccgacttccgaagagcgcctagccgtaagttgatgctatgacattagagatctgcccagttatatcgaaactatgtgcatatatacaagacaacttgtcaaaatctcttcttattctatccaccagaggtcatgtacagaaaccgtgatggggaaagactctgagggggcg

SEQ ID NO: 2252 - DNA, 3009 bp, Emericella nidulans
cgtcaaaggctgatgacttccgctattatgagtcaaggtgttgttatgtaatattatctcaagcgaactcgagtactttatactcgtaacctttttttcccttttcatgtctatgtagtcgttactgatcgtaaacatatttttcagaggccattcgtactcagacagtctgaacagcctgcggcttcgtcctccccaaaccatctttcgcatagaaatccattggataaacaccttcatgcgtcttctcccagtcgtctcgaaccccaagtgcaataagcgcctcgtagggcgtcaatagcggtctcgggaacgcataaccccaatcgatacttaatcgcggacaagcaatctgcacccaacactctacatccgacattgccgccaactttccgggaaagatctcgctcaaaagcaaattgacgaaggggatacccctctcgttgaggtgcgactcaatcatggccatcgtatgtgggtttccctgacgaccgagggagccaagaatgataccccattttttcgcagtgcgggcggcggcgatggcatcgcggcggagggtgtgcatttcggtgtggtcataggattcgcggctgagggtgcgagagtaaggatcgtcgcggttagcgggtatggaggggttatggatcatggcagattcgaggtggaagcggccgtcaccgaggtacagcaagtagtcaatttgctgagcagatagggaaggggaggtgcagcctaatatctcgccttttgacagcggtgtaatttgcgggatgacgacgttgaacccagcgcgctcgagaaccggtttcaatccgtggagcgttgcattgaattgaattgtgccaacagtggcgattgtcttgcctggttgaatgttgcgctcgagagtcgcaatgaggtgcgaagcgtcaatgctaatgtcgacgaagatgtatagcgttttgatcttcgttacgtccacgggaatcaggcaggagtgggcgtagtggacgagaaggtcacagcccagagcgcgtgccgtgtagtcgtctatgcagcatgcgccataggtgacgtcgcccatgatgagggtttcagtgccggggcaaaattgagtgaggatgtcggaaattgtggttgcgaagagcaggagtccttcaggaaattggagagctatgcgttttgcgccggaggtgcggatgcgatggatggttttcggaatctcgaacgagtaattttttgggaggaggtcgatggcggcgagaatgtcagggtcttgggatatttccggaggaacttgatttaaggtcctgggggtccttcggggtgttgctgttgttttttagtacttgggcatggctgaaaggcttctctactgtacctttttgtatgcttgtggattcaacatcttggacgctcgttgatgactgtgcttgggtgtctgctgtgcgtctcccaacgaaccttttctttggttgccgcagagaggcgttcgcctgaagtttttcagtagagtcgcccattccgccggttctaatcaactttcgtgcagagcgtcgactttgaagtgggatgaagccattttttcccacttgggctctgactaagaggggtcaggtggggtttcgagtctaacctctttcggcattgtcacttgcttctccgcatttcgccctgacagtattccactttctggagctcatggcatgattccatcatcgttcatcatcgtgatctgaagtgatgttgagactctgtttcttttcaattctccacaatgattaaatcacggcccggatggagatttctgtcctctcttcgagcccctcctaccagacgctttgcgacagaggcgcggttaacttcggaccatgtccgcatagttgaagtcgggcctcgcgacgggctgcagaacgagaagaagtctatatcgctcgagacaaagcttgagcttatatcgaagcttgcaaagacgggagtgacgaccatagaggcaggttctttcgtgccggcgaaatgggttccccaggtatgtctccaaatgccgcccgctcgtaaccgataaagccaacgaagttcgaaatttgatgctgatatttgcaaatgatagatggcaagtaccgcagagatatgcgagcacctccttcaaaccccgccgcagtccctgaacgcgattgcatacaattatcttgttcccaacgtcaagggattagagggtctcatcaaggtcatggatgcaacaggggcctcggcaagcacaccgggaaccaaaacaactccgcgacaacgaccgagatttctctttttgctgcagccacagaagccttttccaaagcaaacaccaattgtaccatccaggaatctctggaccgcattcgccctatcgtagcattggcgaagaccaaagacattcgagttcgcgggtatgtctccgttgccctaggctgtccgtacgaaggtccagatgttccgccgtcaaaggtggctgatatcacggcaaccttgctcgagatgggagcagacgaagtatcagtagccgacactacgggcatgggtactgcaccgcgcacgatggagcttcttcaggctctgaaggcagccggcatcgccaatacagatctggctctccatttccacgacacttatggccaagcgttggtgaacactatcgtaggcttagagcatggggttcgcatttttgacagtagtgttggcgggcttggtggctgtccttattcaaaaggagcgacaggcaatgtctcgacagaagatctcgtccatacaattcatggtctcgggatgcatacaggtattgacctggaggagatgtcgaggattgggcaatggatcagtgatgagctaggtcggccgaatgaaagcagggctggcaaggcgactatagcaaggttgcaatcatagtctgtatactatgcaaggaaggcacagtcctgcaagatcggaaatacgttgttatcattcattctgtgcgtatagaacggcttgccttatctatgtctttatctcctt

SEQ ID NO: 2253 - DNA, 2464 bp, Emericella nidulans
ggagttaatgcaatagcgaaccttaccaaattctgtgaagcaccggctgggggggttgatgtgacgcagggcagagtcagtgtgggaggatgttataacaaatgctcagttgattggataggaggcctactccgcacaaacgccaggatatatataccccagccatgtcttgaatcatttaaagagacgacgatgaagatgtctagtttctaacgcaaagaatgaatataatacacaatgcatagcactgcagcaggatatcataaagccataaccaaacgccattccgaaaaatgccaccaacctggccgacctcatgcgccgttgctaaaccgaaatagtgataatacagccataagtgtcagttgaaaaagtggtgttccccgcaatgccaacgcacttcatctcaagttctgactgtggtaaaagctcgatggtcagaggtaaatgctctcacctcgcttgggaatgtggaaaacacatcccaaatttcttattgactccacctcattcaactcttcaagaatctttgctgcgggatctgggccgtcatgcaaaagttctttcacatgaatgacgtacactgaaaggccagccaaaggcttttctacttcgagagcatccctagtagtgcacgtctgacggcaaagaccttgacgctcaatggcgaggggtaccgagtccgatgtctcggtagcctgtctaattcgggttccggaagacgcacgcttcctgacgctgcttcgaatcgacacagctctccctttgctatctccccgctgactactcgactcggaactactgtcccgtttgcgtttgggaatcggcggccacattagtcccttgatgtcagctacgcgtgcagctagcacggtcaattcatcgactagatggcgcgggcagaggtggccaaataaatagatatcctcagtcgaatcaacataggaacattcgatgaaaatggctcgcaaggtaccagaagcgaccttcggtgcagcgatttcccatactttccgattacgcggattgaaggataccgaatcaggctcaacatcgccaaaaatgatgatctcagttccagttttctggtcgcggaggaagaaggcggagctttcgaccgtagtccacaatgtctcctggctcgaagacggcggttgggaatgaattggatccctaaacgttgttagctcagttgttgatgcaccttcaattatgccgcttaccattcacttggttgccgtccagcttgtttcgctgaagatatacttaggcgacgctcagtacctgctttcaccttgcatcgcccatggctgacactaaaacctcgaacgagcaatccttcgccagcttgagtgtaaccttgttcatcgccagagcccagcattgggttgcctccattcgcgagacgctgatatgtgatcaaaccaataccttcatcctcgtcggaaaaatttggccaaatcaagttgttgaagatgtggctcttcatggcgtctataacagaaggcagcgcggcaacagtctttggaccgttttctttggttagaatcgggatattcatggccaaagccgatacatggtccaaatgagggtgtgtgatcaggacccgtccgataatcttcttgaaaacatgctttgcgtttgcaccgctggtctcatacggtaggcgtaacccagcaaaagggccagacgtgacgatgccgttcttgctcctgcacttttccatgacgtgaacgattccagcaagcagggtacctgcatcgacagcgaccatggtgtttggagcccagttagtggccgtggaccgaacgaggataccggtgactctgtcttcacgagggccccccgttggaccctggcgagagacaattagtttgatgctgtttttctcgccaaacgagagcgggacaatctggttgggataggagagacgggcctcataaagagactcggctgggcaaagcttcacggcaggtggcaaggacttaccaaaacaacaacatgtagcgcaggctctctgcctcctcggtaatcgtttctctggccacccgtatcatcgctagattcatcatcttcgagagtttcaatgctttgagcagtagagagcgaagaactttctgaggttgggtaaaagactggcggataatctctctcttcttcagtcgggggaggggctcggtgagaatcctgattgtcatccttcgagcccttgttgatttgaggttgaaggtccgtgtcgtcatgcgcagccttgtcatgaaccgctctgtcgacgtgagcacccttggcgtcttgagcactctttctgggtctgaccggccttctacggctttctgagcctgtgaggggacggccattcttctttggaggcataatgactatattctccgacggtagaaataagcctggggttgcgccgatacctgcagcccgctacttgctggccggggtgcagaaaaccaaa
